United States Patent Application Publication US 2011/0014706 A2 - sequence listing, part 51

SEQ ID NO: 159206 - DNA, 6274 bp, Arabidopsis thaliana landsberg
atggatgttatgactaatattcttcataattcgttggcttatcttaagagtaatactggtgaaggtagtaatgtgaacaatgaggatcaatcagagacggtttttacggatttgagacagttggaggagtattcacttgcgggtatggtttatttgttgcaacaagttaaacctaatttgagtaaaggtgatgcaatgtggtgtttgctaatgagtgagcttcatgttgggagggcgagtactatggatataccgagttctggaaaaggggatagtagtaatgtaggggttggtggtgctagtagtactgtaaatggggttggtggtgctattgctccggcattgtgtagattccatggaggttggggttttggtaatgggaaaggacccaagttttctggtaatgggttttctttgcacagtgaagagttaacgttgcagagagagattgattgtccgaggagatttaatctctcaccttcgatgaagtctttgttgagagagaatgttgcagcctttgctgctgggtatcgtgctagtatggagcaaaagaagcaggtgcaaatgcagtctgaaactagtggtactagcttgtcttgcacggctgctgctacacattcagagaagtgtgagcagccacgtgtcttcggaagtgaagaatgtttcagttcagtgctggagaaattccgggatctgaaccttgatgacaatgttgattcggcacctgaggagctgaaggatgatgctttaataggactacttcagcaggttcaggatctcaaaaagcaattgaaggagaggaaagactgggctcagaagaaggcaatgcaagctgcccaaaaggtcagcgatgaactgtccgagcttaaatcgttgaggagtgagagagaagaaattcagcgggtgaaaaaggggaaacaaactcgtgaggactcaaccttgaaaaaattatcagagatggaaaatgctcttagaaaagctagcggtcaagttgacaaggcaaatgcggtagtaagggcacttgagaacgaaagtgcagaaatccgggcggaaatggaagcttccaaattaagtgcatcagaatcgctcacggcatgcatggaggcctcgaagaaagagaaaaaatgcttaaagaaactactggcgtgggagaagcagaaaatgaagttgcaggacgagattacagctgagaaagagaagattaaggcactcaatagagctttagctcagatcactcaggaagaaaaagaatatgaggtaccaagtaatgcattatcttcgtttacacaccgagatttttctggttcttcacaatttttgacactataacctgtggaagtccatttagttagaacataagataatgaacccttctctttgaaagcgcatctaattatctgttccaaggaattattattcctgtaaatacttttcatgggccaagtctttctctctatgctgctagatggatcatatttgcatagagaggttgtctttttcaggcaacttttcatcttgttaatatgtatttgcaggcgaaatggaggcaggagcagaaagctaaggagcaagttttggctcaagtggaagaagaacagcgctcgaaggaagcaattgaggctagcaacaaaagaaaggtggaaagcctgcggttaaagatcgaaatagacttccagagacacaaagatgatctccaaagactggaacaagagctgtctcggctcaacaaagcctcttcaactgactcaagcctccaatccaataacacctctcacacaaaggtgaaatcagacaagtcgaagggagaaacaatgtctaagctgcttgaagagctgaataggcttgatggatcatatgagaaggaagcaaactatgaccgggaatgtctgatctgcatgaaagatgaggtttcggttgtgtttctcccttgtgctcaccaagtggtctgtgcgagctgcagcgatagcttcatgggcagtggcaaagcgacctgtccttgttgcagagctccggttcagcagagaatccgtgtctttggagcgagttcttagtaacaaagataattatctggggtccaaagattaatcacagcacaacttcttttgtcaggtgtaatacttttttgtttgtttgtttgtttgtttatggctctgtctctctacttcctattgtctcttatcttcaatctgagggggtttggactattcgcatcttttacattgttttgagttgttcaaagaagatgttgcctggtttatgatcttcccaggattcacaatgtaagtaaataaaaattctaccacctctacccaaccctgaaacgtcgtctcacaatttctgatacacatgaatcacttgatatgtttttcttaccatgaacctatcacaaaaatttcatttttagcttctaacttgtggctaaaacaagttaagcttcaatttctaatattagcccattgttcttctgtaacaagtttcatttgttatcacaaaagctaatttttcttttcacttaattttgtctagtaaaatttttggaaagaactctattgacatttcaacaacctcggaccaaaccggtctacaccgttacagaccaatcaaaatacggaaattcaaatctatgtattaaaaaaaatcactacagaattacgtacgtacgtataaatagaggttagtacattaatcggcgaaaaaacattcgacgtagaatccgccttcggagacttgagtcgccaccggtgagtacttcttcgatacattccgccgttcgtttcctcttacttggcgtcttggggtaagcttcttcataacctatcatcatcctccttctccagctcttcgagtttcagaaaacctagatctctaagtttttatccctaatcttttagggtttctaccttgttcgatcattctgaaattatttgtcttctctcggaattcaattcctggggactttctcctttttggttagagaagtttatgtatactctctaactctactgttgtatctctgaaacaagtgatttgaaatttatagctcttctgataatcgaaatctgtgttgatttcgtggtgttggtttatgattgtagtgcagtgagaatggggagcaatgatttgaacacctgggtttcggacaagttgatggttctgctaggcttttcacaaactgctgtcgtgcagtatctaattgcaatgggtaaatcttggtgttccgttttggatcaagcaatttttagctatgattgttgttgacaaagtgagtttgtcttttcttgcagctaaacaatcaaaatcaccaggtgaactcgtccgtgaattggtggaatgcgggttttctttgtccggtgatacccgcgcgttcgcagaagaaatttatgctagagctccccggaaaacccctggagtgaatgtgaggccctcaatgactctcgtgctcttttctgagtagatatattgttgattcttgctattggtaaagaatgtatgacataaacagagtcataatttggttggttttcttgtttttttcagctctaccagcaacaggaagcagaggcagcgatgctgttgaagaagcagaaaactttttcccttttagaggctgatcatgatgaagatgaaaacaatgtgaagaaacaatctgcttcgaaaaccggaaagtcagataaaggccaaaagaggttcaggaagaaaagtgagcaattggaagacgacgatgatgaggcaaattattttgatattttctattcaatgacagacttccagtattttatttatggtaagatatagctccatagctcttctaatcatgtggtatcctttctgactaaacaacaatgcaggtagtgattgttagagaggacaaaaggaatgttaggagaaaggtttccgaagacgaggatgatggcactgaggtatatttactagtggctaccattagggtgtttgcaatttatttatgttttggatccttaggaaaaacatagtgatgtgtggataatacctgctttcataagtgtttttctgacaatctgctttaatcacaaataattggcacagtctgtagaggaaagattacgtgaccaaagggagagagaagaactagagcagcacctaagagaacgagatactgcacggacacgaaaggtatgtcgtgatctgttatgtgcgcctcaaaagatcctgtttttagtagttcttatgtgtttcctttgcatacctcacaaggaacaagctatccgttctcttcttgacatcttgttttggctcagttttgcggaaacaatatacaagatgaactagttatctcattcaacttggttaagttagataacagaactgccaaatctctacacttaatatgccattcaatcctgcattctttggatgcttttgctagttaacgaaaagcatgtgaggattcattgatccatttattatttgctatctgatctttttattactgacctgtccctttcttttctttaatgaacagcaaaccgagccaaaaaatgtcaaagaaagagcaaggtccggcctattatagctcacttgaacatgtataagcatctttgtgtgtgaaaccaaaattttgtttcttctgctggactcatttagtaattcttcgattgtaaaacagaagagtttgttcgaagagatagtgctgtagacaagggtgatattgaatcattaaggtacttcgttctctacctaatcttttcttccctgcatcggtatgtgatggttcctctttgagatagacataaacatatccatccatattgaaatacagtaacatggcatgattgactatgtaagatacttgtgggttaaatcttattcccgtaattgaaataccatgtaaagttgccagttaagaactattgacgttgtcaactgtctcctcattaacaattcttactagtcgtcctaatgtttgaaaattagctctttaatgtcttttcactcattcattgttattgattatgttttgctgattcaggaaattctcatggcaagaatatatgaagaaaaggaaacagaagaaagtactagagctaaagtacatgactttaagagttatatttctccttggaagttctgtacctaattatactgttgatcctaaattgacttctcctttctcctcttttcttcacagggatgatatagaagatgaaccatacctttttggagatgaaaagctcactgaaagagaaattcgtgaatttaggtaattaagacatctattgcaccaagatggagcttggttgctttggtgattataaaaagtcacagtagtggcttacttttggactttttttgttacaatctgaagctgtggtttattctgatttgctaggatttgttaatttttggctaatataattgagcattggtcgatctgatatcttgacagatacaagagagaaatctatgagctcataaagaaaagtacacaagaagaagataatgtaggagaggtaattgcatcttactgtacccttcttaactttttggctattttttagaatgcttcaagtgttcttgatgattttagttttccttcttctgaattatttgtacttatctcttttttttcaacctcgttggagtacagtatagaatgccggatgcatatgatcaacagggaagtgttgatcaggagaagaggtttgctgtttctgtacaacggtacaggtgagatgagaaagaatgcatgacttggaatccataacattctactttgcttacacttttaaaagatcactcttctttgtgttgtaaaaggctaacgtatgttctaaattatcttatttgattagggacatgggttccgcagagaaaatgaacccctttgcagagcaagaagcttgggaggaccatcagattggtagtattctgtttagcgcttttaccaatgaccaatcttgttttaaatgcatgctctatttaaacgacatcatttgtgatattaactaaatgacattttcatgcagaaaacgcagcattaaaatttggtgcaaagaataaggaggtctcagacaattacgagtaagatttgttacctttttgtcctactcgtgttatattttgatttcaaattttaccttcgactgattatccttgctatctttttgaccatgaaaattacttttgcaggtttgtatttgaagaccaaatagacttcataaaggcatctgtgttggctggtgataatggattgactatgatacctatttatgcctgtagtatttctttttatgca

SEQ ID NO: 159207 - DNA, 677 bp, Arabidopsis thaliana landsberg
  unsure (1)..(677): unsure at all n locations
atcccccaaggtgcacttgaagacaccaatatctccattttcccaaccttcccaagtataagcaagacccccaaacggacttccgagtagacgactctcagcaatcagtgatgctatgcccagcccactcaaaagctccaaacgtacactgaacacaagcagagtgatnnnnnnnnnnnnnnnnnnaactcaagtcaacgagtcgaccaagaagggagtaaaccatagccgttggtgagttagctcgtgcttaaaatactggtgttaggcctgaaactgggttttattctctttggtgttaatgtttccttcttcctcagtttctcagagatctgtcggaagtgggtataagatctctattaagagcttgagaggcatcgaggtgagtgttttttcttcaagtctaaagatttgaagaaaatgacttaatatttgtcgaagcatttgtttgctaatagtaaaactctttacatagaatcgtcgagcacgcatggtgcaggaaggaatgactccattatcaggccacaaaggatagtgagcggctagagagaaactgtatgtttctatcttatgtttcgcaattacttcttcgtattttttgttgttggtaaagtaataaaatggctagtatgatatatgtagatagttcttcgacggttcatagtagtataatttat

SEQ ID NO: 159208 - DNA, 1656 bp, Arabidopsis thaliana landsberg
atgtttgaaaacaaaccggatgatagtcccgtgtatctcgcaacagcaagccatgatcaaaccatccgattatggcaagcccgaaccggtcgctgttacttttcctttcgctatcctgatttggtgtgtgttttctcaacactaaaatctctgtgacatatgcattttttaattttttgacatttcatctgaaacttttgtattatattcagcatgtgaataggcttgagctaacccctgaaaagggtaaactagtagcagcttgcaatcctcacatacgactctttgatctcagatcctacaaccctcatatacctgtaaatatccttctttttgatgtggtttttgtttgtttatctttccttttgattgaatatatgaatgatcttgatggagtctttgtgcacattaggtgaggaattttgtatcacacaccaaaaatgttatggcagtaggattccaatatactggacacatgatgtattcagggtcagaagatggctctgttaagatctgggacttgaggtatatagcacattcatgttttttttctctcttctgtatatagctcaatgctcattttgatttgacccgtaaaccgaaaatgcagggttcgagaatgccaaagggagtttagaagtgtttcaccagttaacacagttgttttacacccaaatcaggtacatttgttagtgttgtgttgtagcaatcggcttagttgtcttaattgttatccttttttatagactgaattgatatctggagaccaaaacggtaatatacgtgtatgggatctcagagcagatttgtgtagctgtgaactggtacatttctttatcctagttacattttctaagaatctgtagatatataatattactttggtgtataactatatataggtaccagaagtcggtacacctatacggtctttaatggttatgtgggatgggacaatggtggttgctgctaacgaccgtggaacatgttatgtatggcgctccttgtgtgaaagacaagtactgttctaatcataagaaaaactttctttcttccattatgctgaaataattgttcatgtcatttaaaaatttgattgtgttttttgctagacgatgaccgagtttgagccccttcataagctacaagctcataataaccacatccttaaatgtctcctttctcctggaaacaagtaattatgtgtttcttcttctttctcttgcaacctgttttctttgtcttctttctttttgtaaggtcttatatatttgttagcagatatctagcgaccgcatcatctgataaaacagtcaaaatatggaaccttgatggtttcaaacttgagaaagttttaacaggtatatggtctctccgtgtttctgaaaggggtatgtgttctcttttacactctcatcaatatcatttaacaggtcatgaaagatgggtatgggactgtgacttctcaatggatggagaatatcttgtaacaggtactacttaatctctttacactggaaaacttgtgtgagacaaaagagtatttaaaatggttttcactttgtactattagcatcatcggacaccactgctagattgtggtcgatgcgagcgggaaaagaagagatggtgtaccaagctcatcgcaaagctact

SEQ ID NO: 159209 - DNA, 3398 bp, Arabidopsis thaliana landsberg
gaaaagagaagcatgagactatttcttttacttgctttcaatgctctcatgcaactcgaagcatatggttttaccgatgaaagtgataggcaagcgttgttggagatcaagtctcaagtttctgaaagcaaaagggatgccttgtccgcgtggaataactcattccctctctgcagctggaagtgggttagatgtggccgcaaacacaagagagttactcgtttggacctcggaggattgcagttgggaggagtgatatcaccatctattggtaatctttcgtttctcatatatcttgacctctctaataactcttttggtggaaccatccctcaagagatgggaaacttgtttagacttaaatatttggctgtgggctttaattatctggaaggagagattccagccagtttgtccaactgctctagattgttgtaccttgatttattttcaaacaatcttggagacggtgttccttcagaactagggtcattgagaaagcttctttatctatatcttggtctaaacgacctcaaaggaaagttccccgtatttatacgaaacttgacgtctctaatagtgctcaacttgggatataatcatctggaaggagaaattccagatgatatagctatgctgagtcaaatggtgtctcttacattaacaatgaacaacttctctggcgtttttcctcctgctttctacaacttgtcctcacttgagaatttatacctccttggtaatggtttctcgggtaacttgaagcctgattttggtaatctgctaccaaacattcatgagttatctttgcatggaaattttctaacaggagccatcccaacaacacttgccaatatttcaactctggaaatgtttggaattggtaaaaacaggatgacaggaagtatctctcccaactttggaaaactagagaatttgcattacctagaacttgctaacaattctttgggaagttactcttttggagatcttgcatttcttgatgctttgactaattgctcccatttgcatgggttatctgtgagttacaataggcttgggggtgctttgcctacatccattgtcaatatgtccacggaactcaccgttttgaaccttaaaggaaacctcatttatggaagcattcctcatgatattggaaatctcataggcctacaatcacttttgttggcagataatctattaacaggaccactcccaacctctcttggaaatcttgtagggctcggggaattaattttgttttcaaataggttttctggagagataccctcttttataggcaaccttactcagttagtaaaactatatttatccaacaatagttttgaaggaatcgttcctccgagtcttggtgattgtagtcacatgctcgacttacagattgggtataataagttaaatgggactatacctaaggagatcatgcaaatcccaacccttgttcacctcaacatggaatctaattctttgagtggctctctaccaaacgatattggaagattacaaaatcttgttgagctattacttgggaataataacttatcaggacatctcccacaaactttgggaaaatgtctttcgatggaagttatttatctacaagaaaaccattttgatggaaccattccagatataaaagggttgatgggtgttaaaaaagttgatttgtcaaacaataatctctctggaagtatatctgaatattttgaaaacttttccaagttggaatatctcaatctatccgataacaatttcgagggaagagtcccaacagaaggaatatttcaaaatgctactttagtttcagtattcggaaacaaaaatctttgtggaagcatcaaggaactgaaactaaagccatgcattgcccaagcaccaccagtggagacaaggcatccatctcttttgaagaaagttgcgattggggtcagcgtaggcatagctttgcttttgctattgttcatagtttctctaagctggttcaaaaaaagaaagaacaatcagaagatcaataattcagctccttctacattggagattttccatgaaaagctaagttatggagatctacgaaatgcgacagatggcttctcttcgagcaatatagttgggtcaggtagttttggtactgtgtttaaggcattgctccagacggagaacaagattgttgcagtgaaagttctaaacatgcagagacgtggagctatgaagagctttatggcagaatgtgaatctttgaaggatataaggcatcgtaatctcgtgaaactattgacagcttgcgctagtattgatttccaaggtaacgaattcagagctctcatctatgagttcatgccgaatggaagcgtggatatgtggctgcacccagaggaagtcgaagagatacgtaggcccccacgaaccttgacacttcttgaaaggcttaatattgtcatagacgtggcttctgttttggactatcttcatgttcactgtcatgagcctatagcgcattgcgatcttaagccaagcaacgtccttctagacgatgatctaactgcccatgtaagtgattttggtctggctcggcttctcctcaaattcgacaaggagtcattccttaaccaactaagctcagccggagttagaggcaccatcggatatgccgcaccaggtaaaaaaaatatcacacatctgtaatgttctatgaagaaacttggtatatattttatcgttacaatcttgttctgtgaattatggtgcagaatatggaatgggaggacaaccatcaatacatggtgatgtgtatagctttggggttctccttttagaaatgttcaccgggaaacgaccaactgatgagttatttgggggaaatttaacactacatagctacaccaagttagcgttgccagaaaaagtattcgaaattgcagacaaagcgattcttcacattggtcttagagttggtttccgtactgctgagtgcttgacactggttttggaggtgggacttaggtgctgtgaagaatatcctacgaaccggttggcaacgagtgaagtcgcaaaagagttgatctcaatcagagaaaggttctttaaaaccagaagaacacctagacgttgaagtttttatggttttgcctacaaactttgcagtccactcaaaaggcctatataacattgtcttttacaatttgtgttttcttcttctctattaaacatacttatgctatacgtgtttttaagccctattaaaacatactaagatggcttgcagaatattgttaatgaatgcttgtgttttttgcagacaatatatgtatgttgtgtaaccagttttatcatatatatcaatgttcccaactttatttggattttctcagtttttc

SEQ ID NO: 159210 - DNA, 603 bp, Arabidopsis thaliana landsberg
gaaagggtaactgcaatgaactctgtatctgtcacccttgcatttcatgtaacttcagactgttctgccgtaaaccaatgtcggataaatgttaagtgtttggtttcttgtatgcgggtcagtaagcaagcaatgcacgagttgtggatgcctgtgactgatacataattctagatttttatttattgttctgttagagatagagttagtcagtattgtttattttcaaggatttggtagtttctagggagtttttagataattagggatttggaaactcacatctcagaagtgaccataaacccttttacttgataagagcattagttatgggtctgccacagactgcttcaagtgaacaatcccaggaagctttgtctactccaagttgtagcctttcgcaaagtctgcctgtgtatgctacttcccatgattcagatggtcttaacagtggaagtgaggaaggaatttgctcttccattgcagagtttgatagaaaaacatcattggagcctctggagttcactgatgattcgtgtagattccgtgggacttgtgttgttacctcatcaagtgctcatggatcgactagttatgctgcag

SEQ ID NO: 159211 - DNA, 358 bp, Arabidopsis thaliana landsberg
  unsure (1)..(358): unsure at all n locations
agcttcagaagaaaagctgagatagctcgagggaagagagcaatgacagagaggtatgagcttatagatgaggatcaggaagacgagtacatgcctgagcatactcactgagccaccaaacttctgcacaaacctaatgtatagcctgctgaggaatatatcagggctcttcaaaacttagagttttgtagcacgagttatccatgcttgaccacacttgcacaacttggattgttnnnnnnnnnnnnnnnnnnnnnnnagagttgtcatcttgacactttgatggcgtatccatatgtagcgtatgaagaagagacaattcagtacctctccacactgcaagtggagctttaccaag

SEQ ID NO: 159212 - DNA, 686 bp, Arabidopsis thaliana landsberg
  unsure (1)..(686): unsure at all n locations
atgcattctgtgaattctaccaaggatgtccttcagctgatggaggctggtgaagtgaatcgtgcagttagttccacgtacatgaacaatcgaagtagtcggtcacacaggtacataactcaaaacttcactttcagaattaaggaattactgctttgtgatctaatttttttttcttctttttttttgcagcatttttatggggcacgttcgtgggaaagatacatctgggggaacccttcgaagttgcttggatctggttgatcttgcaggaagcgagagagtggacaagtctgaggtgactggagacagactgaaggaggctcaacacatcaacaagtccctctcggctcttggagatgtcatctcctcgctttcccagaagacttctcatgtgccttacagaaacagtaaactcactcagctgctgcaggactccctcggtgaaattctcaaaaccctcttaacttattgcatttgggtatagccacgcacttgaatcttatacaacagttttccacattatcaggaggatcagccaagacacttatgtttgtccacataagtccagaacctgacactctcggagaaactattagtactctgaagtttgctgaacgagtgnggagtgttgagctaagcgctgctcgtgtgaacaaagataactcagaggttaaggagcttaa

SEQ ID NO: 159213 - DNA, 864 bp, Arabidopsis thaliana landsberg
ttacctaaacgcataaactgttgattgtgtaaaaatgtaggctgaacaggatgcaaaacgttttagggaatacaaaaggaaaatgaaaagcataatccaagtgaacaacacaacacattccagaagtatcagaatgcaaatcagtttcatacaatccaaatgcactacaagaagatagataaaccaatagaagaagaagaagcgttgattctgattttggacagtgaggaatcccattcatgagtaatggatctttagtcgacgacgtactagtactaaagaagaagaaaatgaaacaatgttagtaacaatgcattgaaattgagaggcacagtatattctattgtgtgatccattttgcagaaggatcatatctcatgctaaccttgaaagaaacaatagcaagaaatacaaataactcaagcataagagattaaaagaaatgattaccggtttgattgaaggcaagaatcgatttttggtatcttcgtcctcccattcaagctcatttccctgttctggaggatccatacgtatttgaaattcttcaactagtgggacacttgtagcattaaatggaagctttctcagcattggacagtctttaacaagtattctcaacaaaagcggaaaggggagaggactccagtagatactctccagcttcggcaaattatacaaaatcaactcttctagtttcagaaatggtgtaataatacttgtaagattggttgctttctctttgtttattatttctcctacttctcttgaatctccaatttgtaggtagacattatttggagcaaacaatatccaagtcagatccttcatgctatggcaatgcattatatccagtcgtgagag

SEQ ID NO: 159214 - DNA, 966 bp, Arabidopsis thaliana landsberg
gattgattttttacatttttgattgatgattataactaacaaatcatgggtctacatttttcgaagaaaaaaattatgttaaagaaatgtttttgctaaatctgaaatgtttgtgaatatgtttctctaagtgtgcttattgctttatctgcagattctcttagtgttttggttcactggaatgatcaaggatctagttatgtagaaatttcttagtttgggagatttcatgagattgctaagagttgagtagtactaagttcaggattaatattgtttttgagaagaacactgtcaaagatttagaaagtgatgtgattttttgggttcacatatgttacaccgtcttagatggtttattggattgagtaaaagaagtagagaagccaagacgcttgatgcgaaaccttacatatccaaggttaagccagtactgatggttgacacggttcaagagattgcgatttatatccataggtttcataaccttgatcttttccagcaagggtatggaacttatttatatatatatatatatctttatacttcaacattgttttgaaagcttccgactcttttaacttcatcagatggtatcaaatcaaaatcaccatgagatgggaggatggtgataacgtaactcgtggtattccttcacgagtcgtgcaatatgaaggtaatactgtagctttcttatgaagaagcatgaatgcctgagatcagtatcctataattactatctgaattctgtattattagagaatttgttttgagtagaattggatattgaggattgtttttttttgtaaagctcctgatgccggtgctaatgactcatatggagggtggaggatagttgataaagataatagtttcttaacacagcctttccgtatcaaatatgcaagggaggatattcgtctgtgtatgatgatcacatttactctgccactggaacgatatgag

SEQ ID NO: 159215 - DNA, 939 bp, Arabidopsis thaliana landsberg
atcacgggtcttcgaatgttgaagctgggtctagactttatgatagcccgagtcggcatatgatgagacaagaacagcttgaacagcttgatgggtcgtttaaggttgaagcagaggtaagtagtgaatatgatggctgggttagatcaagtaaaggtaatctgaccaccatggtcaagagcatgttcaaggttgacagcttggtgaggttcgagaaaaacggaacatacaagagggttgagcagagagtgaagaccgaacggatcgtggaggtgacttctgaatcgggtaaaccggtgaatcgagtcgtgcaccagcggacatatcctcttacagtgatcacttctactcttagagggttaaccaacgacaaggatacgtatatgctcgtgacgaatgtttcacacgccttgaatgagacacattcagatggagaggctttgatccaagtttatagcagacaagactcagagggttggatggaggttgaagatcacaatgtcttggctggtgaagcgagcacaaaacagagtcttagctatatcgatgaattcagctgttattcccgcaccatcgttgcggctaatggggagattgcccaggacagttcatctgattcttgcacttcgtcttcattctcagagctcaacactattgagcagcttatcataaccaatgtgaaatcaagatgaaacacttgtcgtgaataagagatgcttgtactactaaccatgtttggggtcaaacaaaaaatactgtttttgctcaaagggaaacaaaattgtaggatctaaagcagaaacagcagttacaatgcttttgcttttgttcattcaattatcccgctacctccatcgatatcgacttctcccattccagtgtcttcttcttcatcttcgcttccctcatcaccactcatttcttcattatccattctaa

SEQ ID NO: 159216 - DNA, 694 bp, Arabidopsis thaliana landsberg
tagttgtagcgtgaatgatgatgataacaggagtaataccaatcatgatcatgatcaaccatctcatttgcgcttgagggatcctaagattccagaaaaggtaaactttccagagtatgctgcgccagagtcacgttactgcccagcccgtgtttacgagtaataacttcctttctctaccctctctttctctcaccatatgaaatttgatcaatatatcaagttccttgaacaagatactcatcttcgtttctgtattgattcaaaacataaaaaagatatatcgaagacgaagagggtaagccaaaactgcagatcaacgctcaaaactgtttgcactgcaaggtacgcatcacttgtcgacttgatgcactttgtgttaaagtatgtctattcatgtcactcgattgattttggagaagcttaaattggttttctttttttttttaatctaaaaggcatgtgacatcaaagatccaaagcagaacatagagtggacagtgcctgaaggtggtggaggccctgcctattccctcatgtagtccttaagattcaacataccttctttactttaccatatctgataaataaatgagactcaacaaaatcctaaatggctgagttttctttttactaattgtttgtaatcattagtgtttcctgtgtttgtacactttcacttgacgtctattcc

SEQ ID NO: 159217 - DNA, 1718 bp, Arabidopsis thaliana landsberg
cccatctttgccgcttggacaagatcggcgccacaatcgttatttgctttttgctgtatcagtgtctaagagtgagggttgggcggggctcttatttgttgagctacatgatggcaagtggctcctcattgattcagaagaggtaatataacaacctcagcaatttgttaaaagattctagcttaaggtttttgattgccttttggtttgctaatatccagcttagatagagatttaaccatgccttctgtgaaattgttctgtgtaggcttttgatattctggttgcatcattggatatgcgtgggatcagagagtctcatttacgcataatgctgcagaagatcgagggatcattcaaagataatgcttgtaaagatataaagctagctagaaaccctttcttgacggaaaagagtgttgtgaatcattctcctacagattctgtgagcccgtcgtccagtgctatatcagggtcaaactctgattcaatggaaacttcaacttcaattagagttgatttaggtagaaatgacaccgagaacaagaatttatcaaaacggttccatgatttccagagatggatgtggaccgagacgtacagttcactaccttcttgtgctagaaaatatgggaagaagagatctgaactgttagcaacatgtgacgcgtgtgttgcttcctatttgtctgagtataccttctgctcttcttgtcaccagagattggacgtggttgatagttcagagatattagattcaggtttggctgtgtctcctcttccttttggagtcaggttgctcaaaccactacttgtttttctcgaggtaaagcataaatgatttttgtcgacttaagcgccggttcttttggtaccaacacttgacaactccctttttattgacaggcatctgttccagatgaagctcttgaatcattttggacagaggaccaaagaaaaaaatgggggtttaggttgaatacttcatcatcacctggagaacttttgcaggttccatcatcttgtttttctttctctaaattaatgcaaattggaatgatgttttgttttaaacccgatgtcttcctttttttggttttgataggtgttgacttccttagagagtgcaatcaagaaagaatctttgtcatccaattttatgtcggcaaaggagcttttgggagctgctaacgctgaggctgatgatcagggatcagtggacgttcttccatggataccaaagacagtatcagcggttgctttgagactttcagaacttgatgcatccattatttatgtgaagccagagaaacctgaggtgatccctgaagatgagaacgagcagattgtaagttttctagaccaatattggttcgaaaattgtttctaagttaatactttggaagttatttttttttatggttatggaatcttatgttacccacgtattgcagagccttttccctagagattcacctttcaaaggcaaaggacccagagagcaagaagatcaagacgaggttgctccaaacccgggtaacagaaataagaaacgtgcacgagtaagcttgggatctggatcaaacagaaaggtgaagaggaagaaagcgcaaagcggtcttaacaaatttgtcgttggtaggagaaatgttgcagtcaatagtaacttaatggccgttgagttgaaccaccaagtccctggaaaaggaaagaggacg

SEQ ID NO: 159218 - DNA, 416 bp, Arabidopsis thaliana landsberg
ctatgttgcttttggtccacgcaagtgctcgcactttacagcaaactcagactctgcctctccaaggaggaggagctgctcctaccaaagatgagcctcatatggttaatgcccctcttgaggaccagaagaacttcatctacggcggtggaattggcggtgttgccggagttggtggattcatggggatgccaggtggtggaagtggtggctctggcatgactttcccactcccgagtgggacgccgcttcttggtggggctggtgggcttggtggtttgggtggtgcaatggggttccccggtggactcggtggtggactagtggtggtggtgttcaagttcaagcggtggttcccttaagacagatcatgatgattaattggtcctatgtagtatgtactcaagatgtttagg

SEQ ID NO: 159219 - DNA, 665 bp, Arabidopsis thaliana landsberg
  unsure (1)..(665): unsure at all n locations
gtttgtaatcatttctaacatatctttgtttttttcgttaaagcaaactcagactgcggtgaaagacaaagaagatgataaggataaagaggttgcgacgaaatgaaagaaggatgtgataacatcgcaagcctttagcttaggcagtcccatgtcaaagaaggcagatgagaaacataccttgggttcctcttcttttccttatttaacatgagattgccaagctataaggcttgtgttgacactttttcatattctcgtgtgcaatctttgagttttatctacatccatattatcatctttgtctttcaccacagggcaggctaagtttaccataaccacaaaaaaccaaataaatgtaacatgatggaaacaacatttccaagaaccaaaatggaacataaacatcagctaaagtgacaattaaccatgctattctcaatcaacaaagactataccataattcttctattaagcaagtcatcaccatctttcatctatacgaggattgaacattctgtattgaacaaagaaaatgggataaagacttgtgcagcaacaagttgcaaaagagtgactgagagctaacaaaccaggcccagcaataggatttgataaggtataaagcctaagtggcggtcnaagacttcatctaaatgtgattg

SEQ ID NO: 159220 - DNA, 625 bp, Arabidopsis thaliana landsberg; identical to SEQ ID NO: 24855
  unsure (1)..(625): unsure at all n locations

SEQ ID NO: 159221 - DNA, 1072 bp, Arabidopsis thaliana landsberg
ataatgtagaacagacagaactacagaaaattagggtggtcattggagcttctctgaaactacctccaagcaatcagatagttgaagatcctttggttcctatgttctcgtctgttgattcgaaaaccggttttccaaaggaaggaatcaacctaggattttttcaagaggacaagtttgtccgtcctgaaggtttggaagacttgtatatattctgcactagtgatttcgctactgtagctaaggaagttgaggtcagaacacggagggtgagactactcgggcttgaggtacttccatttcttgcttgattgggataacatttcttgctttcatacattgcatgtaattgtaaagtctggctcatttgtctgcgtagggtgctggtaaaacctctctattccgcgctatactgggccaaagcatgctaagttcgatgactcatgtggaaaatcttcagatacaatctgatgttcaagaatgtattattggtggtgtttgctactcggacactgtgggcgtaaacctgcaggttgatttcttcacattctggttccacgtgttttaagttacatttttttcacataactgtgaaattctttttggtatcctgatgcaggagctgcacttagaggcatctcgcttcagagaagaactatggaaaggagttcgtaatctaagtaaaaagatagatttaattattcttgtgcacaatctctctcacagaataccacgttaccaaaactcaacaacactactgcagcaacagcaaccagcacttgctcttctgttagatgaggttaaatctcttggtatcccttgggtcctcgccataacaaacaagttctcagtcagtgcccatcagcagaaatccgctatcgaagctgtacttcaggcataccaagcgtctccaaacacaaccggaattgtcaactctatcccttatattatttctggctctggaacttcctcattgccttgggcagctgtgaatgcgggaaatgacggatcagtaggcgtaccgaagatgatattctctccactcgaccttgttaaaaagccgtttcattga

SEQ ID NO: 159222 - DNA, 879 bp, Arabidopsis thaliana landsberg
caagtccaatttgtctatatccattaaaagatgtagagatggatgttaaaatgctaactgatgacaaactacgattggaggtaaatttctccattccacaattgatttgattgcattgtaaatacgagttaattgacaattttcttttgtccaaaggcgtccgttgaaaggaaggcacatgaagtagacattcttacttctaggatccaggagcttgagacccagttggatagagagaaagatgaatgtaggaggtaatgactaattcctttttgatgtttgcttgaaattaattatgatgcgatatacttgaagaaactttatttggcaaatctgggacttgatcttctggtgacaagtattgttcaatccttttgtgtgtcaggattacttcaagctcgaagaaatttgtgaaagaatataaccgtttcttgcgggcacacgatgatctaaagaggcaaggcatttatctctatttctaattgcttcttatttaagaatgcaaaaattcattcaataacacaatgccaaacctataggtcagaagcccgtcttcagaaattgggaaaccaacttagtacgtatcttgctggaagtgaaggcaataatagggatgtaggcctggatattgtgagcgatgaagagactaatggtcggaatttgagaactgcttgtgatccacataacgagttgcagaatacttcttcactgtccaggaaaaagcattatgtggatcaatatactacgaaagaacctgttgaagatggtaaacttatctatactattagatttatgtctaaactaaaaatcagttcatacacacgttatgaaccttctccatctgttttaggcttgatagggagaggtgaagaagagaag

SEQ ID NO: 159223 - DNA, 548 bp, Arabidopsis thaliana landsberg
atgggggcagttggtcctttacttcctgcggagattttcactggaagcgaatcaggtaaagatttatcaagagatcatcaaagtagtagttatacactttggttagactcgaaaacagagtcctctgttatttatgtttcttttggaacaatggttgagttgtcgaagaaacagatagaggaactagcgagagcactcatagaagggggaagaccgttcttgtgggttataactgataaactcaacagagaagcgaaaatagaaggagaagaagagacagagattgagaagatagctggttttagacacgagcttgaagaggttgggatgattgtctcgtggtgttcgcagatagaggttttgagacaccgagccataggttgttttttgactcattgtgggtggagctcatcactggagagtttggttctcggcgttccagtggtggcgtttccgatgtggtcggatcagccagcaaatgcgaagcttttggaagaaatatggaagacaggtgtgagggtgagagagaactcggaaggtttagtaga

SEQ ID NO: 159224 - DNA, 584 bp, Arabidopsis thaliana landsberg
atggagttcagggtgtgctcttacatcataagtaagttcttccatattctttgcgtaaagcaccaaactaggacaagaaactaatcttttgtggttgctaagtatcagactctgattgttccaactttgttaatctatttttttctaatacagaacagcaaacggattaccatgattgtcatatgcaatttcagctcaggccaccgatggtgttagtgtctcagcttgcccatttttcatagtgtctggaaagcaggatggaatcacagcaaaagatatgtggcaggctatcaaagaggttcgatatttccttccatttgttaagaggtcttggatataattttattattcttcaccgtgagatttgatatccgcccttgtatttgtaacagaatggttctttcgatcacttaaaggcttctgaggcgtcaatgcagtcagatcacgggtcatccattggagcagcagtagcagcctctgtaacagtcctaccgggagagtcacgcattgtcacattttctctggcttgggactgtcctcaagtgcagtttcctagtggtaaaatatattctaggtaagatttt

SEQ ID NO: 159225 - DNA, 491 bp, Arabidopsis thaliana landsberg
tatctgattgattttgttgtttactttgctgttgtttacagcatctcgttacctgttgcttagtttctgcaattcttgttactcgacctgatactcgaccacccagttgtctggcaacaaactgtgtagtcgagtatctttgtttcatttactatccgttactcgaccactcactcaacctcacccagtgctctgcaacgagctatgttggtcgggtgttttactgtttctgtttgactttctgttttctgtgataataggttttttagtcaattatcctaaaacaccaatcatgtcgttgtagtatttgaggttgtcaatccaaatgggtgtgatgctaacaatcaagatgtgatcagaagtcactaagtcaagccaatcaataacaggttttggtgtgttctagcagtcctaagtgaacatgcagaaaacagaaaatcaagcagaaacaaataaacactcgaccaacacaactcgttgcagagcactgg

SEQ ID NO: 159226 - DNA, 11370 bp, Arabidopsis thaliana landsberg
caaattaatcgaatatctacgaagtaaatgaacgcttgaatcacgccgcgaatcatgtctcattaatgtttacgtttcacatatccacctcgcgcattaacgcattctcatttactccgcagatttccgttacgtgacgcttaaaaatgattcttcaaattgacctggctctggtgggcttatttcggcccactccatatttgacaatcctggactcatcgttgaggctttcactcaggcccatttaaagaatgatgacagatctcgggccaaagcaaagatatgagatccgacatccacagttagctacatcaacaacaaccagggtggctacaaaggatacaacaacttcaaaaccaacaaccccatcctctcctaccgcagcataaacgttgctaatcctcaggatcaggtgtaccctccacaacaacaacaaggtcagaacaaaccttttattccctacagccaaggttttgttcccaagcagcaatttcagtggaactaccagccgcaaccaccacatgggtttgcacctcagcaaaactaaggtcctgctgctcccgatgctgaaatgaaacagatggtacaacagtctgctacagggacaagcatttagctcaatggaaattgctaagaagttacctgactgtgcaccagaagatggactgcagctacaatgacctgaatgccaaagtggaggcgttaaattccaaagtcagatacttagaaggacaatccgcatctacctctgctcccaaagttatgggacttccagggaagtcaattaagaatcccaagaagtatgcaactgctcacgccatcaccatgtgccatgatcgagagctgtcaactcgacctgtccctgatttaatcattggggatagtgatgttcaacaaggggaggcttctactcaggttgaagtctcttttgttgaattcgaccattctgctggttctcgccatctcattcagtcccccgcggaagagaagaccgccataatcgagagaatggtaaaacgattcaaacctactccactaccctcacgtgctcttccgtggacattcaggaaagcatggatggagagatacaagtctgttgtagcgaagcagttggacgagattgaagcagtgatgccactaatggaagttctcaacctgattcctgatcctcacaaagatgtgagaaatctcgatctcagagcctctgtcagcttaatgtcagcttatttagtacagaccttgtgacctgactttgatccttgaggatagatctttaagaaaacccttcggcatgctgaaagatctcccagtcatgattaatggagtggaagtgcctacagacttcgtggtgctggatatggaagtagagcataagaatcccctaatcttgggaagacccttcctagcctcaatgggagcaatgatgatgtcagggaagggaaaataagtctcaaccttggaaagcacatcaagttgcagttcgacatcaacaaaactccacaagagtcaaaagaagatgaaaaaaactttggagatgataaagtgatcccaggagaaggatatgagactgagaaagtaaaagagcttaaaaagaggtctaataagcaagaagaaactatagagaggctagcccactctgttgaggaacttagaagtaagctgaatcagttgcagaagtaagctcaacctaaaggcaggattgacactatcccgagaaagaagttcacttcaagaaggtctgaagagacagattaccctcctgaagagaaagaagcctattttgaagaaaggggaattgagtattctgttgtatacctctccagggatgacgctgagtatgatgatgatattagagaggactatgcaaaccctctctatcattcattttcttcttaataagtgtgaggagtcaagctagagactttaaacaagctcacttgggaggaagtcccatgattatccttgtaaataatttttactttcttgttattttttatatgttttagttgtgtttgtggttctcaggaatagaggaataacgtgaagctagagtaaaaattaaaaacttttactctacatatggcctagagatcgagtacattggtcgagtatgagtgatgtttaaaacccaaaaaaatttcaatcatcattttactcaaccaacgaaagctactgagtcttacagagagtttatcaagtctacaggagattgcgggattttctggggggttttcagtaaacaaagagtacaaaataaagacaagaagacattgtgagacccaccgctgacgcccatgtcctccatgaaacagaccaaaggacaagaaatctctcctcatctgttctcctgcactcgacccccatccctcttaactcgacctcatcacctcgtcatctcttccagtcccattaaactcgacctccatttctcatccaaactcaaccaaactctcatctcttttctctcaacctctcgacctcaccatctctcttcctcacgcacttgattcctcaacgctcactctcattctcaccaagtactcgttttcaaatcatcatcatcttcaccgctttgctccattcactcgaccgccgtgagtttctctcttcaccatagacactcaatcgcaaacaaagaagaaggagaacaagactcaacttctaaaccgagtctagctttgagctcatcacccgcctattcaagacctccttcaacactcgaccaccgattacgtttcacctcatcactcgacttcacggcaagagcacctcctcctctcctccaccaccgttcacgcagctccatgtaggatactcgaccgcaacgccttcgtcatctttctcatcactcgactcgttctcttcaccatctccgagccggttctcgttcaccaatcactcgattcgccacactcgaccatcaccgcaactcatctctcactatactcgaccgcaactcctacataaactcatcgttttcaccgctcaagctccatcacttcactcgaccttccaaaatcactcgaccaacaatccacaaaccgaaaaaaaaaaaattcagaaccggttaagatatactcgatcggtttactctgttggtttgtgtttttggttttgttgggactaacgtattaacgtttatctttgagtttcatttgtttttaggtctcattatgagtaactacagtggagaatcctcaattgatcctgattataatgtagacgaagctgagtcttggtacactagaccggagagagagcaacatgtttacgagagcttcagggatgaatttgaacgctctgctgctcgacgtaatcagagaagagctgaaattgccagaggaaagagggcgatgtcgagtagatatgagctgattgatgaggacatcgaaactgagtatgagccagagtcatggcgtatggagacgaagctgctgaacaaacccgacgaggttacagcggaggagtatatcagatttttttagatgaacgacttctggggaacgaggtatccctgctatgagactttagcccagctggggttactggaggatgtgcagcatctgttcgagaagtgtcatctggagacactcatggcttatccttacgctgcgtataaggaggagacaatcaagtttctttccacactgcaagtggagatgtatgagggtctcacggactttgagctggataccatggggttagggttcctgacgttctcagtggatgattagcggtatcagctttcgatcaagaagttggaagaactgttaggtttccctagtggaaagggaaccaaacccaggtttgacagagaggagcttaaggatttgtgggctacgattgggaacaatctaccgctaaactcggcgcggtccaagagcaattaaatccagagtcctgtgatccgctactttcagcgctcggttgccaacgttttctactccagggagtctacatgcaccgtatctaacacggacatggagatgatagattccgcgcttactgggattctccgccggacaaagggaaagaatgtcttgagaggcgatctcaacaatgcaccaccagtaatgcctctgttgatccacgtgtgtggatacaagaagtgggcgttgacgaacggcaagaagaaggtgagaggagcactatgcgtgggtggcgttgtgacgccaattctggaagcttgtggagtaccgctcaaagaaccagggttaacaccgagaatgatggacttggatcatttgcgccgatgtgagttcttggagtttgacatggttggcgactttcaccgctacaggttcgagcatccatcgattagaatcgccaacattcttctcccctgtattgacgctactaggattctctagggcagaaacattgacttcaagcctgcgcttgaagatctttatttcgaggacacgccaactgaggagattagtcacaccgaaggagctacaacagaagatgttgatgagacagatgatatagatgaggcagagtttgatacgaccatgtatcatttcagtgaacatatacctccagcgatggaaagcaagagtttgagcgaagctcacaggaataacagcaagctgcagaagtggtgcaagaaacatgataagttgctcgccaagtgcctcagggctatcatgtttctgaaggacaagatcagctgctcctcttccactacagctattccgtagggacagctccctcaggacatgcccttgaggagatatgacgcgcccgagccaagtcggcgcaggcctgagcctagagagcaggagattccgtatgtccctccgaggcattcatcattcgagcctcgtgaatctgggaggaagaggaggaccacgctcactcgatctagcagcaggagcagacgacttctgcagtctcgtagtttacgcgaccgcggtgctggccgcagcacaagaagagaggtcgagtatcctcagagttgtgctggccgccatagagctgatgaggtcgaatacccacctgctagaactgatacagaacagggctgttcgtctatggcctaggagcaatcacaggcagccattgacgaccaacttcgttcattcttcgactgaggtaagcgcctcacttcaccattgtattatatcatctgttgtgatttgttcttcattttgtttctgtgattggatttgtcctgagtactctcttccaagtttattcacacagtggactgtgtgattaagtttgggggaaggctcaggaagtgtgtgttgcactgtgtatatttttgagtctgcattcatctaaggcatagaaaaaccaaaaaaatttgaaaaatttcagaaaatgatttcacaaaaaaagagtgttcatgtagttgcattacatttaggatcgagtctagagtgtttcatttaggattgttgcatatgcatagggggtaatgattagatagccttgtaagcattttggttcaccggataaacttagtgtcctcgttgttagttgtctgatgcgtagtcaatcaaattgaaataaaactgcaccatgcctagattgctctactcgccacactgtcatgatttgataccattcccaatcaatttgaacctgaatctgatttagaattatcatgtcttagcatcgaattcgaactcatgtagaccctacattatttggacttccttactcattttaaccactcttgttagtccaagtagctgactcccctcattggagcagttaaccccgaccctaaacctaaaccttctttcaagccatttatcacttgtgagtgtttgtcaggtcttatcccgattgagcatggtaaaaagtgttaggttcgtaacgatagagatagtgtctcatgtagttctagttcgcgttttcaggattggatagaactaggtgggcgcttatatcatgggttgggatatgtttaaaagaaagaaaagggtgaattcattgttgataagaaaagggaaagaattctaagggaagtaagctaaagaagttgacaatggaattccagaacgagctttgtttggctctccagaatctgctcaagcatcgattccattcttgtctcttctgtgggtggaggggaggcttggtaagctgaattaccataggtcctctgaaagtttctctaaggaaaggtcttctggaaagcaggctttggagtgtagttggaggaaccctggttctctgtaaacctgttgccaactgaagtgtccctgtggctgcccaaaacttcttgtatccctgaccatctatgtagaagactcctttctctgactcaggctcaggctcaatagtctcttcttcagctgcaaagtggacatgctttttccctgtaagcaagttatgaaccgaatccagcttagcattcacctctgccatctgatttcctgaaattgctcctgcaatcttcttcctctcaaaatcagcattcttggtactattgctgcaagcaaggttctctatcagggttgtagcatcagttgggtaacgtgtattgaagttaccattgctcgctgcatctagagccttctggtatctccaatcaactcctctgaagaaggtacctagaagttgtactaaggacaaagaagatgcgtttcagaaattttgtaacttcaagagcttggtcgaaaaagagtctaatgcaagaatccagattttcagaacagacagaggacgagtgtttgtgtcacatgatgtcaacatgttctgtgaagaatcaggtataacgagacatcttacagcccctacactccacatcaaaacagtgtagttgaaaaaagaaataagactttgatggagatgatgagaagtattttcaaacacatgcatttgccaaattatctatgggggaagctatcagacattccacctatctcctgaaaagagtcatgacacgatcccttaaagacaagacgccttatgaatgcttcatagataggaaaccaatagttgtgcacatttgaatctttggatgcatcacatatgcaaaaatcgacaagcaacaattgagaaagctagatagcaggtcaagagttcttgttcaatcaggggacagacgcaggtcggaaaggcatatgaatagtttgatccacaagcgcaaaaaatagttgtgagccgagatgttgtctttgatgaagcaaaagaatgggattggagatacagcaaaaggatcaaagatgaagatggaaactttggtatgacgtttcacagttatggaaatcatggacttcaagactttcgagagtccattacttcagagcatgacgagcaagcgcatagtgatacataagaaatagaggccgagaatgtaacacaacacaaagaaggagaagaacatgggactgcggaaagatgttacaagtcttgctaccgttttgagaagatggcagaagggggattaataagcctaagtatcttgaaaattatgtcttgcttagtttaaacgatgagccaagaaactttaatgaagcaaaagaatcgaaagagtggatacaagcatgtgaagaagagatccattctatcactaagaatgatacttggaatcttatggaacttccactaggagttaaaccaattggtttaaagtgggtattcaagattaaacgcaactcagacggaagcatcaataagtataaggctcgacttgtagcaaagggttatgtgcagaaatatggagtcgactttgaggaagtgtttgctcctgtagcccggattgaaacaatacgtctccttgtcaaccttgcagcgtcgaatggttgggagatacatcatcttgatgttaagacaaccttccttcatggtgagttaaaggaaactgtttatgtcactcaaccggagggattcaaggagaaaggtcatgaagataaagtctacaaactcaacaaagcgttgtatggtttgcggcaagcaccgagggcatggaacaataagttgaatcgagttcttaagaagcttaaattcgaaaaatgttattaagaaccatcggtttatcgtaaggtaatgagtgagaatattactcttttagtggctgtgtatgtagatgatctctttgttacgggaacaaacaccaagatcattgatgattttaaaagagagatgtcatccaagtttgagatgagtgaccttggaaagctaacctattatcttggaatcgaggtatgtcaacatgaagaaggaataacactaactcaacaccggtatgctaaacgtatcttagaagaagctggaatgttagattgtaacttggttcacacacgaatggagtcgggtttataattaagcaaatctgtagaagaaaatgatattgatgccacgagattcagaaagaatggtgggttgtcttcgttatttgttacatacaagaccagacttaaactattgtgtaggaatttaaagctgttatatgcaaaaaccaaaggagtctcacagagctgctatgaaacaatgtttaagatacttaaaaggaactactacacttggtatatcgtttattcgaagcgtagaggtaccaaaattagtagggtacagcgatagcagccacaatgtggatccggatgatggtagaagtactgcaggacatgtgttttatcttggagaaagtccaataacatggtgctcgtcgaaacaagatgttgtggctctgtcatcgtgtgaagctgagtttatggcagggactgaagcggcaaaacaagctatttggcttcaagaactactaagtgagatcatcggaacagtgtgtggaaaggttactatactcattgacaacaaatcggctatagctctcaccaagaatcctgtttttcatggaagaagcaaacacattcataggagatatcatttcataagagagtgtgtagagaccggacaaattgaagtcgagcatgttccggggaatgagcaaaaggcggacattttgaccaaagctcttggaaggattaagttcaaagagatgagggatcttgtgggagttcaagatgtggtgaaagaagatttcaagcttaaaggggaaaatgttgggataagcttgaaagagaagaagtgacttgaagagcaagttactaaagagataaggaaattaagcttttattattttaggagataatctagaatatattgttaggagttatcttatattaggagttatctaataattaggataaggttaaaaacttattatataaggaggtatcaaggtgtgatacaacttatgggttttaagagagattgagagtttaggttttgagagaattttcctaaactaataaagagagatattctttatacttgtgttcttaatctttcttgaatactagatttggtatcagagccttgcaacgatgtcagaactcgctgtttcaacgggaagaacaaaagaatctggagcatgtacatcgattcaattccctatgcttaatacaacaaactatacaatatgggctttaaagatgaagatcgctctcaaggttcacaaagcttgggaaatcattgaaacaggagaaccgtgtgaagagaataataatatagccatgcatctcttgttccaatccatacccgaggtgatgacattacaaattggagagttgggaacagcgaagaaggtctgggacgcaataaaagaaaaacatgttggagcagatagtgtaaaagaggcaaggttgcagaacctaatgaatgaatttgatcgtctcaagatgaaagaatcttaaaccatcgatgctttttctggaaaattgcctgagatagcttcaaagtcagctactttgggagagaacataaaacagagaagttagtcaagaagtttctcaagagtcttccaagaaagaagtatatacagatcgtagcttctctctaacaagttttagacttgaaaaacacaagttttgaagacaatgtcggacgtataaaagtatacgaagaacgtgtgtgtgatgatgaggaagatactcaagaggatcaaagcaaactaatgtacactagtacagattcaagctaccatggagattcaagaaacaggggacgtagaaaaagaggatcctataggggaagaggacgaggacggaatggtggcagagatgcatcacagataacatgttttagatgtgataagatcggccactatgcttcgtattgtcctgatcgattgttgcaattgcaggaaactcaagaaaatgacaataaggagacccaagtcgtggatgagcttatgatgcatgaggtggtttatctaaatgaacaaagttgtatgccaagcagctttgaaacaaacgttgatggagagaatgtttggtacctggacaacggagctagtaaccacatgacaggagatcgtcgatactttgacaagatggaccattctattaccgggaaagtacgctttggagatgattcacgcatcgacattaagggaaagggcacaatagctttcatagacttgaatggtaaaccaagagtaatgtcagatgtctattttattcctgaactcaagagcaacataattagccttggacaagctactgagtcaggatgtgaaataaaattgaaggatggatatctaactatgcatgatcaagaaggaaagctgttggtaaaagctgagaggtctaggaatcgtctatacaaagtaaagatgggcttaagaaaggaagcatgtttatacctaacaagtacaagtatgtcaagtctgtggcacgcaagaatgggacacgtgagtctcatcacactaaagtctatgattgataaggaattgatccaaggagctccaagtttagtgattgagtcggaggtttgtggttcttgcttacttggaaagcagacaaggcagtcattcccacaagcgaccgtctttagagcaaccaagaagcttgagctgatacatggagatctgtgtggtccaataacaccaaaaacaagtgctggaaatcgttatatctttgttctcattgatgattattctcgttacatgtggacagtgctgttaaaggagaagggagatgcttttcttaagtttaaaaacttcaaagctttggtagagaaagaatctggaagaagattcaaactttcataactgacagaggaggagagttcgtgtctggagagttcaattccttactgcgaaaggcagggataagaaggcatctcactgctccatatacaccacaactaaacggtgaagtagagagacgtgacaggactctattggagatggcgagaagcatactgaagcatatgcacatgcctaattatttgtggggggaagccataagacactctacctatctaatcagcagagtcgctacaagagctcttaaggatagaaccccatatgaatgcttcagagagaagaaaccaatcgttgaccacaca

SEQ ID NO: 159227 - DNA, 399 bp, Arabidopsis thaliana landsberg
gtaaggaacacaaggactgtaaacaggacgggccaattaacgggatacaaacttgttccgggttcaaattgtttgccattagctcgacccgaggcgaagtttctaagaagagccgctttcctgaagcataatctctgggttacccgttacgccccagacgagaagtttcctggaggagaattcccaaaccaaaacccacgggctggtgaaggtcttgccacatgggtgaaacagaatcgctccttggaagaatctgacgtcgttctttggtctgtatccttgttttacttatctgattcagttaaaaactactagttaccaaattatgtgactttcaatgtggaattttcatttgtcaccaggtacgtgtttgggatcacacatgttcctagacttgaa

SEQ ID NO: 159228 - DNA, 1200 bp, Arabidopsis thaliana landsberg
gtgaatgttttcaaatttgttttatgccagataaagtttttggaccacaggcaactactattgacgtttatgatgtagctgcgagaccagtagtcaaggcagcaatggaaggtgttaacggtaagtaacattgctgcaaaattcagctttaccaaaatctgtatcttttatatagaaatatcctctaaaccaattggtccgcaagtagtattgcttgcaacatattttctgactcagggttggaattttgacaggaaccgtttttgcttacggtgttactagcagtggaaagacacatacaatgcatgtaagggttttaaaaaagaagaatccttatacgcctttctctctagtttttcttcaaaacacatgtgctatgaattgggatctcttcttcaacttggtccccctttggtatctgctggttattctgggttactctaaacatttacatggtagcaaaagataccatacaaataccaacttgccatcattaattggtgatggttatgtgagttggaaatcctcgtatgaatggaatttgaaggtcttcatttagattggctgtgcttatctttagtgaagtagctacgttgggtctttagttcccgtccaaacaagtagaacctaaatctgatgttctttttgttctgccattggttgcttttgcaatatgcatagggtgatcaagaatctcctgggatcataccgctagcaataaaagacgtgttcagtatcatccaggatgtaagtggtcttaacggggttcatgtcttttctcatctcatcacgacttttttatatgatttcatgctcgctaactggctacatttttatatttcagactccaggaagggagttcctgctccgtgtttcatatcttgaaatatacaatgaggtaagtggaactttttatccttgatatatttacttggtaatccctgaaaagtagatatttttagattgggatatgttttctagttcttctgccttatctttgagaactagaatgcttaaaaatatagagaattgggtgactgttcatgatcttcttggttttacatgtgtgcttctatgtttcagatatccgcagtttatctgataaccgtctttgtatcaggtgataaatgatttactggatccaacaggccaaaacttacgtgttagagaggattcccaggtttgcttcaacctctatag

SEQ ID NO: 159229 - DNA, 2038 bp, Arabidopsis thaliana landsberg
atgttgcagaaaaagaagcgtcaaagaaaacgtaggtttttcgggtttttatacccaaatacaataaaagaaaagataaacccagttaaggaaaaccgggttggtcatcgaaaaggatggatcgatcgatccccccttgggatcgatcgatcccgagctggcgggtctaaactccaatctttcttgacttggatcgatcgatcccttcctgccgggtctgaacttcatttggctgatgacctggatcgatcggtcccctcctgggatcgatcgatcccatcctggcgggtctgaaccttcatttccattgttgtttttggtccaaatgagcctgacaagtctcgaaagcatccgcatcccacttaaacacctaaaacctgcaaacgactcaagacacaaccgaaaagacgcaaaagacggactatgacacgacaaacgactcaaaactaaaagacctaagacaccaaaagcgcaacatatcatttagtataaccaaggttatgtcccaaaacaacagttcaatggaggataccaacagctgaatccaccagggttcactcaacaaccacaacaagccccaacagctcaagatcctgaaattaagcaactcattcaacaaatcattcaaggacaagctactggagctatggcttttgacaagaagatagctgagttacacaacaagatcgattgttcttaccacgatctaaatgtcaagttcaaagcttagaattccaaaatcaagtatgtggagagtcaatttgcatcaacctctgctttgaagcatcctcagcaacttccaggaaaagcagtccagaatcctaaggactatgttactgtaaattctatcacaatccaccaagaagatgagtctccaccaaatcaccagactcccaatactaaggacagtatgattcaagaagggggggattcaactcaaattgctgcacctgccacccagcaattcatctggactatagagcacacacctttgttgaacactcaccatcctggaaaaaagttcaaaattgaaaaactcaagaaagatcagaatcaagagatgattagcagtgccagcactcaagaaacttacaagaagaaagtcatccaagaaaagcttgatgatctcggttcattcactctaccatgctctctaggaccactgacattcaataggtgcctttgtgatttgggagcatctgttagccttatgcctctctctactggtaaaaggctagggatcatggaatacaagttctgcaacttagctttactcttagctgatggttctgttgcacatcctcatgggttagctcagactgaagaccctacagaagatgactggtatgagatgaggaaaaaatttaaatggcaaagcagagtcatagaaggattctcttcaagggtgatgaagctgaaagatcaagtatggatgtttgaaaaaagagttaataagttttcaactggtattgatccagagaagatggaaactacactacctatcaaagaggacgaagatttcactagagaatggtttgcaccagaagatcagaaaggagttcacttagaggaaagaagcctagagagcgagtcgttgagtgaggaggaaatctctattccgacttattctccaggagagcctaaaccgcccacaaacccctctgctgcagaagaacagttgattcttgattcttttgctgaaaaactcctagagctctggattggatataaagctcaggaggatacaattggaaagtcaacccataaaatggaagagttaaatagcaccattctagaacttcaagaaatggttaaaggttaccacaactttgaaattgaggattggttaaaggagcctggttcagaagaagaagactactctgctaatcaaaaagaggcttattttgaagaaaaatcaaatgagtactcatcataccatatgtcaagagaggatgcagagtatgattcatgcactaaaaattcaaccactgaagatgaggacttctatgttcctctcttcaaccctttttctgactaa

SEQ ID NO: 159230 - DNA, 580 bp, Arabidopsis thaliana landsberg
  unsure (1)..(580): unsure at all n locations
attgctgcgactggaccggaatcacctgcaattcaaacaacaccggaagagttattagattggagcttgggaacaaaaagctgtcggggaagttgtctgaatctcttgggaagctagatgagattagggttcttaatctctctcggaacttcatcaaagattctatccctctttcgattttcaacttgaagaatctacaaactcttgatttgagctctaatgatctctccggcggaatcccaacaagcataaatcttccaccgttgcaaattcttgatctttcttccaatggattcaatgggtcgcttccgtctcatatctgccataactctactcaaattagggttgtgaaacttgcggtgaactacttcgccggaaatttcacttctgggtttgggaaatgtgttttgctcgagcatcttgatctaggtatgaacaatcttactggtaatatccctgaggatttgtttcatctcaaaagtttgagtcttttagtgattcaagagaatcgtctctctggatcngtgagtcgngngattaggaacctctcgagtcttgttcgtcttgattttcttggaat

SEQ ID NO: 159231 - DNA, 451 bp, Arabidopsis thaliana landsberg
gatacaatgttattggagctgtgtttttttaactccgcttaatgggcctttaaaggcccaactagtgaaaactagaaaatactacaatctgataaaagtttacaatctattttttcattgttttcaacaacgacacattctacaactataagaagtgtttacatgaacaaatcggttctgttatatatatgttttttatacataacatgtacgtttacaattttcttaaaacacatccgaggaagatgtttgttatgtgcctggaaaagagctaggtgttgtgctttgtaagatgatgaaagcgcaaacaacagaaagagagaaaacagagacccaagtattctctgtatacatctccatcgcgtctgttaacgacaacctcgtcctgttctctgcccagttccttagtctatctgcttctgctgcatataacgcccgtccctgcaaacac

SEQ ID NO: 159232 - DNA, 492 bp, Arabidopsis thaliana landsberg
cttgatcattgctgtttttaagaagagtctgcctattccacagtttctgaattttatgtacttctatttattgcaggttaggcaaatcacggtaaccgtaaggtacatttaagctttaccacttttctatgtactcatcacaagccattctcgcaaattcttaagactaaactcttcattttgatccgcaggactatcatcaacggtatatgctatctagcaacatttgttttcggtctcaacgcgttcggacttctcctttactctggtcaattagccttcaatgaagattctgctgaagaaaacatgaaggccacaacacaacctggagactcatcatcaggtgacaacagtgaagtaaataaaagcaatgaggatcaaagttcaggtgattgattagtccggtctttactatgaaacatgtattaataatatcatattcatgtagccaactatgcataaaattgttttcttcttttcaatttattgtaa

SEQ ID NO: 159233 - DNA, 415 bp, Arabidopsis thaliana landsberg
aaatgcaggaaagatgtcaactattgctaatgattatgatgaagacgataataaatctaagattgagaatggatcttctgtgaacataagtgaaagggaagttttacctcctcctccgccattaccacctgggattaaccatctggatttgagtacgaaacaagaagaaccccctgttgccaggacagacgatgatgacatatttgttggtgaaggcgtcgattacacggttcctggaaaagatgtgactcagagtcctatttctgaggatatggaagaatctcccagggataaggagaaagtatcttatttcgatgagcctgcttatggtccagtgcaggagaaggtaccttatttcgctgagcctgcttatggtccagtgcagccatctgctggtcaggaatggcaagatatg

SEQ ID NO: 159234 - DNA, 780 bp, Arabidopsis thaliana landsberg
atttctcaaacgagtgcaataacaacaacaacaacaacccttttcaagagatcaagaaagaagaaggtaaaaaatacgaaaaagacagtgtttctattagttactgatactgttaaagataatattactagttttagaccagacatagagcaactctgaccaggctactacctactggtttgtttaaatctgttgaggcatattgtctaagatacgcctagcaatcttatattttctacatttggactgatatggttttacattttagccgattcaaacctatatttctctaattaatatatatgattgttgacagactttggctgagcttaaagaggaagagatcatgctcttgaaggaaagtaacggcctgaaaaatgtataacctccattttagcctctttctttatgtctctatatatcaagtccaagttctaatcttagatttggttaatcttattcttgaatcaggaattggcaaatatgcgcgatttgctagagcaacaaagagcaagaaacactgctctaaagaagatgaaggtgagcccatcgctctctctctctctctctctctctatctttctatacatgtactcattcaatcatatatacggaagataaacatgttaattattcaagtatatcattttcatgtgtatgcaggctgaatcacaatctgccttatcgtgcaaactcactttcgaacaaggttcttccttcttgctccctgacctaaacatgcctctagataacgacccgagccctgaagttgtctgctga

SEQ ID NO: 159235 - DNA, 556 bp, Arabidopsis thaliana landsberg
gaactcacatgtttgggtgaggtctgctgattgggaagagtctcagaaggatcacgatcgtgctcggagtttgtgggaacgagctttggaagacgagggttgcaggaaccatacgctctggctcaagtacgcagagttcgagatgaggaacaaagacgtcaaccatgcgaggaacgtttgggatcgagccgtgaagattctacctcgcgtggaccagttttggtataagtatattcacatggaggaagatttttgaacggtggatggattggtcaccagatcaacaagcttggctctgttttatcaaattcgaacttaggtataacgaaatcgaacggtcaagatcgatttacgagagatttgtgctttgccatcctaaagcttcttcctttattcgatacgcaaagtttgagatgaagaacagtcaagtttcgcttgcgaggattgtgtacgaacgcgccattgagatgcttaaagacgtcgaagaagaagctgagatgatctttgtggcctttgctgaagttgaaaaactatgtaaagaagtggaacgggctag

SEQ ID NO: 159236 - DNA, 897 bp, Arabidopsis thaliana landsberg
atgcgcaatgagaaaagaaatccaaaattagaagctacacatctggagaaggccaaggaactctatactaaagtatggtgtttagtttttctcctttctctcttctaattattagtaatttgggaatatgcatgtgcttctggggggcgtcttgggtggaggtttgcctgtagaaacctgaacacgttgttgaaatttttgctataccagtagcattgcatgcttaaattggcgatgtcctctttccatcaacgctaatcgtctttctcattgttgatcgttgggattaacaggtcctgactcaacataattccaacatgtatgctgccaacggttctggcattgcattatcagagaaaggccaatttgatattgccaaggatgcttttactcaagtcagcttttatcatttactgttcatagtataggctagctaaattcttgaaatcattggaattttgtgaatgttttaggttcaagaagctgcgagcggaagtgtatttcttcagatgcctgatgtatgggtgaatctggctcatgtttactttgctcaagggaattttgccttagccgtgaaaatggtttgtcattttatatagcgtttttttttttttttaaattcttttggttgatttcgatgttttgcttaagtactctgttcattatctatgttgttggcagtatcaaaactgcttgcgaaagttcttttacaacacagactcccaaatccttctttacttagcccgtacccattatgaggctgagcagtggcaagagtgcaaaaagacactattaagggccattcacttgactccttcaaattacacattcagatttgatttgggtgctgtaatgcaaaaatcatcgtcttccacactgcaaaagaaaaaaagaaca

SEQ ID NO: 159237 - DNA, 72 bp, Arabidopsis thaliana landsberg
aaggatgttgagcttgccgctgaaagcagaagaaacttcctgagtcaacttattcctctgatccctaaccat

SEQ ID NO: 159238 - DNA, 3069 bp, Arabidopsis thaliana landsberg
atgagtgcaaagggtagagttaagttcttgtattgggactcgagttgggattaccattagagcttcattggttatactctgggtagatgggatcttatctctgtatgcataacttgggacttacctttagcattctactaaagctcaatcattcttgagagatcccctgttacttaagcctattttgtaagggaccatctttgtctctttacctttaccttagccaaatgagttcattgatgatgcattgcttgattcacgttccaaaactaatgaatgttaaagggattggtagatttgaaaacatgtgttggtcgagcatatgagtcggattgattgataatgaggcatggctaacgtttttaagtagaattcgatcttgcagcttagaactttcaacttggacattgatttcatctggtctatctggtgagttggctttgagtccccgctttcaaacctcacttccagcttgttcttgattgtttgcttgagggcaagcaaagactaagtttgggggagttgataagtgtgtattttgcatgttttgagcatccatttgtcatcactttagcatcatatcatcactgttttataccattacacatcatttgttatcactttgcatgtttaggatagttttgcatgcatgttgcatacttgcgttgatttcaggtgatttggagctgttgacgagctatctggaagaagcggacctgatcatgacaaaccactcgacccagaggtcgagtaggagcttcaagatctcaagagaccactcgacccccaggtcgagtagaggacatcaccactttacttcaccacgcgaccacgaggtcgagtgccctcatctccttcactagaacatcactcgatcacttcactcgaccatgaggtcgagtgtcttcatctccatcaccagaacatcactcgatcacttcactcgaccatgaagtcgagtgtcttcacctccatcatcagacaatcactcgacctcatcagtcaacctggaagtcgagtatctcctgaccaacactcgatcacatcactcgaccccgaggtcgattgtcttcaccttcattgccaaaccactactcgacctcgtcactctacctggaagtcgagtatcaccatcaccaccactcgactgcatactcgatgaaaagcttcagagccttcttcattccgcactcaaccagacactcgagcacgaggaagaaaagaagactccagctattcactcgatctctcactcgaccacatgggtcgagtacagttcttaacccgtcccaatacttcgtcgttttgagtattagggtttcgggatatttggctataagtagcatgtaattaacattttcgcacaagaagtttttatctaattttattccgcagaccttatgttctagactttttgtaatccggatttctctttatctattcagtattcagtattcagcttttgttctagatttcgtttactgttgttcattctgttatcatcctgctgttacactgttgttatcatgttttcaacttgttcaacgtttatgctttctgttatgatgtctgagtagtgaataggtttctgaggatcggttagagtagtgtagaattctcagtatgctaggtgattgagtattggttgatagatcccttctggattagttgttcttaatgcctattgctttctgatcaactagaatttgagcccagacatttctgcgcccaaaaggtgttcgatgaaatgtctgaaccactaattccagagatttgtggccatgtaccaaggtaatggttgcagggagcgttttagctgtaacttgttgattcgtaatacctgttaggttagctctcgtcaatggtgattgagtctgggactacgttaacttgagggtctctgttgcggtggcacttagatttggttaaagaacttgttatctagggataatttattgagcatgttaatcacctgtaaactaaggaaacgaaactactcaattatcccatcctcgggaattctttatctgattgaatttattgtttactctactattgtttactgtatcttgtcatctgttgcatagtttttgcaattctttcttgttactcgacatgatactcgaccaccgagttgtctggcaacaaactgtgcagtcgagtatccctgttttgtttactgcctgttactcgaccagtcactcgaccacacccaatgttctgcaatgagctgtgttggtcgagtgttttattatttctgttttttgcatgttcacttaggacagctagaacacaccaaaaccaattattgcttggcttgacttagtgacttctgatcacatcttgattgttagcatcacacccatttggattgacaacctaaaatactacaacgacatgatagtgctttatgtttaattgactaaaaacctattatcaatttggcgtctttgccaacacagcttgggggagttgataagtgtgcattttacatgttttaagcatccatttattatcactattgcatcatatcaccactgttttataccatttcttatcatttctcatcactttgcatgtttaggatagttttgcatgcatgttgcatatttgtgttgttttcaggtgatttggagttgttgacgagctaattggaagaagcggacctgatcatgtcaaaccactcgaccccttggccgagtagatgcttcacgacctcaagagaccactcgaccccctagtcgagtaccaccatgagagtcactcgatcacatcactcgacccccaggtcgagtgacttcatcccattgctagacatctactcgacctcatcactctacccctaggccgagtgtcttcaccttcattgccagaccactactcgacctcgtcactctaccaccaagccgagtgccgccatctccatcactcgacttcatactcgatgacaagcttcagagtcttctccattccgcactcaaccagacactcgaccacaaggaagagaagaagactccaacttatcgcttgaccaatcactcgaccacctgggtcgagtgccgttcttaa

SEQ ID NO: 159239 - DNA, 1641 bp, Arabidopsis thaliana landsberg
atatctgaaatcatggttccgtttcatcatcatcctttatcaagttatgcttctgaatttttgacttcctgctctttgtgccttttttctacgtttctaggagaaatagtcactcgcatcagatatcagtgtacggattgcggcttgaagttacacgacgaatgcatcaacagcctttccctcaaccgaccctttctgtgcaatcacattctcaaggtgtatactcatattttcacatcatctggccgtatatatgaaaacacttgtcatttttgtcaaagtaagttagaatttttatttgctcgttgcactatatgcaacttaaacgtggatatagaatgtttgtttgcactgccaccactcacaatttctgaaccaaaacaccacaagcatagcctcagtctcctgctaaggctagtcacctttacttgtaatgcttgtggtgtggaaggcgaccgcaatccttacgtatgtcttgaatgcaatctgatggtccacaaagattgtgttgagaatctaccgcgagtcataagcataaatcggaataaccatcgcatatctcatacttttcatcttggtgaaagagaaagagattgggagtgtggagtttgtcggaagacgatcaattgggtctatggaggttataaatgctctcgttgtcctagttatgccgttcattcaagatgtgcaacaagatacgaagtgtgggatggtttagagctcgaagatgtgcccgaagaagaagaagaaatcgaagatccattcaaggtaattaatgataagggagatatcattcattttagtcatgaagagcatcttctcagattggacgagatttatgtaacggatgatgctaacatgcgctgtcggtgttgcgttcttgctatcaacggtgacccatgctacagatgcgttgaatgtgatttcatccttcacaaagcgtgtgcgaatcttcctcgcaagaagcggcatttattgcacaaccataaactcactctacaggttgacgaggctgcctcttcagataatgcgtgtacagcttgggaaacgtattctaatggtttcaggtacaagagtttctatagttgccaaaatgatgttgtgtatgaagttcggtgtaggtccgtatcggaaccatctgagcatgatctgcatgcacatcccttatattggacattggaaagttccaaacgatgtcaagcttgtggcacggaaactgatgctaatctcttaaattgtacggtttgtgatgattacgcattatgcatgaagtgtgccactttaccaagaaaggtaaaacataggtgtgatgatcattttctgtcattatgtcaaggtgtgggaaacgcaagcggcaacttgtggtgtgatatttgtgagaccaagacacatccaaatgtatgttactatacatgtgaagaatgtgggctcagtctccatcttaattgtgttcttggtgatttttattatacgaaggtaggactcgtctatcctggtcttgaagtacttcccaacaatggtgctactcgacctttctgcaacagctgtaaagttcgttgcaagttcagcttccttatgaagcaaactctaggagaccttgttcgttacttttgttcaatacgttgtattcctagagcaagg

SEQ ID NO: 159240 - DNA, 140 bp, Arabidopsis thaliana landsberg
atgatgttggtgcgggagagacatctcgatctgaagccgcttgttgatcgtgctgtagataccggcttgcatctagtacaacttttaccagtaaatgacacatcctgtcataagatgtggtgggactcgcatccctacag

SEQ ID NO: 159241 - DNA, 483 bp, Arabidopsis thaliana landsberg
ctgcatcatggtgctacatatataccgtctttaggcttgcttctctttgactttatctagtccgatggttcaaacaaaaaccgatcaaaggatgggtcttaatctgaatttgtctatctactctttaccaaaacccttatctcaatttctcgattaatcgtctaggatcaaagacaatcattccaaactgactgaattctacggttatgtcggcaaattagctgaagaagggaacataatcgatgtttttaaaccagaactcccttaatgcatgctctcattgaacgaaggtatctcttattcaaattctctccttccattttttttatctactctaaccgattcgtgttcttgcacaaagagattgttattctatgtgtagcgagtggggcgatgaaagatgacgctagataaggattatcactgatggcatctactggtacaattccatgatgtttgccagggccacatcccggctaaact

SEQ ID NO: 159242 - DNA, 1918 bp, Arabidopsis thaliana landsberg
atgacgaggacaccaccgacacaagtccagccggtaccactttcctcgtccttaggtaacgtgatcccatcatccctgtcagtgccgccgaccccactgcatattgtttaacatacttgaactttggactcatcataagctggtttaagatttgccaagatcaatgaacaagaagtatgatttcttaccaatgccaatggaggatgctaagactggatttcctgggagctccgtgtatacataatagaacaacgcagctgaacctcctcctgcgacaagtgatattttgttccgcgtttcaggtaacccatcaacccaccaactgccacaataattgccatgagtcaacgcattacatgttatatgttagatacacaccattatcgaaacattatgatcaagaaatcacagtagaaactccaatgattatctcatcactagatataatattgctattcaccacgatccaaatctaacactcgcatttatggacagaagaagacaatagaactagttttctatcatgaatttaacaactaatacacttattgacaaaacaacacatgctaaactacaatcagactagtaaccacacattacaaagcctggataaatagtactcaagacagtgacaatgatattagagatgtgaagtcatgggaaccaacctatctaatggttcctctcttgcactatctcaatacctaattgtataataactagatcaagtcaacgaaatcatttgaaaactcaaagaaggaagcgatcagattcaatacctccgaggagagaagcataagcaagagtgaacttctgcgacaaagatgagtccattttcttcttcttcttcttcagcaacgatgatgctctttgctttcttcaggggaaaaattggagacgaagcaagtctggtcaaatgaagcaagtcaagaacggcgtcatgacttgacgaacgatgaccctttttgggtctgttactgggccggacttattgacagattttgaatctgttctatttgaaaacagaaagtaggcccataagtttgacgatttgcgtggatatgatgggaaaagggttaatttcattaacaaaatgcgtgttgatggagtaaatccaccaattaacaagggagtaaaatccatgccctaagaaaaaattgtttgcgtgtaatgtagcttgtttttcactgattcatgttttttttatctctcaatttctttttttctcagtcacttattcgaaattcatcatttgctaatgtgattttattctatactattatttgggaagtacatcatacacggtaacattgacaagcgtaagaaattacattagaatatcattagaaaaatgtaatcatagacaaaactaatctacatcattaaagatatatataaaataatatcattattagtctcactattttatcaaaaaaaataaaaaaattagtctcactaaatttgctaattttccatcttaatcacaattaggggttgacattttggtttaatttcgagttaaatttgtttagttagatgaagaataattcgactaaataacaaaatgaaaaatattcaagtaacaacactaaataactaaaatcagttgtaaattgttattggctttgtggcatttacaagttcaggaacacttctgattctgacaatctcatgttataacaagtaacaaaatcatgttataaaattgacgacatgttgatgatattttcttcaatctattatgaggaattcgttcgattatctccgctatgcattcgaaggtaattgaatctcttttagaatttgtgatttacttttgtcctttcaaataattaacttatttttctaaatatatatatatatatatcttctacttttataaacaattatagcgtttcaaatactaattatcattatc

SEQ ID NO: 159243 - DNA, 638 bp, Arabidopsis thaliana landsberg
actcggatgggcatgaagaaacatttaaatggttggcttatggtcctagaagcatcgctaggtcttatactgggtacatagtgaatggactaaggttccacacaaatgttgttgataagctaagtcagaatagcggagtgtattatgaggcaacgacgatgtgtcgttctagtgccaaggacacatcccaagcagttgattgggtatcatactatgggagagttactaagattattcttctcgattacaatgtgttctatgtccctattttcaaatgtcattggtaggcctaggcatttcgtattctgttcaggttcagatcggtaattcggtaatacggatagggatgttaaggaaccgcctggttttcggatctgattcaattcgaattcgatcggttttgggtcggttttccattttgaaatagaatccgatgtagaactgaaccatatttcggtcaggttcagatcggtttatgaacccaaaaaacccggatatttccaggttatttgcagtctatgaatttcttagctaagtctgagactgagttgagcttgttcacctcacatcctcacctatcttagtttttgacactactccattcttcttatggttaactattatctgcttctcatcaa

SEQ ID NO: 159244 - DNA, 4817 bp, Arabidopsis thaliana landsberg
  unsure (1)..(4817): unsure at all n locations
gggaatgctcaactgaagagctgtgctacattcagaaccaaggagggttcaacaagggcttaacaattcaagcccttcccaaacctctcctatagaagcaataatgtagctaacccccaagatcaagtgtatccaccacaacagaatccgtccaagccttttgttcagtacaacaaaggttatgtccctaaacaacagttcaatggaggctaccaatagcagaatccaccaccagggttcactcaacaaccacaacaagccctaggagctcaagatcctgaaattaagcaactcattcaacagaccatccaagggtaagctactggcgctatggcttttgacaagaagatagctgaattacacaacaagatcgattgttcatacaacgatctgaatgtcaagtttgaagctttgaactcaaaaatcaagtatgtggagagtcaatttgcatcaacctctgctccgaagcatcctcaacaacttccagggaaagcagtccagaatcctaaggactatgctactgctaatgctatcaccatccaccaagaagatgagtctccaccaagtcatcagactctcaatactaaggacaatatgattcaagaagggggggattcaactcaaattgctacacctgccactcagcaattcttttggactacagagcacacacctttgctgaatactcaccattctaaaaaagttcagaattgaaaaacttaagaaagatcagaatcaagagatgattagcagtgccaccacccaagaaacttacaagaagaaagtcatccaagaaaagcttgatcatctcggttcattcactctgccatgctctctaggaccattgacattcaataggtgcctttgttatttgggagcatctgttagccttatgcctctctctacagctaaaatgctagggatcatggaatacaagttctgnnnnnnnnnnnnnnnnnnnnnnnnnggttctgttgcacaccctcatggtctaatagaaaatctgcctatcaagattggaaatgttgagatacctatagattttgtggtattagacgtagatgaagaaggcaaggatcccctgatcctaggcagaccattcttagcttcagctggagcagtcatagatgtcagaaatggaaaaattaatttgaaccttgaaaaaggcatcaagatgaagtttgacatcagagaagcttcagggaaatcaacaacaggatttcagaattttgagattcaggacatggatgttgatgaagaaacaaaaagagagcaacaaaaaggctagctcagactatacttcaccaacatgttgatgaagctcaaacctcaccaaaagtcaactacacttctcaactcagcaaactaaaagaggacttttgaccacaagaagagagcaacaaaaaggctagctcagactaaagatcctatagaagatgactagtatgagatgaggaaaacatttaaatggcaaagtagagtcatagaaggattatcttcaagggtgatgaagctgaaagatcaactatggatgtttgaaaaaagagttaaaaattttcaaatggtattgatccagagaagatggaaactgcactagctatcaaggaggacgaaaatttcacaacagaatggtttgcaccagaagatcagaaaggaattcacttagaggaaagaagcctagagagaaagttgttgagtgaggagaaaatccctattccgacttattctccatgagtgcctaaacaacctaccaacccctctgctgaaaagaacacttgacacttgattctgttactaaagaacttcttgaactcaggatagaatacaaagctcaagaggataccattggggagctaacttacaagatggaaggactgaaccatgcaatcttggaacttcaagaaatggttaaagcttaccctaattttgaatttgaggattggtcaaaggagcctggttcagaagaagaagactactctgctgatcaaaaagaagcttactttgaagaaaaatcaaatgagtactcatcctaccatatctcaagagagaatgcagagtatgattcaagcactgaaaattcaaccactgaagatgaggatttctctgatcgtcgcttcaaccttttttctgactaagctctgtaagagttaagcttagtgacttaaaacaagctcacttgggaggaagtcccatgtctatccatgtatataattttctatttttcttgttatttttgatgtttttctttaagtgtttcaagtttgttttagtgaccctaagagagtcaacggtcgagtaaattcaaaccaagtcaagaaagatctcaaccgtttatcgagtagaatgaggaggagtatttttagccattgatttggatgatcaaatgagaggtgcatcaccaccgtttgagcgagtgacttcctgaagtttattttggtccgtttgatcgagtaaacaagaatgaaaagctctccaccgttggatcaaattttgcgcaactcaagaagatgctcgatcctttacttgagcttgaattatttggagaccaagaagtgatgtcgcatgtcccacttgttccccttcacttcattattcaacggacaaaccatttacccatgcccatcaccatttccaatcaacttttctatctcttccaaagcaaaccaaagaccaatcacctccacccattgatttcgacaaaccctccatgaaactctctctttcatcatctcattttcgcaatcccctcacaaagctttgaagtcttcattccaaacacttccccaaaacgctccctatcactctttaagaattcgttccccttcaccaatacttcaccaaaattacttgaccactccaaagtctttcctcaaacattcaatcggtttcaagctaaaaattacatcaccaaagaaaccgattcctttcttctttgatacctcttggagaattgttgttgtttgccctgtcgaagctcaccaccaatctccatggattcaagaaggaagagttcatctcgggcaagaagatcctctgctgataatgaagaagttgaggcgtttgacatgagtggcatgactgaacgccaaattcgccatgctcgccgtgctcaaagatcaagctcgattcaaggaggaagctcaagccgctcaaccatgcaaagagaagaagtagctcggggaaagagggtcgttgaagctgaagaagaacaccatgaagaggcaccctttgaagaagcggtttctgaggaagaggttgagatcattggggatgatacaccaacccctgttgggagaagaaactggccaaggaggaagagagagccaatcccgagcgagtactatcaatacttgaaggagttgaagtttgagggaactagataccctcataaggaaacgatgcaagagcttggtatttgtggtgatatggaatacttgatggaattggccaatcatgcaacattcatgagctgccaatgtgggggatacaaataggagagctgccaactccttgcaaccctcaaggttcatttttgtgttgatgattcggagaaagaggagagaggaggtcttggttacataactttcaaagttagggatgtcgagtatactcttgatattcgccatcttgattccatttttgggtttccaagtggagaaggaatccgccaagactatgatcaagaagagctgaaatctctttggaatacaatagccggtccgaagcctttctcgccaaccaagagcaagagttcttcaatccgaaatcccaagattagacacctccaccaatgcatcgccaacaccctctttccaaagaaggccaccggatttgttggtgaagaggagctatgcatgatagacctttctttggtcttcattttgagagagacaaaagattggaggaagatgacgggtgatagagcggacacatcgttgagtgttgttctcttggatcacctattgagctacaaggagtatgctgcaaccatccatcgctcgggaattcgcgggagtctttatgttggtggtctcttaacgccaatactaggagttgtgagaatggaattcagaacccctaacatgttgcctaagttcattgaccttgactatctcaaggggaaggatttttttgagaaaacaactccagcggatcgctacctcttcaagttcaagcatacggagcttggaccttctcttttgcccctaccaagcgagaaccggacttcggtgaagacaaggcgcaacatcaatttcatgtcatctccctctgtcttgaacatcgacattggaggagctcgagagaatgaaccggaatatagtcaagctgaatatgagcaacatgagtactttactcaagctgactatgagcaccaaatcgagtttgagcaacatattgatcaaccgaagcaagggactagcgaataagagcaagctcattatgaagaaggtgctgactaaggaggagatgaaatagctgaagttcccaagaagctcggtgtgcttgaagagcttgggaatcttcacagcaagacaatgaagggtttcaagaagaagatgtgaacaatgcagaagtcgctgaagagtatggctgctcaactcaaggacttccacagcaagccaaggcaaccgtctcccaccccctaagtaagaaggagcggttcaacgagctcagctgcatggagagctgaaaggatcgattaaccccgagcttcatcttttcagcctcgggaagtgatctccgagctgagagagccaaggagtcggcagatacgagcttccacacgctcgaccggacagaatgagcaaaaccctccc

SEQ ID NO: 159245 - DNA, 3247 bp, Arabidopsis thaliana landsberg
  unsure (1)..(3247): unsure at all n locations
atgggcagattccaaatggcaaaaggaaataggagcaaggactgtgaagaggatcattatgcaagacaatttctggcacaaggatggttgacggagagaagaaaccagctacgagatacatctatgaagcaatggataaggctaaagtggccattgttaaaaccttcaatggtaaaaaagacaaatacaaagattcatttgaaattatcgataagcactgagattgtcaactccatcagcctttgcataatggctacttcttgaatccgaaatttcagtataatccagagtctagagtgcattgtgaagaggttgggagaggtctatctacacatttgataggttggttcttgctgctgcaactcaagataggttaagcgacgaactagaatagtttaagagtgcttatggactctttgggattcgaatggtaataagtcaaaagaaaaaagaaatcaccagctacgtggtggtctgcgtatggaggcacaacaccaacacttagagactttgcaatattcttcgtctcacgtgtagtgcgattggttttgagagaaattggagtgtgttttcacatctccataccaaggaaaggaatccaattggctcaagaactgcttaatgacatggtgtttacgctacaacaaatatccacattgatagcacaccacgaaagctcattttccgtaactgttatgaaaaatgaaattttagtttagatattgtataatagcattgaaacaacgctaagatataatttcactaaggggaaaactaaatcacttattccaccactacttagcccaaaatatttagttaagtgccaatacttgtgaaaaaaacacaataactttgagcgaagaaaaaaaagctctcgaggagcaactatcttcttctccatctatcaatgatgtctctaatctgctcctccaccgcctccgccgctatggctggaccatctccccaaacctcctccttcccctcagccacctcctccctccacctccgattttttcgaccaagctcacccaaaccctaaatcaccttcgatcgagcctacatgcctctcttgcttatgaaactcgaattgaagattgttctcatcatggtctcaacaagcctaagtctattcaatgcgacaacatcgctccaggtaagtctctttctctattgcttctacaggttgttacaattttcctacatctggggattttcgatttcgaagacacagttgaacattctgaggctgattcgtgggttttgaatctgatagaatagaaacttcgatctaatttagggtttttaagtttcgggtttggatttggaggtgaatctctgatttaaggtaaccaagggaataccatatattcacaaagccattgatgtaacgttttgtttaaattgtattgcagaatgtgtataaaggaaggaagaagaagactatcaagtatttggcctgcaagagtgtcgacaagtcgcagaaagagaaagttttttcatgaggtaattaggagatgagtcttctcttggccaaattagtgatttatacttgtgttacctgagattatgttagatttcatgactttaagaagtttataattggattgtgataaatttgctctagatttgtcaaccaaacttcatttttccacaatctctaatttttgaagtgacttggatattgagaattttggtaactttgctcttccttttcaagtcaggatcctatattcgctaaatcatccaaacatacatactcaagttctatgattggtaaaaatttactagctaataattggtggtttcatatataacaagaatacaaaacattctgctgctcgtagtatatatagttgtttaattattatattcttgtggtttcataataaacttcttctcatatgtggttagttctggaatattgcgttggggtgatctcaggacatatttcagcaggtgtcgcttgtacgtttgttgctgatataaggtcacaggttttctgaaattcacttgttctgcaggactgtaaactgccagaagaatctatctatggtcttgcttatgatcttgtcatagccctgcagtaagatcctatctaaaccattttgatacgacttctagaaaatgttttctcttactggacattctttccttaatttctcagctattatatattgtgatctgaaaccatcaaacatcttacttgatgaaaacggacatattaaggtacgtatgtttctgtctggtgtgtagtttatgatgatagtttataatgtttaaatgatctcataacactgtgtgttgcagctgtgtgattttggattgtcaaggaagctggatgatatttctaaatctccttccacggtaaacacttttgtccgtcttcttttccagtgttagacagtgaatctatatctcttgtgataatatgcatcagggaaaacgtggtaccccgtattatatggctccagagctatatgaagaaggagggatccattcttttgcttctgatctgtgggcacttggttgtgtactatatgaatgttacacaggaagacctccttttgtggcaagagagtttacccagcttgtgaaatctattcattcagatccaactcctccactccctggaaatgctagtcgttcatttgtcaatctcattgagtctcttcttatcaaagacccagctcaaagaatacaatgggcagatctctgtggtcatgcattttggaagagtaagataaatttagttcagttgcctactcagcctgcttttgataatatgattggcatatacacaaagccatgccattccgagcgaaatggagacagaccagataagacccctccaaagtatcgggagaaagatccaaaagggggttcaaagcaaaatgagaactccannnnnnnnnnnnnnnnnnnnnngacgccgataaagggcacccctggtgggtctaaagctcaagcaaagcttcctagtagagcagctgagcaaaagcatggaggtcgtcctgctgctaacagacaggtgaatattctaagagtgtcaaggatagcaaaggcaaatcttcaaaaggaaaatgagaaggaaaactataggagtcccttacctaatagcaacgagaattgtgcataagtgaagatcgacaacactgatatggaccttgattttgatgaacacaatgatgatgagggacctgatgaatcagaaggaaccgaaaacacctcttgtgctctggaagaaaga

SEQ ID NO: 159246 - DNA, 2578 bp, Arabidopsis thaliana landsberg
gagcagattatcggcttggaagctacggcgatctcggaagctaactcgccggtgaaattagagctcaaatcgccggcgaaatcggagctcaagtcgccggcggcgaagtcggagaaaatcacgtccgaagtcgtcggagaaaatcgcgatttgggagcagcaacgtgaagaatttcttttttttttactaaatgatttactctttattgtgaattctccctcagttatttattaaggagagagatgtaattacacatggtcgagtggtactcagaataaatggatggtactcagaatagattttctaaaatgatggcataatagaacgtggctctgtagattttatcaaagtacatatatatgtgggaaaaagacgtaagtggtctaatacaaaaaatgtaaaaaatgaatgggtgcagtgggtgttacacgattggggagacaaagattgcataaagatattgaagaattgcaaagaagcggtccctccaaatatcggaaaagtgttgatagtggaatcggtgatcggagagaataaaaagacgatgatagtggacgaacgagatgaaaagttagagcacgtgagattgatgcttgatatggtgatgatggctcacacaagcacaggcaaagaacggactttgaaagaatgggactttgttcttaaagaagctggctttgctcgatatgaggttagggacattgatgatgttcagagtcttataatcgcgtatcggtcttaaaaggatcatatatacgaaaaatgaatcatagccgaggaagagctaaaccaaattttcctttgagaaaaacctcaataagtttgtgattcttggtttaatggtacgtgataaattaaatcaaggcttgtttatttgaattttcacatttcttttgataaattcccatttttacttcatgaacttttagcccattatggtgatgatgattcataagaagcccaaaaagcccaatgctaattagatgttaacacgcgtcgtcaccttttaaatgggccaaacaatcttctctctcccggcgatgggcttacgcagttacgcattacaaatacacactacgcttcttcgtcttctctctgtgggacttctgaagtagtaatttcacggcgagatacagagcaattagagaatcttctctctggtctattaccgtgaaaaactttctcctattataaattttatttcataggaagatgagtgagaaagcgaggagaggtcgatcaaactttaatggactacatcaccctgttgttgatttttggcgacgagaggtcggtggaatctcctctcgtaatttctccaatcgcttctccgcctccgaggtttgtgttttctctattggattcgaaagttttgaaatttgtggttcttctatgagtctcattggtggatttagtcgtatcgttcaattgactaattattgttatgattcacaattcttatattggttctcgtatatgtagaatttggttctgcgtttagagatatacaagaagctagagaagcacaaagggtgtgtaaacaccgtgagtttcaatgccgaaggagatgttctgatatctggttccgatgatcggcgtgtcgttctttgggattggcaacttgggaatgtgaagctttccttccattcaggacacgctaataacgtttttcaagcaaagtttatgcctttctctgatgatcgaacgatagtaacctgtgctgctgatggaatggtaaaatcctttgagttgctttaagaaactctctgttgttttctgttagtgtcacactttacttagattaaatctccaaacatctttaggttcggcgtgcaagtattcttgagggtgataaagtggagacgtctttcttgggattgcatcaaggacgagctcataaactatgtatagagccaggaaacccacatatattttacacatgtggtgaagatggattagctcaacgtgtgagtagtaagctgcatcactgttttgatatctactttagtatccttataatttgattaaagacattggattgttgcccattttcagtttgatctgaggactgaagcccctacagaacttttcacttgccgatcagttgatcctaggaggaggaacatggacgccatccagctaaatgcgattgcgatcgacccgagaaattctaacctctttgctgttgggggaatggaagagtacgctcgtctttatgatatccgtagatttcagggtgagggtttaaatggttttacccgagctgcagatcacttttgtcctccacatcttattggcaatgaagatgttggaataacggggttggctttctcagagcaaagcgagcttcttgtttcatacaatgatgagttcatctatctcttcactcccggtatgggattagggtctaaccctatcccatcctccccgatatccaagagtcctgtatcaaaatcagaatcatcttcttccccaaaagatgagaacgaacactcagtttctttggtttataaggggcacaagaactgtgagacagttaagggtgtgaacttttttggacctcggtctgaatatgtg

SEQ ID NO: 159247 - DNA, 669 bp, Arabidopsis thaliana landsberg
atgttttggaatgtcaaaaaaactgttggtgctcctgtcctgatagctttggtggttgggaaggctgcttttgaatatacaaacaagagtaagtctgagcacgtgaaccatgcaatgatggttcttcggaagctttttggtggggatctggttcctgatcctgtcgcctcggtagttactgactggggcactgatccttacagttatggtgcctactcgtatgttgctattggtgcttctggtgaagattatgatgtattgggaaggcctgttcagaattgtttgttttttgctggtgaggcaacatgcaaagagcatcctgacactgttggtggtgcaatgatgactggagtccgggaagctgtgcgtataattgatatacttagaagtggaaatgattacacagccgaaatagaaacactagaaaaagcgcagaggaaatctgtacctgtaagggatgaagtcagagacctaataaagaggctggaagttgttgagctgtctaatgtgctagccaggcaatcattgctacgaaacatgttcttctctgccaaaacaactgtcgggcgtttgcatttagccaaggagttgcttaacctacctggtgaaaccttgaaatcctttgcaggtacaaaagaagggcttgcagtgctgaactcttggatcctg

SEQ ID NO: 159248 - DNA, 100 bp, Arabidopsis thaliana landsberg
ggcggactagaagggctcggtggaatgggaggcatgggtggcatgggtcgtatgggaggaatgggaggcatggaagagttcgaagacagtgatgatgaag

SEQ ID NO: 159249 - DNA, 647 bp, Arabidopsis thaliana landsberg
tcttagttgttagtatcggactgcagagaactagtggaactgttaggaaatgcagttgcaggactgcatgggatgatagatgaacactttggtataagtgttgttgagtacatggctgctggtgcaatcccaataggtcagacttaaggacttgtatatgtgattttatctttcagttactcttgcgatttctctaatggatcctctgtttttaattgtgatgcagctcacaactcagctggacctaaaatggacattgtgttggaagaagacggacaaaaaaccgggtttcttgctgagactgtggaggaatacgctgaagcgatccttgagattgtgaagatgaatgaaacagagaggcttaaaatggctgaatctgctagaaaacgagcggcaaggttctctgaacaacggttttgtgaggacttcaaaactgcgattcgacccattttcacaggtcctcttaaatgacagttcttaaaccctcaaaacctgcttactgcactagcttttaaacgcacaagacaagctaggttataccttttatcctctctttatagattttttttttaattctggttaaaggtctgacgtagacgtgtaagaaacagtttggtcaaaagaaacgagtaagatcttcctatttc

SEQ ID NO: 159250 - DNA, 5821 bp, Arabidopsis thaliana landsberg
tcgccgacatgcttcgttttgatcactatatttgccgtggtggtaacacaactgatctttatgcgcaccgtttcgtccttgaacatgaccaatgcctatctgaaccacaaatgcttagccaatcaagggaaatacaagccgggaagttggtatgagaaaaaactccaaagtattatagtctctatcggtagcggtgatggttttacccttggttacgacatgatggcccttggtaaggattctgattacgtagccgtcaccaaccagtgccgtggcgactccaacgggtccatgtgccgctcctgctttgccaccgccatcgcaagggtaacgctatttcattattgattagctttcacgtctttctttattacatgtataaatttgtgcacacatatatgtcagttttggcgttatatcttatattttatatgtaaattactccatgcaatgttgatattgattttggcgttaatatgacaaatgtatatgaccgcttcgtatagaagatgcccgcgatataagggggcaataatatggtacgaccaatgtactctccagatttctccgttcgatactcaagggaagttcgacaaagataatgatttctgtatgtccaacaagaagaaaatgaacgtagattcgtttggagagaagtggatgacattcctcgacaatttggtaggtatagccctcaaagatcatttgtatgccgctggggatacaaggttcgggacaaagaagttgtacgggatggtgcagtgtaggcttgacatatataataatagttgtcgagagtgtgttggacacatagccgtaaaatttcaagattgctggcatggtaaacaaggagctagagtgttgggtgggagctgtaactttaggtatgagctttacccttttcttagaaactaacagcaacagtacaatgagagctccatattaaatgaaagggttctagagataaacagtcttataatatacactgtgttgcattttagtacgtgaacttgagcgaataaatgtactttcctctttgttttttgtgaacttgagttattaagaggaaatcttcaagtaaagaatttatctaatagtatatacatcccacatagaataccaaatagctcagctcatacaaactctctcataatgagagaaaaaaatcctgaaataagggtaagaaaaactcttatgcctcaaggttttagtaaatctcataattttggccgaaccacaaaaagagacgtgcgaaacaaaatagtagaaaattgatttcccgaatcgacaaacatggactaaactatatgtatgatacataactggtcgtacttacaatgatgatacttggtttcacgaagacgagggagcctggagatgaatgatggtgataaggccatgtgtcatcaccaaaaggagggttgctcctgaagttttcgccggagcggccaggaagtcgatcgaggtatgctcaccttctgggtttgattccaattttttctttgaattgcattcgcttgacacgctctttgtccaggcgatcgccgaatgggatcgtttgacttatttgtacgagcgttgtgttcggagcctttccgtagaggctactaacgcgaaagatgcccatgaggctttggccgttgaaaaggaaaaagtagctcaggcgctggccgacctggcaaggtctcaagacgacgccaaggagatgaagaggaaatatgacgagttagcttggtcgcgctctttcggagatgaagaggcttcgagaacgtcgacttgaatatgctaaatttgtccggagatcgaccgttgataagatggcggagctcatcgagaagcgattgaatcggatcaagacctatattgacgatacgaaggtggcggagccaaagtttttgaattctatcaagtgtatggaaacatcaagactctcgaggcgtagattgaagacggcgaggtggagataaagtcgaacgagatgatgtcaagattggatgcgaacgttgaattgttgaaggctgaggtgacaacctttaatatttgtgatctcatggtcggaggatttggcgtttaaagtctgtttgccgagctcaggtctgaactttgttactctgctttgcttcagagtagcaaggaagatgacgatcacgcagatggacgagatggtcaagaaggtcgagtcggggaacgaatcattgctcaggtcgtagtgcaagatgagaccacgggcgtcgacggctgagatcatagaacgttgcttcgttattcgtgcgtttcgtttaaggattgagatcggcgagtacaactttatcggtgcgtcatttaagatgagcgcatgatcgatcttctgctgtgattcgaatgtgcaagtgcaatcgtaggcagctttagttcgtcgaaatggtgtaagcgtacggtgaattcttcgggggtaacggcgtcgagatgatttgtatagtgattacggaggtgtaggtttggcatacatatatatatgtatatgtatatataccccccccccccttttttttgaaaaacaatgccggtgtggaacttggccatttgagaatttgttataggaaaactgaagtgtagctgactcacatgtgatttgatatagcgttctagaaggtcaagctcacacatgtgaagtcagggatgttaagcaaagcacgtgtgttgtgagctggcgagctggcaatgcgaagtcagggatgttaagcaaagcacgtgttgtgatctggcgagctggcaatgtgaagtcagggatgttaagcaaagcacgtgttgtgagctggcgagctggcaatacaaatggacgttaacggcgatcgttattaacgtggttaacgtttactttctttacctttttgtataagagcaacatgttatgctcatgctttcattatcgaataatctgtaatcttcagaattctctagaaccttgtaagtgctagatttctctcacatcgagagctagctgaatcatttggtgttttatgaacatcgattgattgtttggttttgaatgataattagagatttggattgttcttatgaatagcaggttttcctgtaacagaatgttggtggaatcgtcctggaaacgacgatggacgtaaaatcggtcacaaaggtggctgatctgatagccgcagacatgcatctttgggctacagccaggacgtgcttgtcgcagaaaaacagtaataactcttgttaaacgtaatcaattgaggcaaggatgaatccgttagaaagataagccttgtagcttcaaaatgatgtgcagatcggctcctggttccttttagctcgccgggaaatcgatctgaaagcagatagatcgggtgtagacggatctgtgtctcgataaacaacgcatgcttgagagaaaaacctataactctcggaagacagcaccaaatggagcaaaatcgatcttgttggaaagataagcctcaaagctttaagatgggctcttgatgttttctgaatcgttgggagtttgctttctaatccagttgctcccacagttcgaatctgcgatttgacaggtgtcatatgttttattgaaagtgataacgcttagtaaacagctcggaattggatgaggtcggtctctattgaaagataagcctcggggctcagttgatacttaggtcgcctcgtgatgccttttagatcgctgggaatttgattccgaggtcaacagatcggatacagatcgatctgtattttgtcagactcttctgcagataaacggcagtatctccgagaaaacagaccctaacgaagtgagctcgggcttgttaaaaagaggagcctcagggctgtaaattgatctgtagatcgtcttctgagtctctctagatcactgggaaattgagcctgagttcggctggtcggatagagacgaatctcggatcgaagcgaggtcgatggtaactcctaatagacatctcggatcgaggcgaggtcggcttctttagaaagctgactcttggggcgatctgtagataggtatatcattgcctagttcatcaggattttcaaggaaaacgatcccgaagctgactggttttatagagttgggtcctatgactggctgcgcttgcttgaggtaaacgtttatatctctcagcatatatcttcgattaaggcgaggtcaacttcttcgaaaagacgactctttgggcgatccgtagatgtattaacccttacgagattccctgtgatttgccgggaaatcggccccgaggcgaactggtctattcggacggatctgttaagaaacagacagcatcgacttcagaaaaacggcgataactctgagcagagatatccgatggagttacggttagattccctggaacgctgatctccggggcaatccgtggaatggttgtacgtcatctggttcattgtatcttgacgggaaatccccccgcaagtagaatgatatgcgaagagagttctttgtcgtccccacagacggcgccaattgttgaaccaaggattcacacaatagatttgtttagagagggaaaacaaatctagtaatttctcttcattaggtattctatccaagactcgattacaaaagatgttctaatctcttatgaaatacattagggttttaaaaaggtatagctgcatccatgatagattgcctacgtaccctgtgaagggatcaagccattcgtagttctcactaggtataaagttatgtgtttcttctgagtatccaaagatccccttttgtgaagtccctgagacactttatatagggtcgttaaaccgcctctctagcgatattcttcggaagattcttatttatccttaggtcggttctagaggataatcgtcctaaggatattctccttattcttcggaggttttggggagatttcctgatttcgacattatcttcaaagattctcctttatcatttccgaaagtcccataaaagatcctattttaccggaaatgatccttggagaatgaacggtttttacaagtctttgcctcgcgtgttcttcacggctcggtggtcgtttgagaggtggcttcggggcaaacggtatgtaccggctcggggcgcgcttgatgactccgttaagctcagttggctgtctcccgagccgacatagatgtttcccgcagcgttctcatgattggctcgggctgtgttcatatgattaacacccgagccattttgcaaactctcttcgggatggtcgatcgaataaggtcccgaggtgctttgttctaggctaggggccaatcatatgtttaatcatgaggtgattgttattcttagactgtttggctcggtcttgcttgtgggggaatccgaccctaacagttagccccccagctcgttggttaagagttaatgcgacgagcttcatgaatggtgtgaccgagccagctgcttccgcatctaaactgactgatccgtatcttttgagagtaaggcttgttttttcttggtgctacgagattctgttcttgacgggtgttgctatctcgaactcaaaatgttagctgttgacaagttgtgagctaggaaagctgctaggagacttgttgaagaactccaagctgttgacgagctgttaggcgggcaatagcaagctaggaaggctgccgacgagctgttagctgggcgaactacgagtcagaaaaactgcagacggactgtggtggttggctcgggtacaaattgcctgagtcaaagctgggttcagtatacttcgttccgagctgatcgtctcggtaccaggttgttcgggataactggatttctaagcattga

SEQ ID NO: 159251 - DNA, 729 bp, Arabidopsis thaliana landsberg
tctctttcacagagcaaaatcgacgagctgatcaagagtcttttggatttgtgcttctacacttcttaagaggaaggtgtgttgacttttcgaattgttctttgtgttcttcttaagacttgttctttgtgttcttggatatatgttctttcaacttttatacttcttaagagcaagaaagtagttaacattgttttctttagcaaggcaatgatctatttgagatttagagattgtggaaaacaatttgaaacaattttaagagaaccccacttgagaaatactaccattggattatgaagtttctttaaaaaaaaaatacaagctctcttcttacaaattttcacaattaatgttaaagaatggagagagcccatgagagggctctcaccattggagatggcctaattattacggctccaaaggtcaattcttagaattaccgttgtaattaacaacgattgggcttaacatatacctcttaggcccataacatatacaaaacccaaaaggcccaaatgtttgatgcacgtgctttacttgagcgaattaattcccaatttcagcaattttaatttttctacgactcttcagtcttcactcactcttttcatgtttcttctcctttgaagcctgcctgcgttagtctggcttcattgcttctccatttcttggtgtgatcgaatcaaagagtgtaaccccattttgctactgattcagtacgtatga

SEQ ID NO: 159252 - DNA, 3968 bp, Arabidopsis thaliana landsberg
attttctgggtgatgatgagacgttccaagttcaggatggggagactctgcagtcagaagaggtcagctatgtgcagaaccaaggaggttacaacaaaggtttcaacaacttcaagcagaaccatcccaatctgtcttacagaagtacaaacgttgcaaacccgcaggaccaagtctacccttctcagcagcagaatcaacccaagccctttgttccgtacaaccaaggtcaagggtatgttcctaagcagcagtatcagggcaactatcagcagcaacttccaccacctgggttcacacagcagcaacaacaaccagcttcaacaactccagattcagacttgaagaacatgttacagcagattctccaagggcaagcaacaggagcaatggatttgtgcaaaaagatggcagaaattcacaacaaggttgactgcagttacaatgatatcaatatcaaggttgaagcattgacatctaagatcagatacatagaaggccaaattgggtcgacatcggcacccaaatttacaggaccttccagaaaatcaatgcaaaattcaaaggagtatgctcatgctatcacgcttagaaccggtaaagaattacccacaaaagaaagtccgaaccaaaacagtgaggacagtgtggagcgagatggggaggatttctgttagaatgaagattatggtgaaaaagcaatagaagagcctatactcgaccaacctactcgacaactagctcctacagcatctcctcttgttgaagaaccaggtgctgctaaaaccaaagataacattttcgttcccccaccttagaagcccccactcccatttcctagtcgattcaagaaggtcatgatacaaaagtacaaagctctcctggaaaaagagttgaaaaatcttgaagtcacgatgcctcttgttgactatcttgcgcttatactagaccctaaccaatatgtgaaggatatcatcatagaaaggatcaaagaagttcagagaatggtcgtattgagtcacgagtgtagtgcgatcatcgaacagaagatcacacttaagaaattaggagatcctggctcgtttactttaccttgttcacttgtccctttaccattcaataggtgcctatgcgatctaggcgcatccgtaagcttgatgcccctctcagtggccaagagacttggtttcagtaaatacaaggcttgcaacatttctttgattctagcagatagatccatcacaatacctcatggtttgctagaaaacttactagccaagataggcacaatggaggttcctacagatattgtggtgctagaaatggatgaagaacccagggatccttagatcctaggaagacccttcttagcctcagtgggagcgatgatagatgtcagagatgggaaaataagtctcaaccttggaaagcacatcaagttgcagtttgacatcaccaaaactccacaagggtcacctatagaagatggaaaaacctctggaaatgatagagtgatctcaggagaaggatatgagactgaaagagtgaaagaacttaaaaagaggtctgataagcaagaagaacccatagagaagctagcccacactgttgaggaacttaggagtaagctgaatcagatgcagaaggaagctcaatcaagatacgggattaacactatcccgagaaaaaagttcacttcaagatggtctgaagaaacagattaccctccagaagagaaagaagtttattttgaagagaggggaattgagtattctgctacagacctctccagggaggacgctgagtatgatgatggtatcagagaggattatgcagaccctctctacagttcattttcttcttgatgagtgtgaggagtcaagctagaaacttaaaacaagctcacttgggaggaagtcccatgactatccttgtaaataatttttactttcttgttatttttgatttgttttggttgtgtttttggttctcaggaagaaaggagtaacatgaaggtagagtaaaaattcaaaacttttactctactgatgtcctagagatcgagtatattgggcgtgtttgagtgatgtttaaaaacctaaaaaattttaaatcatcattttactcgaccaacagaagctatggaatgttacaaagagttcatcaagtttacaaaagattgcgggatttcctggggatttttctagtgaacagagaatcagagaagagctgaaatcgccagaggaaagagggcgatgtcaagtagatatgagctgattgatgaggatatcgagactgagtatgagccagagtcatggcgcagggagacgaagctgctgaacaaacccgacgaggttacagtggaggagtatattagattcttcgagatgaatgatttctggggaacgaggtatccgtgttatgagactttagcccaactggggttactagagaacgtgcagcatttgttcgagaagtgtcatctggagacactcatgtcttacccttaccctgcctataaggaggagacaatcgagtttctttccacgctgcaagtggagatgtatgaagcactcacagactttgagctggataccatgggattaggctttttgacgttctctagtggaaagggaactgtttggtttccctagtggaaagggaaccaaacccagatttaacagagaggagcttaaggatttgtgggccactatagggaacaatctaccgctaaactcggcgcggtctaagagcaaccaaatcagaagtcctgtgatccactactttcagcgatcagtcgccaacgtcttttactccagggagtcgacaggcaccgtgtctaacatggacatggagatgatagattatgcacttacagggattctccaccggacgaaggggaagaatgtcttgagaggcgatctcaacaacgcaccaccagtaatacctctgttgatccatctgtgtggatacaggaagtgggcgttgacgaacgggaagaagaaggtgagaggagcactatgcgtgggtggcgttgtgtcgccaattctggaagcttgtggagtaccgctcaaggaaccaggtttagcaccgaggatgatggacttggatcatttgcgcagatgtgagttcttggagtttgacatggctggcgactttcaccgctacaggttcgagcattcatcgattaaaatcgccaacattcttctcccctgcattgacgctactaggattctcgagggcaggaacattgacttcaggcctacgcttgaagaacttttttcgagggtagtccgccaactgaggagatcagtcataccgaaggagctacagcagaagatattgatgagacggatgatatagatgaggcggagtttgacacgagcatgtatcatttcagtgagcaaatacctcctgcgagggaaagcaggagtttgagcgaagctaacagaaacaacagcaagctgcagaagtggtgcatgaaacaggacaagttactcgccaagtgcctcagggctatcaagtttatgaagaacaagctcagctgctcctcttccactatagttattccgcagggacatctccctcaggacatgccttcaaggagatatgacgcgcccgagccaagtcggcgcaggcctgaccctagagagcaagtgattccgcatgtccctgcgaggcattcatcattcgagcctcgtgaatctgggaggaagaggagaccacactctctcgatctagcagtaggagcggacgacttctgcagtctcgtagtttacgcgaccgtggtgctggccgcagcagaaggagagaggtcgagtttcctcagagcggtgttggccgccacagagctgatgaggtcgagtacccacctggtggagctgatacagaacaaggcagttcgtctatggcctgggagcaatcgcaggcagccattgacgagcaactacgttcattcttcgactgag

SEQ ID NO: 159253 - DNA, 1068 bp, Arabidopsis thaliana landsberg
  unsure (1)..(1068): unsure at all n locations
tctcgaaccaaatccatggagattttccagattccgattcagtttctccttctctaatcaatctcataaggtaaaattttcactttttctttctgggtttcttcttctctaactgtatccgtcattgtcttagtcaaatttcgtctctttataacttttagattcgcccaccaagtgtttgttgaaattcctgagagagagatgaaggattttccttcttgctttggtgaaaatggagttcaagttgcggattcatcgtcttcttcgaactccggtaaaaacgctcagaatttggttacttgtatctaccgatgtcgaattcgcggaagaatttgtttgatctctgtgacatggactaagaatctgatgggtcaaagtgtaacagttggtgttgatgattcttgtaaccaaagtctttgtaaagtcgagattaagccgtggctgtttactaaacggaaagggtctaagagtttagaggcgtattcgtgtaatatcgatgttttttgggatctttcgtctgcgaaattcggatcaggtcctgaagctttgggaggattctatgttggtgttgttgttgacaaagaaatggttttgcttcttggtgatatgaagaaagaagcttttaagaagacgaatgcttcgccttcgtctttaggtgctgtgttcattgctaagaaagagcatgtttttggtaagagagtgtttgcaacgaaagctcagctttttgctgatgggaaatttcatgatctgttgattgagtgtgacacgaatgtcaccgatccttgtctcgttgttcgtgtggatggtaagacgttgttgcaggtgaagcggcttaagtggaagtttcgaggcaacgatacgatagttgttaataaaatgactgtggaagttctatgggatgttcatagttggctctttgggttgcctacaacgggaaacgctgtgttcatgttcaggacttgtcaannnnnnnnnnnnnnnnnnnnnnnnnnnnnnnnnntgacaacaacaaactccaagtctcatagttttggtttttcgttgattctgtacgcttggaagagcgag

SEQ ID NO: 159254 - DNA, 385 bp, Arabidopsis thaliana landsberg
aaggagaaatttgggtgaatggtgaaagcattggtcgttattgggtctcgtttctcacccctgctggacaaccttcttaatctatgtaagtgtcacacacacacctggaaacacaaaattatgtttgttgttactttttgatatggaattggatttggttaatgcagatatcatattcctcgggcgttcttaaaaccatctggaaatttattggtggtatttgaagaggaaggtggtgatcctcttgggatatctttgaatacaatatcggttgttggttcgagtcaagctcaatctcaattctcctgaagattattttttaaaaaatggtttttgggtaattgggggtgttttataaaccaaacaatacattatattgaaatga

SEQ ID NO: 159255 - DNA, 471 bp, Arabidopsis thaliana landsberg
tccccaggggcaagagagtcttgtcctgtgggtttgtgcaactgctccccgtttaagtctaacccaggctttttctgtactcttattggaaccaagtatgtctgatgttcatatacaggcccaccccattctagatgttggaaagtattctcagttcttagacccgagtttgcgggatatcttctccaataatgttgccccaatgcagaggatggcgttagctgctactctttgtattcgacgtagtcctctagctagtccgaatttgagcatcgtaagtcaaatttctttaccctctagtatttttacatcttcgctctatgtagctatcttgcagcatgtgtaatgatgctggtattctagctacttaaaggtgatgaagacacgcttgtgtgggcaatgcagcaagtgaatagttcttcagcggagtcagcgatgctcattgttgagccatgccctagatctttcttg

SEQ ID NO: 159256 - DNA, 527 bp, Arabidopsis thaliana landsberg
  unsure (1)..(527): unsure at all n locations
acggtaatttttatctttgtgtcttatgaaacnagcttttttctttcctaaatatcaacaagaaaagcgtggatcgggacnnnnnnnnnnnnnnnnnnnnnnnnnnnnnnnnnnnnnnnnnnnnnnnnnnnnnnnnnnnnnatgtcgagaggtactgatactgaatccctatctaaatagactaggcactggtctatttttgaatgaatatacggtgcttgctgcaccatgaaacttctatatagagcctaacttggatctttatacttttggttactcagggagaagaagaagcaaggagaaagagcccaatctcagaaggctaacgaaacaatctccaagtgtctgggagatactctatataacccatctttcttggttgaacggaaatcttagaaaatcatttgtgacttctttttttgttttcttagcaacaactatgcccaagaacatatatatctcatttctaagaacatttcagacgtgtatatgtttgctttttttcctttcattacatgagtttacat

SEQ ID NO: 159257 - DNA, 76 bp, Arabidopsis thaliana landsberg
ggaatttgaagttctcagccgattcaacacctaagtctcttcagatcttcgagtttttgttcatccagttgcatca

SEQ ID NO: 159258 - DNA, 134 bp, Arabidopsis thaliana landsberg
tagagaaacgaaggagatagcaaaagaaaaaagacgagatttttctatctttacattacgaaacacagtaaataataaaggaggagagaagttaccttgagagtcgtgtgagttgacgtgacgtcaagtggaga

SEQ ID NO: 159259 - DNA, 158 bp, Arabidopsis thaliana landsberg
aaatgcttcaggagttctcacaacaagatcgagaaatacacacatagaacacgaagaagaagaagaagacgattcatatccacaacgccatgggtttaggcatcttagctttttgaacaattcgaccagcttctcgtcttcttcaatctaaaacctcc

SEQ ID NO: 159260 - DNA, 329 bp, Arabidopsis thaliana landsberg
tccgttgccttttcgctttctccgtacacttggccttccttctcgcgatcaaaccctaggtcccgccattgttggtcccagatttcaatcgaagctccaatttcactaattccaggtgaatcttcttctactatttctcttccgttagtttcatgtcacgatttcgccggaaaaatgtgatctacactgtttcggagtgaaatgtgaagtagattttgttgcttcttagctagtttgtgattttctcgaagttatttctgtgtttaattcatgaaaagattttgggttgcttttgttgttgcctctagttcgttttttgcatgttaagt

SEQ ID NO: 159261 - DNA, 438 bp, Arabidopsis thaliana landsberg
tttcgatacaacagtcgcattattatatatttgtcacacaacattttattactcaagcttactttggcagccaaatgccagaagaatatatcatcgaagaattagacgataaaatctttggaagaacatctcataagcttcatgtttttgcttctggctgtacacagagattcttaatggcccacgagaaatgggcaaagcttctgatgactttatatatctataacttggcagctaacaagttcagcagcaccaaagtccttggttgcaatgagtttccatgtaacagtgtctgacttgttaggtgcattggtctttaagtgtgggattgaaacagaactggagctaaatgatgatgaggagactgggatgttggggacatcagctcgtaagactgtaacgttatgattagggtctctagtaatgaaatgaagcttg

SEQ ID NO: 159262 - DNA, 324 bp, Arabidopsis thaliana landsberg
cgtatgtacttagcacttttgacatgaatctggtttgttgtttggtctactttagttacctttcgatttcttgtaatatatctcaaagtctaattttgtgtgatgacattgatccaatcaataaaagtgttacatgttatggtacattcatgagaaatgctcgatacaatcaaaacctgtgttttgttctactcagtaagaatctgattttgaaactcaagtatgaagagcaaaatgatcaaatcaggaaccaaatttgttgccaagacaggttttgctacaattgcttcttcagccacttgaataagtacaccgtacttggac

SEQ ID NO: 159263 - DNA, 351 bp, Arabidopsis thaliana landsberg
cctcctctatggctgcctggatcgagtgaactggtcgagtagattgttctgctgcttccctcctggttggatagggtagagggtcgagtagagtccttgtaagctccttctgcacctgaaaacacaccaaaacatgcaatatgtatgcaagatgatcctaaatgcctaagtgtgcaaaataagctaaatgtgatgcaaaatgatatgaaacaatgagtgatcactaagctaaatgatgataaacacatgcctaaatgagtaaaatacagtgttatcaactcccccaaacttatctcttgcttgccctcaaagcaagcaaaatatcttcagttgaaggagaggttggggatc

SEQ ID NO: 159264 - DNA, 374 bp, Arabidopsis thaliana landsberg
aaatttgttgacaatgaatgcataggttcagagccataaacaccttcaaattattaaaactcaaaaatagaaagtagaaacccaaaaggtagtttcatcagcacacaaaactcaatcctgttaatttaaaagtaacgaaataaagcaattgcaaaattatagtagtcattacaactccacctatatcatgattgatgaagcctccctaagttacatgaatctttctggtggtgagatcaaaactctacttgttcgaggccttgttagacagcttcttcaccggtttcatgcttcttcttgacggaatctgcctcgactttgcgccagtgcaagtagaaaaactgaagcagaataagaaaatcaaaaacagcaca

SEQ ID NO: 159265 - DNA, 99 bp, Arabidopsis thaliana landsberg
tgtgtgtgtgtgtgttgtgttaagtgatcctgtaaaaggtgtatgaaccagtcatgttgatattatgtgtgaaactgtgaaccggtttggtaataagca

SEQ ID NO: 159266 - DNA, 305 bp, Arabidopsis thaliana landsberg
ggctcaactcaggatattcgggaggtagatcattccttttcattcaactatgataggaagggttatccgttctcggacagtaggagttattgcggtgagtttgctagaaaagttaacgggtcgtctcgtgagaaccctccggttgaatcccctatagcgaagaatctctaccagacttgggcttgtaaggaggttcaggtacgtctatctttttatttactttgtcacgtttatcgttttctgttacgataacttttcgttctctttctcctgttatcagtcgattgccaccggaaacgcgttat

SEQ ID NO: 159267 - DNA, 61 bp, Arabidopsis thaliana landsberg
ccatttattagaccttcatatctctagaagtttcataagtagttatgtctaaatctagaga

SEQ ID NO: 159268 - DNA, 334 bp, Arabidopsis thaliana landsberg
  unsure (1)..(334): unsure at all n locations
cttcgcatccattttcgtttgaatctcaacgttttttgcttgattttagcttctgagagagtccagatccaaggaattggaggaagaataatgtcggcaaggcatgggcaatcgtcgtatcgagatcggagtgacgaattcttcaaaattgtggagactctgaggagatcgattgctccggctccggcggcgaataatgnnnnnnnnnnnnnnnnnnnnnnnnnnnnnnnnagaagagaggatcttatcaacaaatccgagttcaacaagagagcttctcatattggtttagctattaatcaaacgtcgcagaagctatcgaagcttgcgaaac

SEQ ID NO: 159269 - DNA, 639 bp, Arabidopsis thaliana landsberg
ataaaatattatatttttttctgtatatgttgtagttcaaatttttttaaacgaacatatattattcaatccatgaaaaataatatgtgtacaatgtcccacattgcttaaaaaattggacattggttcagagtcatactataaaaaggaccaaaatgattctggttaagaataagcaggaagcttgatttatcaggcgtccaaaattaaagtggttattcgtttactcgggttcttgattttaaagaataaaaactttacaaagtttcaaaaattataaatattttaactttttatcaaaagttaaatattataattttacaaactttttataaagtttagctttaaatatctttttaatatttataattttaaaacttatgaagttttgaaaattataaattgaattttacttgtaatttaaacattattaatatataaaaataaattaatacgggacgatatactacgggagaaattctagatataacaatcaaaattcaatgataaagtttgggtcgatattaaatttattttgacgtttcaaattttataaatatttgaaatttataagaaaatgacaacttatgttgaatttcacaggacgaggttatattgtgggacgggtttagctacgac

SEQ ID NO: 159270 - DNA, 791 bp, Arabidopsis thaliana landsberg
gtgacatgagatcctcataaccttactacttcctaatcttatttctcgttgatgaaacatagcaaggtaggcttaagcaacaatatacaaaagtcaataaaaagtctaaacatccaacctcttgggctagaatctacaaatctcttggaattcgtaaattaggcatccatttgaacgtcttttggacgttggatatctagggtcgaattctaacattagttagtgaaaaacgcataggggccaacgaatccagaagggatctaacctaatcttaaccacctgactaacctagagattaccctaatctaatccatcctcaagaaccctaatcactactcaagcaacataactaagaacacaaacccagaaattactgaaatcataccaaaatgtagatctaaacaagataaacaactttatccaaaaacgctttgaacgatcaacaagtcttgtggaatgggttgcccctgatcgagtaactggtcgagtagaggatcgagtagggggtcgagtagtgtttgttgcctcctctgtggcttcctggatcgagaaaaggggtcaaatgaattgctctgctgctttcctcttggtttgatagtgtagagggttgagtagattccttgtaagctccttctacacctgaaaacacaccaaaacatgcaatgtatgcaagatgatcccaaatacctaagtgtgcaaaataagctaaatgtgatgcaaaatgatatgatacaatgagtgataactaagctaaatgatgataaacacatgcctaaaatgagtaaaataca

SEQ ID NO: 159271 - DNA, 97 bp, Arabidopsis thaliana landsberg
ctttccgatattccgcgagtgcccatagtgggaagatgtttctgtacgtagcatagtgtagcatgcatgtattcatgaacactcctaatatttcctg

SEQ ID NO: 159272 - DNA, 66 bp, Arabidopsis thaliana landsberg
tggtgtgatgatgtgtcacttatatggagagagttggccaactttcatatatatgatttttaagca

SEQ ID NO: 159273 - DNA, 760 bp, Arabidopsis thaliana landsberg
aaaaactccgaagttcgaagtagaataccaaaaatatataagtttccagatcagacagagttcttgtcttgtagctgctgttgcttggtttcttcttcattggtctcaatctcagtgatgtcttcatcattacctcctttgtatctataccatctagccatcaacaagaagtaagccatgttaacaaccatgagtcctgtgagcatgaagtagaagtaatccaatttcgctttgttcagatcctcagctaaccaattccctgaaggtgaatgcgcagttgttcgatgaacagttgatatcaagaagctagcgaggtagctcgaaacacctgcaccgacataaaagatagaacccgcgaagctcttcatgttttcaggaaactgcttgtagtaaaactccatttgtccaatggcagcaaaagcttctgctatgcctgcaagtgtaagctgcggaatcagccacaacgctgacattgatgagatttctcctgtccgaggcgccatcccgagtgtcggtttagtcagagcgaatgttctccttcgttcctcgacaaatcccgcgactactaaactcgcggtagcgaagaaaatgccagttccaattctctgcaagagcgttatcccggtgtctagaccagtaattcttctcatggttggcacaagtacacggtcgtagactacgatgaaaactgtcattcccgtcatcaagaaaaccacgtaggtggctgcgggaatcacaaaacctcctgagcctaagcgac

SEQ ID NO: 159274 - DNA, 288 bp, Arabidopsis thaliana landsberg
gatcaagtgcaaataggaaaaacatttcctcgggtgtccaacttcacattggagcaagaagctttggatacatcttgttgagtttgatcgaccagtttaacgttttgcattgatattcctcgacatggaatgttcttgctgcatacaaatttcacagctatgggtcttgagctcgtcccttgtatgtttttgtacaacacattgctcactatgtaccacaggatttctgccacgtgttccaatatctcagttttgttattattattactctaattgtgttaaaagatt

SEQ ID NO: 159275 - DNA, 164 bp, Arabidopsis thaliana landsberg
gcctcactaatcatatcatcagccttattgaggccatgcaacattgagtgattttatcggagattcctcaattgaccattgaaacattgaatatcaacaacgcacttattgttaggatacttatttgaaagatttcttggaattattcctgcaaatgtcttcat

SEQ ID NO: 159276 - DNA, 412 bp, Arabidopsis thaliana landsberg
ttacatgacaatgaagaagaaaactgaggaagaaggatcatctttttttttttttttttgggtttttgttgtgaactctccttatgtattaccgcctcgccggagcactgatacagtttcttctgtccctcattgaaagaagaaaagaaaacaaaaatagaaaaaaaaagaaagcagaaaaaagcccaggaggaacaatgaatttagaaaaccaaaccatgacagaaaagtctgcgggattctctggttagctctaggtgatgatatgatcaagtttcgtcctcactggctttgtatgaagggaaaataaaataatctaaaagattcgtcaaaagacacagatcgttcaccgtgatggcctccctacaatatcgtggtaaaacaaaaacgattgtactaagtagcaattcct

SEQ ID NO: 159277 - DNA, 305 bp, Arabidopsis thaliana landsberg
tacttcttcacgtttagtgttcttagttggtaaagtttggtactttcaggatactgtcatactcaaagtctgggacttttaggtgtttttgattgttcatttggtgattgatcatcgtctctgatcgttacttggaggaaagattccaaatttttgaatgagaagttgatttgttgatcggaattgagatggcaacaacaccggttcaacctccggtttcaaattctccaccggtgacttcgccgccgccgccactgaataatgctacttctccggctacaccaccaccagtaacatcgccgcta

SEQ ID NO: 159278 - DNA, 473 bp, Arabidopsis thaliana landsberg
atttgaaaggaaattcttagttcgaaactcaaataacacaaaaaaataaccatacaaaaaagattagctaaggactcttttgtataattctttatagtaaaaaaaaaaaaaaagacaaaacaacagtggagactattatctaagtacaactttaaaatgtcgtgaagcttctcaagttgaagtagtctatgctctcttttccttcaaacaagaagaaaacttctcaagcagccataagaccgatgccctttccccttctgctatgcttttctaccgcaaattccgaacatgacacagatgcaggtgggaggaaacttctgtaaggactcctagaaaacagaggatcagttcatttttagctggatttggcgatggacttgcacgagaaactccacatacgacgggccgcttgctgtcctgtcctctaccatatacgagagaaacaacattcctgaaaagtaccaaatatcata

SEQ ID NO: 159279 - DNA, 91 bp, Arabidopsis thaliana landsberg
tttttttttttttttttgtggtttttttgttttttttttttttttttcttttttttttttttttttttttttttctttttttttctttttg

SEQ ID NO: 159280 - DNA, 108 bp, Arabidopsis thaliana landsberg
attcggggtcatccaaagtgcgagttatctgcggcgacaaagaatcttcacatgcgtcatactcgatattcctcctcaccgcatcactacggtctaaccgccgcgccg

SEQ ID NO: 159281 - DNA, 423 bp, Arabidopsis thaliana landsberg
aaccaacggttcagaaacaaaccacgccaagcccaaaaggcttcgttatccccaggccatacgagagattacgagtaagtgatacgttagccaaagagtgtcaccaattgattcaatatcccacgaggaagaagaagaagcacgagaagaagaagatagaagcgatttttataaaatggcggcggatgctctgagaatctcgagttctaggtctggctccccgctttgtcatcttaatggttcacacagacgacctgttcttcttccctctgctcatcgtgctacctttttgggtcgttctctcgagctcatcttcttcacccctgtctcattcctcagatcctggtactcctcgtattgggctagcgactgccaagctctcacaaaagaaaaaacaattttcagtcttcgctgcagctgaag

SEQ ID NO: 159282 - DNA, 336 bp, Arabidopsis thaliana landsberg
gagagtatgagccattggtttctttaagattaagatttattttgcaatttaaatttttgttttgaaataaatttgagattcagttctctaagaaaattcttcttcttcaacaatggcggtttgatttgagttttgctctctctctcatgggtaaaactcatttcatctacgtagcatcgagattctggttaatcgaatctcttgttattatggaaatgatatatagaatggatatagatcagtaaaaaggtttccggatggatatatctaaatgaacttgttattatggacaccaaaaaattgtttgttgagttttctttcagtttgtagagacct

SEQ ID NO: 159283 - DNA, 529 bp, Arabidopsis thaliana landsberg
aagtttcaagtgattaaattaaaacataatcgtacagttattctcttcaaagatgaaaacattaggaagaaagaaatacaaaacaaacgccacaaaattggagtgactatctccagcgttacacagtataataataatactcaacataaggagccttgcatagcaagcaacaagtcttgcttcttactctgatgctttagacttcttctttttcttcttctttgtgggctctgatgttgcttttcttttagtcttcgaatcctctttctcgtcttggtctatcaaatgcttgtactcttcaagactcgcaaatggagatttccgttttcttttctctttctttttcttcttactacgaccatcatcaccatcactatcatcatcaccaccatcaccagtaccatcatcatcaacgttgttatcatcttcatcatcaatcaggtccatgtccatgtctgtgtccatctctgcatcgctcacatcagccacgagctcttcataatcctcgccggctactccatctagatca

SEQ ID NO: 159284 - DNA, 149 bp, Arabidopsis thaliana landsberg
ttttcgttatgttgtttcactaaaacacaaatttctgactagagagtattgagcccttgatacacagtaatagaagtcgaaattttttggtatacataataattcaataagatacaagattatacaagattctggaacgaacaagaaca

SEQ ID NO: 159285 - DNA, 398 bp, Arabidopsis thaliana landsberg
tttcaaaataatatgtatgaaattgaatataaatattcaaatgatgacccgttactcagtagaaagttttcttaaatctatttttgactgttataatatttttatgtattgaacagtttatatttgtttttaaaaattcaaattatggcatatgcgaaaaaaactctaattatttttttataacgatgatattattttttgcaaaattagaatcatataaagatgagaggtgaactataataattaataaaaaattgatatgataatttagatatcaaatctaatttgttgattttaattggttatttttttggaaattaataatgtatttcatttttaattcaatttaattaattaaattagtatttgactttttaattcttaaagagattaattaa

SEQ ID NO: 159286 - DNA, 418 bp, Arabidopsis thaliana landsberg
agatctttatcaggtccttttgacgtgagcattggacaaacaatttggatgtagaattttcaaccggctccactttcaatcccgaaatggacttgagaagatcgtacgtattaggacttgatacctgcattcatttccacaaacaagaaagaaaaagggtcagcattataaacagaaaaccatttactgcacaatctttagttacctattttacctctactatggttgggatcgattccatcttttgtataggttgaagggctaatacagaaagaaatgcgtctgtatcaacttcatacctgaaacaatgtttaacttaactgattccttttttacaaagtattgagattccatatcttttaccatagcactccagttttctgacaggtttcagaacatattttatttctttgtgcat

SEQ ID NO: 159287 - DNA, 846 bp, Arabidopsis thaliana landsberg
acaagtccttctccttccttcctcaatcaaacaacaccttctttaatccacaacaaaaaaaaaaaaaaactacaaaaaaaatataatctctgcccgcttctccgatctcggggtagcgtcaaaattgaaccaaattgatcaaaacctacccagaaatcatttttggtcacaggggatataggcgggcagatttaaaattttcttctttttttcttctgtaagaatcgttttagattcgggaaattgtgtgtgtttgatgggttttttggtggatacgcaaaaggaaggaggtggacattcatggggttacgttagaagtttggttagaaggaaacaagtcgactctgctaatggccaatctcatggtcaccaactcgctagagccctcactgttcctcatctagttgcaattggtaacctcatttctcaatttatttctctagtgtttcttataaacactcccaagtttgattcttgtgtgctcatttcatgtggattcaggtgaaaaagtttggttttttattgtgaaattcatataatttaaagtttgttttttttattgtgaaatacatataatttaaagtttgattctttttgagatcaatttatggggatataggtgagaaagtttggttttttattgtgaaatcaatatataactgttgacttttgtataaatatataggtgttggagcaacaataggagctggagtttatattcttgtaggaacagttgcgagagagcattcaggattctttcttgctttgtcttttcttattgctggaattgctgctggtctttctgcgttttgttatgctgaactctctagtcgttgcccttcagct

SEQ ID NO: 159288 - DNA, 703 bp, Arabidopsis thaliana landsberg
agctgtggcagccgaagtcgctgatctttctccacttttagcattttccatcctcttgaacagtgttcaacccgttctctcaggtatatacattagctagttcaagcgtgatggttatcatcgtatcgaattcgaactgatatttgaaacgtagtatatgcctttaattggtttcaaaccttatcaggagtggcagtgggagcgggatggcaaggatatgtggcttacattaaccttgcttgctattaccttctcggaattcctgttggtcttgtccttggttacgttgttggtttgcaagtcaaagtaagtttttctctttatatattttttcttcataatgaacccaagtaataaaattaacaattgaaaacaacataaaactttacttatctttttttgaagaggtgtatggataggaatgctttttggaatatttgttcagacttgtgtgcttaccatcatgactctcagaacagattgggatcaacaggtttaaataaacaaaattgtagtttccccttccaaaataattagtttgttcaagcaagctatgttattggtttggagcttaattatattgtttgttgccacttttttctgtaggtatctacgtcgttgaaaaatataaaccggtgggttgtaccagaatctagagatgcaaatcaaatttcatcagaggaataattcgtttggattatga

SEQ ID NO: 159289 - DNA, 669 bp, Arabidopsis thaliana landsberg
ttttttttttttaaaaaagacatctcattgctcgtaataacaacatcctcatcattcataatttcatcacatagagtttttactttacaagttcttatatcgaagagtcagttttcataaccattaaaacataacgcaaatcaatcaatattgccagaggttgctattgcataagtagcagtagtaactaattgccaaagaaagtctggttgaagatacgaaactcgttttgattctataagcaagcaaactactcaagaaaaacatgttaaactttgaagaaccacgacacatctttcaaaaggatccatacctttgtgaaaattaatggattctgcttcagagtttcatactgccatgcaaacaacctacctttgctggagacatctgaagagtgagcttggacaatctccgatcacaatgcacatgcgacaaactaagtaagaaagcaggcatgtgttcccgttcatctcgataattttccatgaaagtaagtcatgagaacaaatcagaataacgaatcaacaccgatcacaaacacattttctggatgagcatctattacattaaccccattcatgccattgcacacttacctctcagtaggccacaacacttatttccagaaagaataagcatcaataggctatgcgtctggaaaaaacaccg

SEQ ID NO: 159290 - DNA, 798 bp, Arabidopsis thaliana landsberg
  unsure (1)..(798): unsure at all n locations
gttgcttatggctaagtggtatctctggttcaattgcttataattggtctaaacctgccatgaaaaccagtgtcagaatcatccacgctaggtaaattttcttatcttaatgctccttaatgttttttagattgaagaatctgctccttaatgtttctttgattgtagaagttatcagtggcttaagctattgaagaatctggttcttatctccgtgtaatggacatcaaagttacttacctatgtgttctcatatattgcataaacaattacgtttaagaacactaatgcttgagaaagcatgatcttcagttatggatactctaaaatcacttgttcgtgtctttcttcattttagaattcttatctttcaatctttactatgagctgctttgtctcccattggttctgtattgctagacaagtttagtgttaacaacatctagtctcttcaatattctatcatatatatgcttgctcgtatccagttttgtacctaaaaacatgtacttgtgatgtttggtacataacataaatgtgaccataacagttttagttttttcatagattggttctttaccatgtttggcgtttgatcttttacacatttctggattggattatattattatgtcaggttgcatgctcannnnnnnnnnnnnnnnnnnctggctggagcagctgcagtggagtactatgatcacaaatctggagccacagatcgcctcccgaaatttctgaagcctgataacttaaaaaaggactagaaatctccgtaccatggctctgccggttctg

SEQ ID NO: 159291 - DNA, 147 bp, Arabidopsis thaliana landsberg
caaatgcagggtgcgatgatggggtgtgagggaggaatttaacctactcttttccgatcttaagacctaagggcaagaaatcatagatcagtttcggaagcagaggtggtgctaaaactagcttcccttatcctaaagtgaaggtaa

SEQ ID NO: 159292 - DNA, 79 bp, Arabidopsis thaliana landsberg
cttggaagcagaagcaatgtgaggaacaacaatagcgtttttcgtatcagcaagccctggtttcatgaatggctcttcc

SEQ ID NO: 159293 - DNA, 152 bp, Arabidopsis thaliana landsberg
gacctaacaatggccgttcctccattattcttcctcctcacactcctctctctcccttctcttcttatatccgccggtgcttccaatgcctatccttctattcccggagccggtccgacctatgtaagctggtcacacggcggtgaaccccg

SEQ ID NO: 159294 - DNA, 155 bp, Arabidopsis thaliana landsberg
aaagggaaccaacttgagaagataaatcgtctatgcgaatgtgttcatcttccatgtttctctttggcccaatatcagcaaagcttccagaccggatggtcggaatataatccaagacactaggatcgcaatcaccctctggaaagatatcagcc

SEQ ID NO: 159295 - DNA, 907 bp, Arabidopsis thaliana landsberg
ggaagctttcttctgctcaagttcctgagtcagttcatcaatgagggcttctgtggaagacactttttgttccgtctctaacaaacgagattttgaaagtgccaattcctcttgcactgcagctaattctcccgcactactctttaaggcagcttcaaccttttcgttttcagacatcttctcattgagctccttgatttcttgttgcagggacgccattttttcctccatttccttggcactctcttttgtcgatttaagcagctccgaaaattccaaagccttctgcgactcagagtcagcatgagaagcactttgcttatgcagctcttcaaatttctgagcctcttcagctgaacgttttagcccctcctccaactctatcaacttctttcgtgagctctcgagttctatgcccaacgcatcaaaagcttccttaacttcagttagttccttatctttcgcatcatgtgactgcaaagcatcttccaaggactttaactgtgagctgtgtctctcttccccttcaacaattttctcttgctgcttcttttggacaacttcaagatctccatgcttcttttccgtttcttctaacttctctttcgcagacaaaagctcatccttcaaatgggtattttcagattcataccgttttagttcccctgcaactctttccaattcgagctctagttcttttgccttttcttgtgattcatgtagttctctctgtgaaccactcgagcttctttcaataacttccttttgctcttcaacaggaacatgatctgctttctccgcatcatccttggcatcaaaagcttccttctcaacttttatgaattccccatcttcctcttctttctcctcctttggcacttctccattcacagcctgcaatagatca

SEQ ID NO: 159296 - DNA, 141 bp, Arabidopsis thaliana landsberg
ccttctttctaaatctaaatgggggtgcccggagcacctcatcttgtcatttcgtcgttgctcattcccgttcgacccaagtgtttggcctttgccttaaaccaaaaccgctctcgcttcgtaaacctatagcgtgctaaa

SEQ ID NO: 159297 - DNA, 201 bp, Arabidopsis thaliana landsberg
actatataatcacatatgagaacatggtccattttcccagcaaaaactgaaaaggtttgacaaatgtacacctcgagagagttcatataacttaaataataacactacttaccgatacatataagaatccaactccagagagtcatggacaaaaaaaggatggctaacataaataacaacaacaatgaaggcagagagaga

SEQ ID NO: 159298 - DNA, 458 bp, Arabidopsis thaliana landsberg
tcgaggcaaaaggctatggctgatctgcagcaagcgcagatgcagaatgtaagacttgttatgttctttagaattttgcttctttctgaatctcttcgtctattcatctcagtgagttactgaattataaagttcaacgttcacaaatgtttcctggtcttaaaacccgcactgcgccgttgttctgctttttaagtatttcatttgtctgtttataaagcatcggcatatgcatttgaaactattgtgtttattcatgggtgggaggttctgatggtagaaaatattttgagaagtataacgttttggctggttctaatatattctgctatctatatttgactcatctcaatttctgccagcttgagaagcttagtgataaacagtgcacaccagagtctcagctcaaattcattttagaagcttggcttcaggttagcaaataaaagtgttgacta

SEQ ID NO: 159299 - DNA, 217 bp, Arabidopsis thaliana landsberg
gggattaccaatgccgaagcttcactggaatatgatacagtttgatttggggctccctaagtgacattcttacctttgagaatatgccagtaaaaacactcttaattttgatttgctgtcctctgtcagtgtgtttcctagcacaaagagtgcagatttttttgtgtcaaaactgaatactcttaagcattaaatatggtttataagtttgcatatg

SEQ ID NO: 159300 - DNA, 63 bp, Arabidopsis thaliana landsberg
tgtaaggtcataatacttgaacagctaaaacacccgaatttagtcaaacttattggttactgc

SEQ ID NO: 159301 - DNA, 394 bp, Arabidopsis thaliana landsberg
gatggtaaagtgaaagcctccgtgggtgcgagcggaggactgtacatcatcgctgggacaacagaagtttttctgaattattttttcctcaagatggatcctctttcttccgttttggctccaagaatctaccatcaggtttttcgttttttttttttccttctgcccaatagaaactttcttgttctctactcataccttaaatatgcttcttgtaattattttcattttcagctgataccaaacatagttttgtatgaaaactggacgacagtgttcagtgatcatttcgagattcctaaagagacaagagttgtgttggagaagaaaggtcatgtcctaacgccttttcccggaggaacgattgttcagttcatagttcaagaatctggtg

SEQ ID NO: 159302 - DNA, 602 bp, Arabidopsis thaliana landsberg
tcgtcttctctaatttctcgtaattaaaactcgagtgcattcataatgtggttataaaaacaagtgagattctagttaacgaaattcaacagctaaaagtataaaacgtgtccataatccatctttttgtaataccagttaattcaaaaacttcgatatagagatgattaattgatcaacaaagacatgctgattacacaaaaccaacttatttaaaaccacattattatttctcgaatcgttacagtccatcatcaagtagaacaaattcatcaatgatatgattaagctgtttattaatcgtttttaggagtgcactttcgagcggtggtaactttgacgggtttggtcttgaggacaggattttgctcgaaaaagttcgccggtcggagttcaaagccaccaaacaaagtaggcatcgtcggaaaatcttcctggcaagggacatggtggaatccgacagtgtaccacatcactatatctgtcttctctattttcctattcctgtcgcactcaattatataacttttagtcccccacaaaaaaagcacatacattgacttgtcttttacttcaaagttcaaactaatataccacgattt

SEQ ID NO: 159303 - DNA, 203 bp, Arabidopsis thaliana landsberg
tagctaagcaagacgaccaaagtgtcgattgacaccaacatggtatcgatcgacaccactcttaggtggcaactcacgtttctctaacttttaacttttgattatttttccttcgatttctctagcttaataacattggggacaatgtcatataagtatgggggagtcagtaactaacttcatcttttcttttcttatgagtc

SEQ ID NO: 159304 - DNA, 352 bp, Arabidopsis thaliana landsberg
gcctgcaggtcgactctagaggatccccacaaacgataaatatatcattctgtttagcgattgttcttctccttggatttagatggttgtcttctttttgtaaccaacccaaactttcaacccgacccgattcgataacccgcaattcatcatctctcaccaaacgcggcaagtttgatccggccacgtcagcgtttctctcaaccgttttttccgccgtttcagtttaacaacccgacgcaaaacgctcatccataacggcaaactcttcaacggttcctccaaacacgccattatctccgccgtgatctccctgaaacacggtcgtgattccacgtcagacgaaacgcat

SEQ ID NO: 159305 - DNA, 185 bp, Arabidopsis thaliana landsberg
caatattggtcgtatttcctcagagacacatttgttctctctatgtatgatgactttcagaagtttgctcttgaggatgcagctggcaattacgattatgggctagagtgtctctttaggttttataggtaatgcatacgtcttagatttgcttatatgttccatctttttcaccggtatttcga

SEQ ID NO: 159306 - DNA, 541 bp, Arabidopsis thaliana landsberg
taactagtgaatggaaccatcgtagatctgtgccactccgccgttccaaccgccaagcaaaccgtaagggagactcgtcgagaaaagccaccgagaaaggtaatcgggaatcttctcgtgttgttatttgattgtgttatttggttattaaaccatgatctaaattaaaccagttaaaaccaatgaatcgtttgtttagttagaagttacgtgaaattgtgttgtgaggaagaagaagttgacttcattcattggtttagttgttagagtaccggttaattgccaaaccggaagctatcattcacgtgaatgcatggatctaattatggacgtagtgttacgtgtagtgaatgaatcaatatcttattactagatttggttgaattattttattaaattaagtctacttaatttattgaaggatatatagtttgggttgattatgaaattaattatagattattaatggaaaataatctttgatcgattatttaaaccgtcgcagattgagatcgttattgaaccttttcctgttgctgtt

SEQ ID NO: 159307 - DNA, 317 bp, Arabidopsis thaliana landsberg
agaatatatatagatcaataaaaaaaaggttacaaagttatcttaattaattaccaaaaaaagaagataactctctaaagtagtagagaagagaaagacttcacctaaacaaacatagtttcgtctataaatcatatcacagaaaacaaactgccacaaaacattttaacaaaaaggaaaaaaatgtgaccacagagcgatttggtattcagtttctggcttcgaagaagtcttcttctttatctacctaagaacagattatcatcttctttgctctaccaaaaatcgtaagggggagggtgaattccctgtacaga

SEQ ID NO: 159308 - DNA, 276 bp, Arabidopsis thaliana landsberg
cgtcctttttctgtatttttgcatttgtcattcaatagagacctaaattagattccaaaaatgagaaaaaaaagaaaagagaagtgtcatttcaaagatacagagagttttacaaaaatggaggaaatcagatatttgtccttaatagcactaatcaaactgaaaaataaagtcaagaataaaaaacagagtcattgcataatgcaaaaactttgttagaagacttgtccgttctaaactttgaagtaactggtctaatatagagatctttaaaga

SEQ ID NO: 159309 - DNA, 237 bp, Arabidopsis thaliana landsberg
atgaactagattttaacccgcggtacatcgcggaaacaatttattttttaaagttagtatacataaaagtttgcaaattgtatctatctataaaatattttatttcatagtttacaattgttattaagtaacgtgctgccaaacccgtcccgccaacccgtaccgtaaaaaaactatttattttattaatgttgatcttatttatgatatgtttatgaattattgtctaaatatttt

SEQ ID NO: 159310 - DNA, 176 bp, Arabidopsis thaliana landsberg
atttgatttctagtaatggaagaaattggaggagttgaagcagtgattaatttttaatctggatcttcgctaccaatttcttatcacccatgttttgggcctcacgaggatctacttcttcttgaagctgatgacaaactcgtctctgatatctttcatcaaaggggggatcctcg

SEQ ID NO: 159311 - DNA, 156 bp, Arabidopsis thaliana landsberg
  unsure (1)..(156): unsure at all n locations
cacgatttaaaaagctaaacaaaaaccattgttttctctatctttcttctccaaaaatggcagaaacaacaacagtaacatcttcattgaagcgtcaaagagatgagcangaacaaganatcatcaaaacacangaagaaacgaaaagacaaaagc

SEQ ID NO: 159312 - DNA, 355 bp, Arabidopsis thaliana landsberg
  unsure (1)..(355): unsure at all n locations
acgttttaccaaaatgccaaacttcaaaaaagcaataattttctacacaaacaataccattaggcaaagaaagagaaaatctagcgggaacgataatttctctttgcaggtttcttgtcaaaacctggagcgnnnnnnnnnnnnnnnnnnnnnnnnagacccatcttgccaagaatatttacagggatagccggagggatgctaagtcccatactgcggctaaactcattagctaactccaccagtctggtcgtgtctctagcaatcttcttctgcgatttgtagtaacccaaccatgcctgatatgccgcctccttgttcgtcatttccacttggataagccctttctgcacct

SEQ ID NO: 159313 - DNA, 241 bp, Arabidopsis thaliana landsberg
ggctgaatacgataagactgtaaaggaagtacacgcaagtggagttgtgttaataagctgatattttggtttttggggggcgtgagaaagaagtcgtcgttggtttgttcaaactgaaaagtgctctgttgtcgtgttagcctttacaatgctatggctaatgttttgcttctggctatggagattcgtgaactttgcagtattcgatgaacaacctgtgtggctgatgatgagaatgatt

SEQ ID NO: 159314 - DNA, 140 bp, Arabidopsis thaliana landsberg
tgttatgaataaagatggatgcccattataaggcccatcatctaagcccatcatctagatgtttctagggttttaccctttccttgtacacctatataaagaaccctttatctcaatggaataacacactcatttcttct

SEQ ID NO: 159315 - DNA, 110 bp, Arabidopsis thaliana landsberg
aatgactgaccaagttcatgtcctcatgaagatcttcaacccatgcagtgatatcattctctctgtggacacttgctatgtatatgcatgctagagctatgcggtaggga

SEQ ID NO: 159316 - DNA, 469 bp, Arabidopsis thaliana landsberg
aaaaactctaacttcgaaaaggaaccagagtaaaattcaaacctcacgaatagtagagagacgtttggtttcttgttcgacccgacccaattgagcttggatccgttcacgaacttccatcctcctcttctcaatctcatcttctttagctctaaacgccgaaagagcagaacgagtcatctcttcgtcttctctcgacatatgactactaaaactcaagctcatcatctgctgaggaggctgtgtagtagcttcattcgttgttgtcatcttcggtttcaattcgtccttgttcttgttttggttagtgtaggtgttctttttcttcctcaagccgcaacaagaacgcgactgatgcaattcctcagtggaattccggtggggttcttcgattaaccctatttttactgacttgggattgaatctaagcttaaagctttgttttttaatggagtgggtttgtttctct

SEQ ID NO: 159317 - DNA, 80 bp, Arabidopsis thaliana landsberg
cacacacctctctttcctcaaaaaccctagatctctccctctctctctctctctctctccatctcttgtctttgcctttt

SEQ ID NO: 159318 - DNA, 167 bp, Arabidopsis thaliana landsberg
acttaaatagtatcaatacttattgtgattctgaatcaaacaatgaatttgtattaagcgatttagacaaattcactcctctcttagctcacaaataatcaaagggaaagaacaaaattgcttgaaataaaagctaaggtttgctctataattgtagtctcttgtat

SEQ ID NO: 159319 - DNA, 531 bp, Arabidopsis thaliana landsberg
gtattgattgtaacaagaggtttattcacatatgcaggtggataagtgatagccgagatgagtacactaaggaaagacttgaagccattgacgatgagttcaaactgtatcgatgccacacaattctgaactgtgctcgtgcctgtccaaagggattgaacccagggaaacagatcacacacatcaagcagcttcagaaatctggttgaacaacaaatgaatcaggcagtacctaatggatttttgattctaataatctgcaagaaatccaattttggattcattcttgtattgctgtcacaactatcagaattagattattttgtggtatatcttgatgaattttttttgcctacaacaagcaataaaactctgcattttttatcatccactcattcagctttcccttgatacaaacatttggatttcgagttttgctttattggtgaataagagagaaaaatgtttacacatacctcttgcaacttggaaagtaaataactaatctacaaacagataagcttgtttttt

SEQ ID NO: 159320 - DNA, 86 bp, Arabidopsis thaliana landsberg
agtaagcaaatgtgttatgtgtgagtgagattgtgtgagagaaaagaagaagataagtgagagagaaagagagaaagagagacaat

SEQ ID NO: 159321 - DNA, 209 bp, Arabidopsis thaliana landsberg
ctatgatcgaatttccacattaaccaatgaaaaccgcataggggccaagcgaatccagaagggttctaacttaatcttaatcacctaactaaactagagaataccctaatctagctaatccatcctcaagaaccctaatcactactcaagcaacattctcaataacacaaacccataaattactgaaatcataccaaaatgtaaatcta

SEQ ID NO: 159322 - DNA, 558 bp, Arabidopsis thaliana landsberg
agagggttgattaaaacacaaacacttaaaatgctagaaactatataagtaaaagcagggcaattctccttctcttgccttcaccttactcaaaaatattgaaggtgagaattaaaaaaataaacccaaactgaaagattaagtaaaaaccaaatccaaactccatctcattctcctgagattttgagtaaaaaggatgattcatttgagttctgtttgaacccgcaaatcatcggttaagctaacgaacctgattcctaatcgataaagctgctaaaaggggttagcttgagttaccggcatataaacacattgcatctgatctttgagaatcatccttggctaatgctaccttcaaaggttgtttttagtcataagctctctctttaagcgttagacatcagtatgccaaaccgggcggtgatcttcgaagctcccgttctccaaggctgcaactttggccctgtgagctgcagacaatgcgagtgtgttgttcttgcctctttcctcttgtgggtactcgcaggattcggttaaagaaccggtcttaagatcagc

SEQ ID NO: 159323 - DNA, 273 bp, Arabidopsis thaliana landsberg
tgggagaaactgtattttctgtttcataattcagtatctgactgatgcagctggaattggtaattggaacagttattcacatgatctccagctttgctttggggtgaaggattttctggtacactttaaatccacttttttttctttcttgaaatagttcctgcccgtttacatatatgatattttattgatttttatggcatcttctagttgattgctccacaaagtgccagtggggtgcttcttgatacaccagagtctagcaagcttctg

SEQ ID NO: 159324 - DNA, 250 bp, Arabidopsis thaliana landsberg
  unsure (1)..(250): unsure at all n locations
gtttgcaccatgtctttgcgttgtttaagaggttaagcattgttaccaaccaatcaaggtttcattgacggatggcatgataaaggtacaatttaatatacatcaactcagttggctttggctttaataccatctatgtagctcaaactttatctttgcaggttgcaaacacttactttgtcaacacaacagaagaattggagtttagctggacaattcatggngatggtcttgaacttggatctgggac

SEQ ID NO: 159325 - DNA, 458 bp, Arabidopsis thaliana landsberg
tttttttagttttgtttcggattttgaagtttgtagttgtcactttcacatgggattcaaatctctccttatgcaataaaaaaccttatagtaatacaaacataagtttcttgaatcggtttatatcttctttaaccagatacattcttgctctcatcttcaagatttgttgcatcaggtaatacttttttccagaaccaatgtttactccataagagtgtcatctcttctattggaactcctttggtttcaggcaacaggaaatacacaaagatagtcattactgtcacccaaccagcaaagaagaggaagattccaaacttgaatgcacagaggagaccaaggaaagcttgagctatgatgaaagtgaagaggagatttacagctactgtgatactctgccccgctgaacgagtctctaacggaaagatttcgctaggtatggtccaacctagagg

SEQ ID NO: 159326 - DNA, 176 bp, Arabidopsis thaliana landsberg
  unsure (1)..(176): unsure at all n locations
tgtgagacaaagtgagagtaatccactttatcgtgttacatgagacttgagtgttatcaaagnctcaagtcagattttgttccaacattggtttttctactcatgtcggtaataatgtctttagtaatctagatatttgtttcacactttgaattcattcatacgaatcttcttat

SEQ ID NO: 159327 - DNA, 277 bp, Arabidopsis thaliana landsberg
tatcttttgctataagttagttaaatttgtgaggggcaggagctattacaagtgcacatttacaggatgttttgtaaggaaacacgttgaaagagcatttcaagatcccaagtcagtgatcacaacttacgaaggaaaacacatacacctaatcccgaccccaagaagaggtccagttttaaggttacttggaaaaacagagacataaagagcaaatgagttttggcatttcagcattcctattgtaatctttcattcatatatagtatgtttcctt

SEQ ID NO: 159328 - DNA, 573 bp, Arabidopsis thaliana landsberg
cagcaacaacatcattattatcagcatcgtcatcctcgtcatcagcagcagcaacatcgtctttgtgctcatcgtcatattccaaatctgaaaaggaataaatccaattcgagcggctggctagcttataaagatcaaggtcaggttttaaggaaatgagagtgagagggtgggaggggtgaaaagggtgtcttatctccggcaaaaagaagtgacacattttgtggaattccaaattgcaagtagcacagtagtaatagtatatactgccctccaaatgcttgcaaaagcagatagaaagtggaccatgagatcgtggtctccgccggcaaagcatgtggggttgagccggatcggacaaacgacatgtaggttcagatgtagaaaaataaggaggtggcttaaaaccattatcagaaggacgacgtagtcccatatgggtttctttggaatgaagggagaaagcaaatgagagggtatgcaaataaatggtttcaactcgtaaatgatgaatttttctgctcccaaatttgtcatttttatttataagatgtaactagagtttaaagacca

SEQ ID NO: 159329 - DNA, 121 bp, Arabidopsis thaliana landsberg
tgaaataaaagaccgagttgctctgggcccatccttcaagatgtcatgcaggggaatcccaaatttctgaattgagcacctaccctacatagtttaggcggacagtcattccaacctattt

SEQ ID NO: 159330 - DNA, 459 bp, Arabidopsis thaliana landsberg
gtttactcgagtacagaattgtactccaccaattcaatctgtttcattgcctattgacaataatcttggttccattgctatctttgagactaactattgacatttgagctttgagttctaaatccctacaggagaatcatgagcaattacagtggcagttcttctgttgatcctgactacaacatggatgagacagaatcgtcatcttcaaggccagagagagaacatagagaatacgaaagtttcagaaggaaagctgagatagcccgaggaaagagagcgatgacagagaggtatgagcttatagacgaagatctggaagacgagtacatgcctgaacagactcgcagagctaccaaacttctgcacaagctcgacatattgcctgctgaggaatatgttaggcttttcaagctgaatgagttctgtagaacgaggtatccttgctcgacctcactt

SEQ ID NO: 159331 - DNA, 72 bp, Arabidopsis thaliana landsberg
ttacatagagaatagaaagctgtatattttggtctcattggatcagatacaggagttagcttcaaagaacac

SEQ ID NO: 159332 - DNA, 253 bp, Arabidopsis thaliana landsberg
tatgatatgcacaaacaggtagtgatgatgaaattgaaagtggatctaaactgttccaaatgctacaaaaaggtcaagagacgctatccggaaatttcctcgtgagtctctttctttaatatgagtttctttgatcatttgaataatcgcggggtgagaagactgtgaagcctgataaacggattacaatcttgtggtatgcgatgctttgcctaataaattacaaataacatacgaattgtttgatgagaag

SEQ ID NO: 159333 - DNA, 140 bp, Arabidopsis thaliana landsberg
tgtgatgctaacaatcaagatgtgatcagaagtcactaagtcaagccaagcaataacaggttttggtgtgttctagcaatcctaagtgaacatgcagaaaacagaaattcaagcagaaacaataaaatactcgaccaaca

SEQ ID NO: 159334 - DNA, 783 bp, Arabidopsis thaliana landsberg
gcgccgttcctccactcgtcgctctctcacagtctggtactcccagagctagagaaaaggtacaaactttataactatatcatgatgcttttgatttaagaagccacttgattgttttgaagagttctttatttggagaatcttgtaacttgtcaggcacaggcgttgctcagttacttcagaaaccaacggcatggaaacgccgggcgtggctgattgatgatgttgatgatgatgaggatgcacagattctggtctctcagtgcctatttttatgttttgtagtagcgattttgtacaaaagaggtttcttctgcaaataatttttgtacccaagattttttgttggctctctgtattctttaattttctattgattctcataataaactttgatttggaatagaattattttttttttctttctgatttcataaaacaatgtagctgtgaatatgaaatgagtgaaaatattttaccattgatgtgataattagcaaattgagaacagtaattttgcagaaaatagcatgtattaaaattattatttgtatacataaaagacaaataatatatcaaaatgctgaatagaaaatgtgagctgtattgagggagacaaattgtagaatcaaaaaaagatataaataaataaaattaagaattgaaactaaaaacaaacaaacaaaaaatttattagaaggcaagagcaagtaaatgccatgctattgccgcagctcccaccatcatattttgcattacacttcttctttctgctccgctctg

SEQ ID NO: 159335 - DNA, 229 bp, Arabidopsis thaliana landsberg
ataattcaagtcaaccagacgaaaaaaatcattctataaagcgagacgatacatttaacttcaatcagaaacaagaaaatgaaactcgatgcaagaaaaaaaaacttttaatgttacagagaaaaagaggagtttaaagtctttaacaagctttacagctacgtctgcaattcccagggatctctggagttccaaccatatactctggattctttccacattctccaag

SEQ ID NO: 159336 - DNA, 147 bp, Arabidopsis thaliana landsberg
aagtacgtacccaagtcccaatattgttaattgtctctgagagttataatggctccagtcccattacctgcaggctttacgtttcatccccataacgaagcaatcgtaaactattatctgaaaaaaatgaggtcggtcaagaaatcg

SEQ ID NO: 159337 - DNA, 448 bp, Arabidopsis thaliana landsberg
  unsure (1)..(448): unsure at all n locations
acatcgagagttactgaatcaggtaagctttaagttcacaacattcataccaaattcggagtatttatttacctacacaaagaaaaaccaggggaataatgatccttccataatttttgtttgacatgtaaaaaaccaggaannnnnnnnnnnnnnnnnnnnnnnnnnnnnnnnnnnnnnnnnnnnngtggatcaagtagttctaacagttctagtagtgactcaggatcttgctctagtggtaaatgtttaaactctgtgttaagctcttttaccatattagcatcacaactcacataagttttcttctgatctgcagatactgacagtgacagctcctcaggacgtggatcagataatggtaattaggccaacaagtcgaaagtcttttagctttagagtcagaaccgtcatgctgtttgatctctttcaatagcacagttagatt

SEQ ID NO: 159338 - DNA, 363 bp, Arabidopsis thaliana landsberg
agaaataacaggttggctcatagaaggactctgttttagatactaggtgaactaatcaagcttgataataatgcatgctttagtataggatttctcggcttctctggttatcttagctctaagtatagagagtttcgcggaacaccaccggttactctaaaatcatagtttgagtttcagaacggtgagataacaatcctactattagctagatctacaatttatctatcttccaagacaattccttagacccgatgcttaaatcgcttgaatctagaactcatttacttattttattgtcttttacattaatacactttgtctagcttaattaaaatcatcataagtctattgtgtgaacat

SEQ ID NO: 159339 - DNA, 237 bp, Arabidopsis thaliana landsberg
gagacagctcatcaactcccatggcaaaaaaaaagcaacaatcttttcccgctctattgatttcactgcaaaaaaaattgcagaacaaattgaaaaggatgaatcttttttcttctgattaaaatggtaatatacatagaacaaaatcatacaaaacagaaataaaaactgcagaaacgattaagctaaggagagaaggaagagtttgttagtttgggatacaaagtttccaacttt

SEQ ID NO: 159340 - DNA, 357 bp, Arabidopsis thaliana landsberg
cctcctctatggctgcctggatcgagtgaatggatcgagtagaatgctctactgcttccctcctggttggatagagtagagggtcgagtaaagtccttttaagctccttctgcacctgaaaacacaccaaaacatgcaatgtgtatgcaagatgatcctaaatggctaagtgtgcaaaataagctaaaatggtgcaaaatgatatgatacaatgagcaaatgcaaagctaaatgatgataaatacatacctaaaatgagtaaaatacagtgttatcaactcccccaaacttatctcttgcttgccctcaagcaaacaaaaaatcttaagttgaaggagaggtttgaaggtggggatt

SEQ ID NO: 159341 - DNA, 212 bp, Arabidopsis thaliana landsberg
attttcttcctttctttcctttttatttttctcttccatcgcttcttttgccgtaacccaaaagtctcgtttgcttatttcttacaggtaaaatcattcattcatatcatatactactaatggttgatccgattcgaattttcagaacaatgtcaaattatacagccctatgtaccaaaacacatccttgatttccaaaataaatgcgcctg

SEQ ID NO: 159342 - DNA, 189 bp, Arabidopsis thaliana landsberg
attctctcggttataaacaacaccacataaaatcatattggagttgtaagtcagtacaatagctagcaaacttacaatcttttttattatataaaagacagactctaaccaaatccaaacctaaaaagctctcactaaagatatactattattatatagtgattatgaaaacaacatgcgaagataaca

SEQ ID NO: 159343 - DNA, 551 bp, Arabidopsis thaliana landsberg
tttgttatatctatcaaaaaaacatttattcaaaaaatataataattacaagaatcaaagaatatatacatgtaagtataaagaaaaaaaattaaccttacaaacatgttatataggtttcgtttcaaaaaataaattgataatatatgcatatcaaaattagacaatctgaatccattctccaacgctagggacaccattgtagacggcaaagagaagataataaccaggaggagcaagttttccactaggaggagcaacggcttggatttgatgattatcgccaccaacattcttcacattgttaatacccaacataagcaacctcatgttcattgatacactatgtgtagtaaatgatggtgccaacattgtcaccattacattctcctttgctacgttttgttgcttaagctcgatctttacgtcaaacatttgtccgtacttaatctgttttggtgttgcggtgtttacgattcttggtctcatattggcaagagctggatcaaggtaaggtggtgagaatttctcaatgcggagctcggttgggt

SEQ ID NO: 159344 - DNA, 266 bp, Arabidopsis thaliana landsberg
tttttttatgcatcaagctaattgttctcatcacccacaacattagtgttgttgcgtctcgaagacttaatgttccaacgagaccaaaagagatagctaagaaagttcaaaagattaagaaccgctaaaagccagtaaaatagatcgagcctgtccttatttaggtcgttctccccgagccaccctttagagtcgactgacgtggaagtgatcttgtttacgaccgaaacgagcaccgagctgaagtaaaacccaaaggagtagga

SEQ ID NO: 159345 - DNA, 452 bp, Arabidopsis thaliana landsberg
cccaccgtttcttaagactctctctctttctgtgttctatttctctctctctcaaatgaaagagagagaagagctcccatggatgaaattagcgagaccgaagtttctccaaggtgatatgtctatctgtatatgtgatacgaagagttagggttttgtcatttcgaagtcaatttttgtttgtttgtcaataatgatatctgaatgatgaagaacacgtaactaagatatgttactgaactatataatacatatgtgtgtttttctgtatctatttctatatatatgtagatgtagtgtaagtctgttatatagacattattcatgtgtacatgcattataccaacataaatttgtatcaatactacttttgatttacgatgatggatgttcttagatatcttcatacgtttgtttccacatgtatttacaactacatatatatttggaat

SEQ ID NO: 159346 - DNA, 356 bp, Arabidopsis thaliana landsberg
taatttcaatatgccgttctcagtaaaagttcttaaactagttttaccggtataatattttgtatgattgaacagtttatatgtgttttaaaaattcaatttatggcatatgggaaaaaactctaattatttttttataatgatgatattattcttccgcaagaatagaatcatataaagataagaagtgaactataataattataaaaaaattaatatgataatttagatatcaaatataatttgttgattttaattggttaattttttggaaattaataatgtatttcgtttttctaattaaattaaattaattaaaatttagatatcaaatcttatatgttgattttgattgg

SEQ ID NO: 159347 - DNA, 411 bp, Arabidopsis thaliana landsberg
aacatgaaccgaaaaaacaagaatcgtcgttcggaaaatatatgattcttcttacatacaggttaaaaacgtatcctgcgcagtctcttatggccttgtaaagacgccccaaatcttactccgggaaagattctccgccagtttcttagctccttcggtatccatatccacaagcttttgcaaatgcaagcaagcaccagcagctacgacttgtttcctgcatttctttgaagttacaagcagttccaacgccgagactgtgtaccgcttatccaatttcttaatcttcgggtccaagagctgaactagactgactacacccttgtcactcttcttgaaaatctttctgttactcgtgcacaccaaaagcgtcgatagagctttagaagctgcttctttctcttcaatggc

SEQ ID NO: 159348 - DNA, 487 bp, Arabidopsis thaliana landsberg
acagaagatggtgaatttccattagactgtaaaagttgatcaatatacaaaacccaaaacgaatcctttttcaaaatgaagatacatcagagtcgatgacatgttctgcatcaaacacttactttgttcacaccaaaatgatcttgcaccattaatctcaaaagatgttcagtcataatgctccaatgacatggaagaagcattctccaaatctaataatagtataccttaccgggaaaccaaatcgagattcccgatttgaacaagaatatttcagaccgaagctcttatcgtcgcagaggtaagcttcttagaagctttcgagcattgtgatatcttgaggtatagtaaatttacttgtagcaccaaatacattggccatctgaaacacagcggattgaacagcaggagcagttggtaatagcgattctgggagagacggacagcactctggctgattttgtttgttattgaagactggagtgta

SEQ ID NO: 159349 - DNA, 348 bp, Arabidopsis thaliana landsberg
ctttggcgtgttcttaacttaattactggagatattttattgatttgagaattaatagttaatgtgttatttaggtaacgtatatgagagggttttgaggtttcatacgttaaattttctgcaaaaaatcagagaaacaattctaatcaaattttcaaaacttgaaggaccgtagattctctctcaaggatcgctttgattctatttttcaagtgtcttttttttcgtctctttcttcatcttcgtgttttttcttttgggctttaaagatctgtcgatttttttctccctttgagttcgatatgaatatattttctctgaagtcatatttgttggtaatgttaatgt

SEQ ID NO: 159350 - DNA, 253 bp, Arabidopsis thaliana landsberg
gaggaactatcgttctcagaaacaaattgaagacttcaaatcaaacataataaacaaagaacacatgagaactgtttcagaatgagaaagagaccatagaagaatgaacatgaactgatattatagagattccttgaggctcaaggtttcttctttcatggtttccaaaggattgtggattcagcaatcatggaggtcacagtgtaaggatccatgttcgaagctggcctacgatcttcaaagtatccttttc

SEQ ID NO: 159351 - DNA, 329 bp, Arabidopsis thaliana landsberg
tcctcaaatgaatagaaatcaaaactcatgatctaggcacaaaattctactctcaaaagtaaagaagcaaaaacaattcgagaaaacaaaaaaggaaatttttttggaaaacatacaagaaacaaagaccgttgtccttgtcttttaacagcagacaccgtcacttcctgctgagctgaatgatatcctctccggcttttctgacccaaatgtgtatttgatacctaacctcgcatcatcatcctcactgaccacctcttcgcttacagagggaaacgaaaacaccaggggcgacttatctcctcttctgttgctgccgtcgaaactaa

SEQ ID NO: 159352 - DNA, 90 bp, Arabidopsis thaliana landsberg
ccaagtaaaaaaaaaaatctaatctttgcgtcaccgttcgtgtttcctcttttctctagggttcttctacagttttccagtaaacatgag

SEQ ID NO: 159353 - DNA, 249 bp, Arabidopsis thaliana landsberg
atgtaatcaagaacatctccaattgcattatatacatctataaacattaaaaaaaaactaacaatataaaaaagctacacaattttctgctaattcagctgtctctaaatttaacaactatgaacgaaacagagaataaaacaaaaagtaacgaagaaataagagaccaaaaaacttttgacaaagaaaaaaagttttcgctcggtcacgcggtttttttcacgagcagccaaaataagaaacttcttc

SEQ ID NO: 159354 - DNA, 472 bp, Arabidopsis thaliana landsberg
cactgtgtgttgaatggaaatgcaagaggatagcttgtggagtttgtatcctgtacacgatattgatacggccttaacgaatagattagtctactgtgatctttatttgagacagtacaaggaaacattgaaacagaccatgcttggccaagaatctgtctttgaaactcaggttagctttttcattccccaattctagttagagtcactctatgagtgcgtctgtcttcaaaagatgtctcatttcagtatttcttgtctctcttacaatacttgttatctcagatctacgagcttcatcgtctgtatcaaaggcagaaggatctgatgatggacatggaggaaactcaacatttattcccaaatgccggggtctctagtcctagaagaagtagacactggatgggttcaagcatctctacatctaaaaccagcgtttggccaccagaagacccatctgccaagggtgatg

SEQ ID NO: 159355 - DNA, 67 bp, Arabidopsis thaliana landsberg
tttttctttggcaaactcgatttcgcctagcttcttctgagcatccgccgcttccgtctacaggttc

SEQ ID NO: 159356 - DNA, 468 bp, Arabidopsis thaliana landsberg
ataacagaaatttcaaacagttcaaaatgagaaaacaaataaaaggcactaaacaggaagaatgtgtgtgtagatccgccacctccgatcaagaacccaattacgagaacaacgctctgacggggagaaaacgaaacaagaacacagacacgcgaccaaataccaaactattgtaataaaactaacactgtcctttgattcacctgcggcagatagagttttgaggatggttcacttcgcacccttcttgacggcagccttggtaaccttggctccggttgggtccttcttgtcaacactcttgataacaccgactgcaacagtctgcctcatgtccctcacagcgaaacgtccaagtggtgggtactcagagaaggtctccacaaccatgggcttggttggagtcatcttcaccataccagcatcaccattcttcaagaacttgggctccttctcaatctccttacc

SEQ ID NO: 159357 - DNA, 132 bp, Arabidopsis thaliana landsberg
gtcaagcaggggaagaagaggagggagctgggaattgtcaagccgtgtaacgaaagatttaagaaccagagatgagtctgtgtcaagagtcggtgaagacagctaagagtcttcagacaatgatgcttcaag

SEQ ID NO: 159358 - DNA, 87 bp, Arabidopsis thaliana landsberg
tgttcttgccctgcaagtgatatctcttcttggagacatatttcaagctgttggtctgaatctctatcttttcccatatggagtact

SEQ ID NO: 159359 - DNA, 318 bp, Arabidopsis thaliana landsberg
agatttggttaatgaacttgttgtctagggttaatttatcgagcacgtcaatcacctctaaactgaggaaacaaaactactcaattatcccatcctcgggaattctctatctgattgaattctttgtttattccactgttgtttactacatcttatcatctgttgtttaatttttgcaattcttccttgttactcgacctgatactcgaccacccagttgtctggcaacagactgtgcagtcgagtgtctttgtttcatattatgtctgttactcgacctgtcactcgaccacacccaactgtactgcaacgagctgt

SEQ ID NO: 159360 - DNA, 129 bp, Arabidopsis thaliana landsberg
accaaagtcgccggagatcggaagctaacacgggaagatttagccggaagaaatggcttcgttaggtttcaacctcggcttcaccttctccaatgcacaaattcagcagcatcgaaaagtttccggagg

SEQ ID NO: 159361 - DNA, 247 bp, Arabidopsis thaliana landsberg
tttaacccgcggtagattttaacccgcggtataccgtggggacaatttatttttttaaaagttaatatatataaaagtttgcaaattgtatctatctataaaatatttttattttatagtttacaattgttattaagtaacgtcctgccaaacccatcccgccaatccgtcccgtaaaaaaacctatttattttgttaatgttgatcttatttatgacatgtttatgaatcattgtttaaacatttt

SEQ ID NO: 159362 - DNA, 402 bp, Arabidopsis thaliana landsberg
cacagcatggtttaatttttactcagcagcttatgaggtcggagtactccagaagtgtattacaagaaccccagcaacccacaaatggttacatgcatgggaatcttgggttgcagacgatgccgaatgaggcaaatgttttgggaatgcatgtagagtcgagtagggataagttgtcagagagaggattcactccagatcttcataaaattcctacgaggtttgaaatgggagaatctccagttaattatgatttctttggtggtcaacaacaatcaaacacacagctccctggcatgctccagcctttgccaaggcagcaggtgtcattcaatgatatgcaactactgaagcagcaagttatggttaagcaaatgcatgaatatcaaatgcaacaacaac

SEQ ID NO: 159363 - DNA, 381 bp, Arabidopsis thaliana landsberg
  unsure (1)..(381): unsure at all n locations
cttccaatagagccatatgagtggtacctagacatgcgccgttatggaacagtgaagcattgtgggtttggacttggcttcgaacgtatgattctcttcgctactggacttgataacatcagagacgttattcctttccctcgctatcctggaaaagctgatctttgattcctcttctttacaccatttacatacacaatttcgcttttannnnnnnnnnnnnnnnnnnnnnnnnnnnnnnnntagtttactttttaagttggttaaaggaaaattgtattgacttttgattttttatctctatggatctggttttgttcggttatcccgatttggctattgaatgataggagaaccaatttgagatataccacaaacata

SEQ ID NO: 159364 - DNA, 259 bp, Arabidopsis thaliana landsberg
cagcaccacctccatcgccaccacttccacctcctctctgagttgcaatggagtcgagctcatcaaagaaaagaacacatggagcggattgacgggccttgtcgaagatttcacgaacatttgcttcactctctccaaaccacattgtcagaagctcgggacccttgacactgatgaaattagcttggcactcgttggcaatagctttggccaaaagggttttcccacatccaggaggaccgtagaaaaggactccctt

SEQ ID NO: 159365 - DNA, 302 bp, Arabidopsis thaliana landsberg
gcttctacactcgagcccactctcttctcctcctccgatcttccaatccggtcacggttcctatatctccggtccggttccgtcttcgtctccgtcgtttctcatcatctcccgtcgcctgcgttttcgaccttcattcctccgatcaggacgcgaattcgaacagagaagacaaagacaccaaaattggctgctccgatgataaatcgcgaaaatcacgctcaaatcctctaggatggaatccaggggaagtaattaccaacagatccttaattgggggatcgttccctgctagtcctcgt

SEQ ID NO: 159366 - DNA, 90 bp, Arabidopsis thaliana landsberg
ttttttttttgtgtttcttttttttttttcttcttgcttttttttttttttttttttttttttttttttttttttttttttttttctatt

SEQ ID NO: 159367 - DNA, 140 bp, Arabidopsis thaliana landsberg
tgtgatgctaacaatcaagatgtgatcagaagtcactaagtcaagccaagcaataacaggttttggtgtgttctatcagtcctaagtgaatatgcagaaaacagaaaatcgatcagaagcagtaaaacactcgaccaaca

SEQ ID NO: 159368 - DNA, 278 bp, Arabidopsis thaliana landsberg
gtgatgatagtcatggtcagccttttggtggtagggtcataacagtgaaatttggtgactatacaagaagaatcggtgttgatggtagtgcagaagcaatcaaagaggtaatcagatctgcttttgggttaagaactcgaagggctttttggttagaagatgaagatcagattattcgctgtcttgtaccacacatgcccttagggaactatctactccgtctgaaaagataaaaagattaaatttgccactattggtatctttcgaactgcgggttt

SEQ ID NO: 159369 - DNA, 272 bp, Arabidopsis thaliana landsberg
tttgattttttaaacacagcacttttcaaaaaggggacatgggaagtttattatcggatccaaccctaacccccttcacttaatcagtcatgcaatgatcctacagaccatgaatcaccagccccataagcctaaacaagatcctaaaccatccctctttgtaatctggtccatgagtgtaccccatcgtcaagcctctaaccaactcccaaactgcgatcacatgcccaagaatcttgtaacgcataccgtaagggttcgggtccggctca

SEQ ID NO: 159370 - DNA, 369 bp, Arabidopsis thaliana landsberg
atagaacaggtctggcctgttgaaatccccaagagtacgacgtggttccgtagctggaggaatagctgcaggaatctggtgttggtgtcgattgacacctctattgtgtcgttcgacaccaatcgcgtcgtcgtgctgctcccgatggtgtcgatcgacacctctgttatgtcgatcgacagcgagccctactgcgtctctggcagctatttggcattgaggcgcgcttgatcctcattggcgtcctcaggtaggatgagtccatgatcatccaatctctgaccagcctcattgtaggcttgcccatcctcatctgtcaaaactccttctgcatcagctctgatgactctgtcagccattgctaatttc

SEQ ID NO: 159371 - DNA, 339 bp, Arabidopsis thaliana landsberg
tattatccagtcatagatgatgtcaccacaggcacagagttttttgtatcagacagggcggctcttacgtctttggatactcctatttattttttgggtggacatacgacgattactaataattattactccaagttcggaacattcgatggtttgggctccgttgataatatctctctcaatgacttttactaaatgatcaatatatgggctcatggtattctagatggtgatcagctatttaatatccttataatatatataagaattgaatgcaatttgcatatatattatcaagtgttgaatataacattacagtttatacccaaccctagctag

SEQ ID NO: 159372 - DNA, 596 bp, Arabidopsis thaliana landsberg
aaaagtaagaatttttatcaacacttaacactttttctttgttgaatctttgttttgagttgttccatatgtgttaaattccaatatagttttaacaacaatataggattaactatgaaactcaactgcaaaaaagccgcaagttatcaacctcatacattcaatagtaaatataccaaccatataaatttttacaagtagacatgtgttacaacacacaaaacccataatctcacatgtgcgaatcatcagttaatgatcttcctatgagagactgaaccatttccctccatgttcttttaaacaatctgctcccaaagtttcaagcaaaaacctcacaaggcagtgtgtttttcctttgtttttgcaagaaaaatttagccaggaacaaatacgaggcaagaacaatcgctaatctgccaaaaataaaagatgtatacctcgagtttttatgttggcttctattatcgtgtagattacagggctttacatgtatttagctagccattgcttgcacatatcgagtactgtgtgcgaattggcatgtaaggcttgatgagctacatattgaacatcagccacgcttccgcttttag

SEQ ID NO: 159373 - DNA, 374 bp, Arabidopsis thaliana landsberg
gcccaaggagaatggaaacaaacggagcttgaatccgtcttcactgacaccattgatttttgttaggttgaagagcctatcaaattcatccatgtggtcgagtggatcctccattggcagaccatggaatttattcccctcaatcatcaagatgagaccactcttaatctcgaagttgttgttctggatagcaggaggtgcaattcctttcctctgatggtggtcccgtggtgcatctccagcaccaatgtttgcagggccattctgttgattttgttcgtcagccatttcgagtggttgttgaggtataaggttgactgtgtttctcctttctctgagttcacgagctaggcggctgatgttatcattgaaaa

SEQ ID NO: 159374 - DNA, 490 bp, Arabidopsis thaliana landsberg
cattgataagggcaactctagggttcatcatgtggctaacaggtgaaaggtagatacccttgacgatagattcaaaaactgagtcaatcaactatcgtgacagagacccccataactctaccacttcctaatctcaactgtcgttgatgaaacatagcagagcagggtttacgcaacaatctaccaaagccaataagcagacaaaccaatgtcttggtctagtctataaatctctggaatttgatgatcagacatccatttgaacgtcttttggacgctggacgtctatgatcgaatctccacatcagccagcgaaaactgcataggggcgaagcaaatccacaagggttctaaactaatcttaaccacctaactaacctagagattaccctaatctaatccatcctcaagaatcctaatcactactcaagcaacattctcaagaacacaaacccagaaattactgaaatcataccaaaatgtagatcta

SEQ ID NO: 159375 - DNA, 909 bp, Arabidopsis thaliana landsberg
atgtttaggataggtttgcatgcatgttgcatatttgtgttgatttcaagtgatttggagttgttgacgagctaactggaagaagcggacctgatcatgtcaaaccactcgaccccgaggtcgagtagaagcttcaagacctcaagagaccactcgaccccctggtcgagtagaggacttctccatttcatcatatcactccaccccgagatcgagtgtcttcatctccatcacctgagtaccactcgatcacctcactcgaccccaaggtcgagtttcttcatctccatcaccagatcaccactcgatcacaccactctacctggaattcaagtatcaccatcaccaccactcgactacatactcgatggccagctttagagtcttctccattccgcactcaacgagacacacgagcacaaggaagaaaagaagactccaactaattccagagtttcgtggctctgtacaaaggtattggttgcagggagcgttttggctttaacttgttgattcgtaatgcctgttaggttagctctcgtcaatggtgattgagtctgggactaggttaacttgagtgcctctgttgcggtggcacttagatttggtaaccgaacttgttatctagggttaatttattgaacatgtcaatcacctgtaaactgaggaaacgaaactactcaattaccccatcctcgggaattctttatctgattgaattctttgtttactatactgttgtttactgcatcttgtcatctactgcttagtttctgcaattcttttttttgttactcgaccacccagttgtctggcaacagactgtgcagtcgggtattcctgtgtttcgttttctgtttgctactcgacctgtcagtcgaccacacccagtgctctgcaacgagctgt

SEQ ID NO: 159376 - DNA, 506 bp, Arabidopsis thaliana landsberg
  unsure (1)..(506): unsure at all n locations
atatgcgagtttcagtgatatatacaaaagaacagagttaaaaaaaaatgaaacaaacagtttctactatatttcccaagnacacatctgatatgctctcataagttccattccaccaaaaaacatgtaaacaaagtatacactatcgtatatataaagctaagaagaaactcagtgtagcgagtgagaaaaaattaactgagacattgaaaagaccgccattgaaatgcaaatatggatgtggagtggtctaaagcaaccttcttactgtggatgaaattatgttgcagagctgagagaagaactaatgcattcagacattgatctgcgacaatctgtcgatgacttcttgtctaagcaatatggggatacgctcgtgaccctgaaaaacccacagcgagaaagagagttagctcaagaaactattgaatggtgtattctaaagaagtgttgcgtacctttctttgcgtttctctaaaaacctagccagggatgctttgcgagcc

SEQ ID NO: 159377 - DNA, 480 bp, Arabidopsis thaliana landsberg
  unsure (1)..(480): unsure at all n locations
aaaaactatatatgtaatatatccatatataggttttgatgaaaaccctaaaactatagatggtttattcttcgtgatcggtgtttcagtgccgaaacaaaacattcatagtttaaaattcagagagaaccaatgcttcctaaagcgttaacattgtaaaatccagacgagaaaaaaccagaaagacctgccgacatctgaggagcattaaacacttcctcatccaacggtgaataatactctccacggacctctccatccaacggctctaagttcatctccgactcacacggacggtggagatctactgcggtaaaagtggtgggcgacggtggtagatcnnnnnnnnnnnnnnnnnnnnnnnnnnnnnnnnnnnnnntgaacttagaaggacaagtctcgactctcatcggatttgatatgtaacggactttgatgggtttgtgcgtagtcgttgacttcctcttctgcttaggtggg

SEQ ID NO: 159378 - DNA, 341 bp, Arabidopsis thaliana landsberg
atcggtgtaacgcccgtgaactggaaaatcggttagggtttgtttttaaatcatccggtttaattggttgggttaattggaaaccctagagtgtgcctataaaagaaggaaactcgaaattagggctttggttagcctcttttcgttttataaaggagaaaaagagagaaaaggagaaggagcagaatcgttagggtttgggagaaatcagtttcgtcatattaaatcgtggtaaaaggtaacgaaatttagtagagttattcccaaatcctttatcgttatgctccagtttacagaaatggatttggattaaaattggttgagttattcgcagttttgtg

SEQ ID NO: 159379 - DNA, 261 bp, Arabidopsis thaliana landsberg
ttggaaatgctcgattgtgattcagtcttatatgctcgtgagattttatatatgcatacaactttattgtaagtgggggaactcttccataaaaattaaaaggcctagatacataagatataggcaacgtttcttttgccttctcatacaagaaaatacaatataagcaaaggcccatctgcctatataaaaccctaactctcgtaaataaaactctgtttttttcaccttctcgtttcaataaaatccaacacacaccaa

SEQ ID NO: 159380 - DNA, 228 bp, Arabidopsis thaliana landsberg
atttaacctttaaaattccattaattatccatttaagacataaaagaaaagaaaaataatgaaataaaaatttgtggtgtagtgtgttgaattttattaaacaaaccattatagagtataaaatttgagtggatattgaattattatgtggaagagaaaaaaaatgatgtggaaaagagagaagcttatgtggaaggtgttgaatggaaaaaccattgttgatagcct

SEQ ID NO: 159381 - DNA, 356 bp, Arabidopsis thaliana landsberg
ttcaaaaatccaaacatgttgtgttttatactgttcagcaaggtcctggagcctctccttctatctcacagagattaagaagttgctgcaaataaaaaaaaagaaccataaaccaaactattcttctacttagttaaaacataggtgataggacagaggttttataagccatgtggccaaaaaaacttgtgttgccaaatgagccacggacgtcccaagagaacccagattccatattgtcaatccatcgagccaatatagttttacagaaatcccgatataatattgtgatccaagtgatccaatgtctccgctgttatccatctagcagcaatgtaaattagtggatactatat

SEQ ID NO: 159382 - DNA, 597 bp, Arabidopsis thaliana landsberg
ccattgtttacttaagactagttcctgaaacacgtttcaaaatgttaagaagcaagttgttaaattacaacttctacagattatgttacaaaaagtaggttttacctaagtcttatctaccacttgctgccaaatttgactgggtctgatttagtactagcttcacctgtttcttcacccaactctttactctttcttaattccagaaccttcctatgaagatttgagtgaatctcattcgagaacgtcggactatccgccggtctgtattccgggcagagcctaccagacttaaaccggactccacatgcattacataaggtttttggaccgaccggaccggttctccactgtggtgtgttgtttgtgccacaatggctgcatcttcgttgaaacacaaggacagtttcttgtttcttcttcctcaactgctctgttgctgcatgttgatgattggttgaaacgagtggccaaacacgactaccggttaaactgttccgagaccgtttggttcttggtttaaccggaattcttgagaagcttggtttggttttatgtgtttgtgttaagagaagtgaaacttctggtgatgaacaa

SEQ ID NO: 159383 - DNA, 94 bp, Arabidopsis thaliana landsberg
agagagagagagagagagagagagagagagagagagagagagagagagagagagagagagagagagagagagagagagagagagatgagaaaca

SEQ ID NO: 159384 - DNA, 193 bp, Arabidopsis thaliana landsberg
tgagcgcattggtaattccccagtcttaggctgatataagttctcttttggctcttgttgactagcggaaaaggcgtggaactgatcttttaggcacttttccttcgagctttagtctccgataagactccctgatatgacaaggtctgataggtcctgattctttcctttccgccataacaactcgagctac

SEQ ID NO: 159385 - DNA, 400 bp, Arabidopsis thaliana landsberg
tcaaagttttctagaaacgtttcttgtataaacacacacatatgcaactgtacaacatcattgaaagcttatatccataaagaacacaataatcttacatctttgaccacaaaaagaacatagaaaagtacaaaactgagtgattacaccgtagatgcacctgaaaaacttataacatttgtacttagtatccacgaacctgtcttgtcctgactgaaactggacccttcaaacctgctttacgcataataggatcttcaatagaacgaaccatgtggtccacatgtcttgtatccgctctattcgaaccaaccatacgattttgctcatctttagacttactaatagtaatagtctcaacactagattgggtttcttcttcactatcgtagataatagt

SEQ ID NO: 159386 - DNA, 412 bp, Arabidopsis thaliana landsberg
gtcgcttgcaagtctcgaggagatggatatgtcagaatgtgaaaacctgacagaaattccagatctttcaaaggccactaatctggtgaatttgaaactcaacaattgcaaaagtttggtgacgtgtccttctacaataggaaatctccaaaaattggtgaggttggaaatgaaagaatgcacagggctggaggttcttccaaccgatgtcaacttgtcatctctcaaaatgcttgatctcagtggttgctcaagtttgagaacttttcctctgatttcaaagagtatcaaatggctctatctggaaaacaccgccattgaagaagttccctaatgcattgagaatttctcgtggctcactgtacttatgatgtattgttgcaagaggttgaaaaacatctcgcgttagagc

SEQ ID NO: 159387 - DNA, 497 bp, Arabidopsis thaliana landsberg
gaagaatccgagagcatgaatcgtaaagaactcggagagattggatctaagcttgtggttttgtttcagagcaatgataaagagctctcttatgatgaccttttggactcaacaaatagttttgatcaagctaacatcattggctgtggcgggtttggtatggtttacaaagcaacgttaccagacggtaagaaagttgcgatcaagaagttatccggtgattgcggtcaaatcgaaagagaattcgaagcagaagttgaaacactctcaagagcacagcatccaaatcttgttcttctccgaggattctgtttctacaaaaacgaccggcttttaatctactcgtatatggaaaacggaagcttagactattggctacacgagcgtagcgacggtccagcgttgttgaagtggaaaacacgtcttatgatcgctcaaggtgctgcacaagggttactttacttgcatgaagggtgtgatcctcatatcttacaccg

SEQ ID NO: 159388 - DNA, 441 bp, Arabidopsis thaliana landsberg
ttcctttttctgccgactcgcacagcccaaatgacgtaagtgtcggcgaatattacactcggaggtggtgaattgaggctgtcaagaagcttctcgaatggttcttccaatcttgtgtagacggcatcaatgaagcctatgaagtctttggccctgacaagctcggaagggatgagattagggagagtggagaaatggatccggtcgggtttcgggtcgggtccaataaacccgagccattcttctgtgacgacgaaggtgacgtgaaggttagggtatcgacggacaaggcgtttgcagaggttcatcatagggttgatgtgtcctcgacctggataaggcatggccaccacgtggcgaaattggtttggtggagattcatttggatccataggttgtttcttgtgaagtgtgtgattttggtcactgtgacttgaggag

SEQ ID NO: 159389 - DNA, 315 bp, Arabidopsis thaliana landsberg
tgtaaataacattcgtcgacaaatagagatccgtggatacatgcagatactaaaccattgggacaaaggcagactcgctagacacattaaagaaaatgacagagaaatcaaacataatgaaaacaaactcaacgccctgtttttttttgtcgttttcttttttagtttatttaagggcattctataaaagaaaactaaaattacttcttctcgttgatgagctcttcaatgagttcagcagcttgctcaactgtggcaatcttctgtgctttctcttcggccatttggatgttaaactcttcctctaaacccatt

SEQ ID NO: 159390 - DNA, 82 bp, Arabidopsis thaliana landsberg
gtcttttgcccttcgtttttttatatggactacaagtaatgaagcaaaaagagatttgatccattatacatctaatcagttt

SEQ ID NO: 159391 - DNA, 470 bp, Arabidopsis thaliana landsberg
tttagtattacatgaacttgcataaaaacttattcaccaaattgattattgaacaaaaagatggcacacaacgaaactgaaaacagaatgaaaatcaatcccacttgctctttagcttatcaacatgcctaaactcatatgtgaacaccaaactcccatccattctcgtcaattcaaagctctctatcaatacataacatcgataactcttccaatgcgatgaaccgccttcaaatctctctgatctcttaatgttagatctttcgcctgcttcgtttaaccatccaaacctttcctcttcccatttcatcctctctacgaccacagatccaagacctatcttcttgtcgtctttctcatcccttaagacactaaaccaaacaactccatcacctgaatcctctctcaaattagtttcttgtccctcaagcttcaccgattctgtttctacatcaacatcaactacaacc

SEQ ID NO: 159392 - DNA, 685 bp, Arabidopsis thaliana landsberg
ttctgatattttcatccattacaggatccggggaaccttggttagcccatggacccgctctccaataagtctttgagcctctcatagtcacgcctgggatggaacttgcggtgtaatctgaaccgtaaaatcgccaggcgatggatcagtgtgacttttccaagaagtcaacacccgcttctcacctgtggcaagattatacatcaggtttgagaaaggtagcatagtgtcaccaaaatgctcaaagctttcccatagagttcttcccgaattattgtctatgacaactaaatttccgttgtctgtaagctccgcacgagacccgttagatgcaaaagtttctccaatggaccacacaacgctatgattttcattaaacaacagaagactaccattgctgctgataccgcgatttgccgcagagtctgtaacaggcttttctctattagccacccacacaaccacctggggaatgatactcttgaaccaaattccgagatactgattttgggagttattaagactgaagaatcccaattcataaacaccattagaggagctgagagtttgtccaattgaaaagggactctctttggttatccctgcaaagctaaaactcataaagatggtaaaaaagggcaaataagcaaagaacactatcctcttcttccccatctggtttttt

SEQ ID NO: 159393 - DNA, 586 bp, Arabidopsis thaliana landsberg
aacaagaggttgagagatgaacaaagcctgagttacatagagagattctcggaagctgtttcgttggatccaaatagagtgatcttagttgaagatattgagcaagctgattatttgtctcaagtgggtttcaagagagctgttgagagaggaagagtttgtaattcgagtggtgaagaagcttcgcttaaagacgcgattgtgatcttgagctgtgaaagatttcgttcaagatcaagagcttgttctcctcctagtaaccagaaatcggacggttcagatcaacctgaggacaagaatgttgctacttgtgttgcacttgatctaaacctatctattgatagtgcgtacgtttgtgaagaagaatcatgtgatgagattggcttactcgaagcggtagatgcacggtttcatttcaagtgttcatcaacataacactaacagcatgcacgtatgcatgtaacatggcccagtttatgaacatgatcattcgcattacatggtttatggtcaaccgttatttaatttgtttcccttacggacttatctttcattgggttggggcaatactttgggttaaacgtgt

SEQ ID NO: 159394 - DNA, 355 bp, Arabidopsis thaliana landsberg
ccttcttgtctctcattcccaagagccagtggatgtgttgttgtagttccgttccgtggctgtctttgtttatcatcgtttaatctcaacctcttaaatcggcagccatggcggttcctcatccttcttcttcctcctctagatctcatcctttcctctcccatgtctatcacactagcttccatcattatcatcatcataatcatccatcgcttgtgctcttctggtgcctcgagttttctctattatctcctctcgctctctcatcatcatcttcgtcttcttcttcttcctcagactcgtcgtcatcatcgacctcccatatctctttagggaaatgcggattctttctcta

SEQ ID NO: 159395 - DNA, 174 bp, Arabidopsis thaliana landsberg
tcaaggccattttgacttcttgggtggtaatgataatgatccttatggcttttctgcttccatgagacataggccaaaaatgtaaaaaagaagaagagaagagaagcaggatttacaaatccaacagatgcaaatcagaccgaatagaaggaggagcaagcacctttgtttctt

SEQ ID NO: 159396 - DNA, 238 bp, Arabidopsis thaliana landsberg
tgcaccttaaatcacacaaaaacatgcaatatgatcctaaatgcctaagtgtgcaaaataagctaattgtgatgcaaaatgatatgaaacaatgagtgatcactaagctaaatgatgataaacacatgccttaaatgagtaaaatacagtgttatcaactcgccaaacttatctcttgcttgccctcaagcaaaccaaaatattctaaatttgaaggagaggtttgaaggtggggatt

SEQ ID NO: 159397 - DNA, 382 bp, Arabidopsis thaliana landsberg
tttgaattcatgagagattggtatttgaaagttagttaccctcaagctaactccacgctgagtttcataagtattagaagggaagtgaaagagcctcccattttgctttggcgcattaccggtcgataaagagattcccaagttgaggtcaatctcagagttattgctctcagagttaatctcattttggtatgaactcatctcgaagttcgtgactgcttctctaccattagtgttgattgcagccttgtcataagccctgttgtcaagaaaatgtttagaaagaaagaaacctcatgttggctttgataaaaacaaagtgaagttctactaaaggtttctatcaaacaatgatcattaaggaaccttgcagcttctactt

SEQ ID NO: 159398 - DNA, 264 bp, Arabidopsis thaliana landsberg; identical to SEQ ID NO: 50787

SEQ ID NO: 159399 - DNA, 620 bp, Arabidopsis thaliana landsberg
atttaaattatttattgatgtcataagtttttgtgaattaaaaatcaaagcttgagcctcctccattacccaaaatattcgcaaataacatgacacaataatgtatatcatgtgtttaggcagcgcaaaatttacaaaatgccgtcgtacatcgcaaggagaattttacaccagaagggaacgacttccatcacctacttactaaatcgccaaggaggaccttgactgacggatcagagagacatcgagattgccgaaaaagatgaaggagaagaatataattaagaaacattttgattgttcacatagaaacagtttgaaattttaatgatcacctttgtattttcttggacttttcgtttttagagaccgcaatttgttttttatgatattaagaaattgacaattttcattaattatttaatttagtaagtaattatttatttgttttactagcatgttgtgatttatgaataaaaaacatcaaccagagtaatggagatatgcaattttaggctttcaaatgggtttagcaatttaatcgttatatcttataaaaattttgaagaaatacaagtttacagaacgatgtaaatactaaggtttaatatccatcaaaa

SEQ ID NO: 159400 - DNA, 420 bp, Arabidopsis thaliana landsberg
ctttcttactcatacatgttgtttgtgtcatccttcatgtctgagtagtctgcttgttagggttagggtttctcattagggattcatatgatttagtagattgcccccatcctaggtataatctgtaggattcttcatctttggttgttcttaatgctagttctagagtaattaactagaacttgatcttaggtaataggtatacccaccataggtacatgttactggaactactatttgatgagccaatgtttataggcgtctcgaataagattggtctatctacttaggtgaacttatcaatttcgtttagaatgcatgtttaggtataggatttcacggcacatcaccgagaatcttagctctaggcatagtgagtagcacggcaaatcactggttactcaataattacggttttag

SEQ ID NO: 159401 - DNA, 201 bp, Arabidopsis thaliana landsberg
tactgattctttcccattgtcccatgatctgaatgttcattatatccatgaagctcgtggattctataatgttcgtagtgttgctttcgaatctacgattttgattacttacagtttttcttgggtgtgtctcattcctctttttcctgcagagcgctgctgccaaaaatcgtgtgtatctgactcggactgggctctcat

SEQ ID NO: 159402 - DNA, 1624 bp, Arabidopsis thaliana landsberg
atttagacaatgttgaggaaacattttaccgcgagcaaaaccatcaacattctcgcacaccgtaatggatgaaccatcttcgagtccattctgttttatgttaatgtcaattagctccacatttttgcatggaaagcttttgctacattgcaaatttactgctactttgttctttgatgtgccatatatattcttactctccctggaaaaaaaaaacacaacttgtctttagtttttgttcttgtgataaaataaaataatatggagcttgtttttgcataggaagttaacctttctttcatgttcacaaggtgggtgaggacaatacttctgatcgatgttgattggtttcccaacgtcgatcatctgaatattctcgtacacgaagtttgaaacaaggatcttcgaagctgatgattcccaagttttgatccgaataccatcgcttgtaccattgaaaatgacgtctcttacgaataagtccttcacgtctttctcatctttgtttttccctaagcttccaacactaatcccatgtccaggaccacaattgatgttagagatattgagtttagtggttccagagagaattacgatacaatcgtctccggtaccgatgtttgtgttggagatttgaatgttcctacatgaacccatcttgataccgttggtgttaggactatcaccgggagctgttatactgacgccggtaatgttaaagtaatgaacggagaagaagttgaaatgtcccattttgctgttgagtgatgttatgtctttgatatttgagttgttcacgaatgcaaatcccatagtttataaaaaaaattcaagtttattataagacttgttaatttctcaaatgagaaaaaccaaaaattctaataaatttgtgtataaatatcacatgtacgttttgtaatcaactttaaatgtaaataagtgaaaaagtttaagatatgttaccatagctagtttaggacaattgggatttttgtggcagtcattgagtgaccaagactgttttccttggccgtcaagtgtaccggaaccggagatagaaagattgttgatgtacctaaagttgatccatgtgtcttgcttaatatcactaggatttgcaggagctaataaagttccatcgatgatgaattcaataggatttttgcatggacccacaaactctacaccaccgaggtaaaatgttccttttggtacatagattttactacttccacttatccttttgcaagcacggctccatatactcgtgaatgcctaatttcatatgcgttaagaatgacactggttaattactaaacaaaagaaataaacaaatatcagaaaaattgtatttatgtttcctgtttgtatattggtgatcatatatgtttataggtgtgtgaataatattcaaatgtttttatttttaaacttattggtggtaaaaaaaaaaataggaaaatatttgtttacatacattggcgttatcagtttttccgtctggtttagcaccatggcgttggacgttgaaaacttttggtctgacggtggagcgacttgcaacaacaatgaaaaagagacagaagcacaaagccttaaacgcaaaggaaatgcatgccat

SEQ ID NO: 159403 - DNA, 116 bp, Arabidopsis thaliana landsberg
gaaaaaaacaaagaaaaaaaaaaaataaaagacaaaaaaaaacaccataaaacaaaatgcaaaaaaaaaaaaaaaaaaaaacaaaatgaaaaaaaaagaaaatatgaaaaatgaag

SEQ ID NO: 159404 - DNA, 405 bp, Arabidopsis thaliana landsberg
ctgaatcaaatatgattattgaatcagatatgatttaattggttcaaacactgcgagggatttgctaggcgctctagcagttccctcgcaatatatgatgcattttgattggtttaaaggacggttcctcgcaatttcctagcaaggtttgcgagggatttgcgaggatatatattcttatatatactcgataacctagtttgagcggagctcaaacctgccgcatcaaaccctaaacctaattttttttcttcgattctcttcttctccgatctgttttcctcgtcgccggcttctcttcttctccgatctattttcttcgccgccgcctctcttcttcttcgatctgattacgtcgccgcctcttattctccagcagccgccgcaactcttcttctccaggtt

SEQ ID NO: 159405 - DNA, 176 bp, Arabidopsis thaliana landsberg
tactattggctctttaaacattgtcgtgatggagtcggacgtcggagattcgtcggaaattgtccggtaattggaagagttaaaagctcaagaagacagaaatagagcactttatttcgaccctcgaagctaagctccaggatacggtggcagttgaacggtacgacgacgtatac

SEQ ID NO: 159406 - DNA, 218 bp, Arabidopsis thaliana landsberg
ccaaaaagcaatagccaagagctttttttttcattttccttttgaaagccatggatcggttttcgttcttgaatgttataatggaggttgcgggtattctaaatgaatcccgcaaactcttcctcaagaacaaaaagttgatgttctcagtcttggtattccctctcttactcaattgtttagtttacttgttcaacgccattgccatcaaacccgag

SEQ ID NO: 159407 - DNA, 496 bp, Arabidopsis thaliana landsberg
acttgcttcgtgcttgtggtgttatatatgtcatttctgtgcgctatcaccattcatcctattatatcacatctgcttattccctctctgctctcgctaattgttgaatcttttcgtattagtttgtgccttgtggttgcatcttgcttataagaatgcatttcccttgaaaacgattcttggtttgttgtaagaactcatgttgacgctttgtccccagacctttaggatcacttggataactcccaactctgaacaatagatgcttgatgtggtggttagcgaatctgtagggctatttctaacttgaaaaatgagcttcttgggcaatcacttcctttgtttttcgatatatgagttcccgtttatgtttctcactgtcaatctttgatcgttgtctgaacttcaggaagttctccgcatcggctttatgaagcgtgctcgccagcaaaagggagttaaaagagaacaagcagtcaaggatcttgaggcaagt

SEQ ID NO: 159408 - DNA, 217 bp, Arabidopsis thaliana landsberg
tatgacgaaactgatttctcccaaaccctaacgattctgctccttctccttttctctctttttctcctttataaaacgaaaagtggctaaccaaagccctaatttcgagtttccttcttttataggcatactctagggtttccaattaacccaaccaattaaaccggatgatttaaaaacaaaccctaaccgattttccggttcacgggcataacag

SEQ ID NO: 159409 - DNA, 386 bp, Arabidopsis thaliana landsberg
atcacaatgcctaacttctttgaattccaaaccctttactagactaacacttttgtatccccctttagaactctaaactcttactctcttttttttcttttcttttcattctcattctcatttccattcaatccataaacaatccctaccctaaatacaagtctccacctagtcctagctaacccaaaaagcgtgggctaggtctacatgaaagattgctcttgtcggcccatacctaacacgttatcttgtcggctcatacctaacacgttataccaagctcaatcggaaaagacctcacaatcacacaaaaatgatctttggcttgaaataaggttagggtcagggtatgggaaactgctctaaaaatgagagtcagctacttg

SEQ ID NO: 159410 - DNA, 357 bp, Arabidopsis thaliana landsberg; identical to SEQ ID NO: 159340

SEQ ID NO: 159411 - DNA, 255 bp, Arabidopsis thaliana landsberg
attcaaagctttcttcttttgtacgctattccattaattcacattgaaactttcaaaattttcccttttctctggctttcgagtttttctcgattcctttctccattttattctttcccctcttcttcaacatctcaatataaaccctaattttgattctagtttctcaattggtgtgaattctcagaaattcagaaaaccctaatttcgtttttttctctgttcggtttcctttgattctccgatgaggattta

SEQ ID NO: 159412 - DNA, 346 bp, Arabidopsis thaliana landsberg
ccattcgacgaatcggagttccaaaagctcgctgacgagttctcaatagtaacctctccggcgcttatcgtgaaaaaccctatgttccagacttctcttacgctttccttgcaaaatctgcctcaattttggattgaagacaagagcttgaggctttttctccaatcttaattgaaactttggggtttttctcacggggattttgcgaattagggtttcggattggggattttgctacatcgaaaggactttggagattcagcgttgggcctcgtaattgaagaatgcagaattcatatacaccgctctggaattttactttttagggaatctctcgttttcttct

SEQ ID NO: 159413 - DNA, 501 bp, Arabidopsis thaliana landsberg
aaaataaaacccaactccatttatccatcaaatgtgtaaaacccatctgctacatttcaaagattcacaatctcacacatacttttttctttctgaaaccttcaaacgatttgttttgacaaaaaatagttgtcatttttgttggtcatgctcaaaagaaaaaaaacgcaaataagaggcatgacaacattaaatcccaattacaaattgtaaaaaagaaaaaaatatatattatttacactcgttcatctggtcggagccgttcgaaagaccgttcaccagcttcaatcgatgtcggaagattcttctgcgcatcttcggagaaagtaaaccgtacggaaccactccggaaagagaatgaaaaagacagcgaatgaagccgtcgattgttattattactcttacgtccgtacgggaaagcgcttttctcgctcccgacgctaccgcttctataaccgctccgtgaactcctcgcctgaggtagtaacgccacgtgtccca

SEQ ID NO: 159414 - DNA, 796 bp, Arabidopsis thaliana landsberg
ctctcactctctcaaagacactgaataaatccttaaaacaaacttttgaaagaaaaaaatggcttccaagaactcagcctctattgctcttttcttcgcccttaacatcatattcttcaccttaaccgctgcaacagattgtgttgcaacccaagtcctaagcacaagcctgtcccaagtcctaaacccaagccggtcccaagtcccaaacccaagccggtcccaagtccttcagtaccaagctcttcggtcccaagtcctaaccctaggccggtcacgcctccgagaacccctggctcatctggaaactgtcctatcgatgctctcagactcggtgtatgtgcgaacgttttaagcagtctactcaacattcaattgggtcagccatcagctcaaccatgttgctcgctcatccaaggtttggttgacctcgacgctgccatttgtctttgcactgcgcttagggctaacgttcttggtatcaaccttaacgtcccgatatctctcagtgttcttctcaacgtttgtaacagaaaggttccgtctggcttccaatgtgcttgaaggatatcagctatgcatacgacgcacacagtttactctttaaaataatcacagtttgaataattgcatgcatgtatgcaagttaagggttcaatgtttcaatcttttgtttaagtgtgaggcgttatctttttccgcgcatatatgtttttgttgtaacttttattgtttaaatgaaagacgtttcatagtccattttatttgttgtcaaaaaaagaaaaaaaaagcgtct

SEQ ID NO: 159415 - DNA, 126 bp, Arabidopsis thaliana landsberg
actcggttccctctttatggctatagattttgccttcgccatggaaactttacaacgcttttatatgtttcatcaatgccgtagctgtcttcatattttttctttgtaagagcttcaataattgtg

SEQ ID NO: 159416 - DNA, 264 bp, Arabidopsis thaliana landsberg
acgagaaagagagagagagaaagtgaatgagcgagacattctaaccaaactcttcgtaactacggcggcgactgaagcgttttcagattccgatgagtgagaagcttgtgttcagaagcactagtggtggtgactactacggtgcaccatatggagagtatatggagaagagacagttgtttctcagaagctaccagttttcaagaaaacagagtttcgctgagaaagtttcaagatctgttacgagagtgaaacgagttgtgt

SEQ ID NO: 159417 - DNA, 197 bp, Arabidopsis thaliana landsberg
ttaatcgaatcttctgttattatggacatggtatatagaatggatatggatcagtaaaaaggtttctgaatggatatatcttaatggacttgttattatggatacaaaactattgtttgttgatttttctttcagtttgcagagacctccacctccaagaccttatggacaagaaaatttggtatctttacaaacca

SEQ ID NO: 159418 - DNA, 125 bp, Arabidopsis thaliana landsberg
atccttgtgttgatcctatcctctgttcttcctcgatcagcgcaacgttctcaaaattacttcaaactccattttcatctcgattaacccctcttcctcaattttcctctcagaccaataatgct

SEQ ID NO: 159419 - DNA, 332 bp, Arabidopsis thaliana landsberg
aggaccaagctgtggaggaactggagacggagaaggccacggccgatgtgaccggagagagagaaggcgtcaaggcggagctccgagacccgattggtggcagggtcgcatgtgcaaccgacccagttgcagggatcgtagtcttccgagttccaagaagagagcttagagagagggtcgtcgagtccggccttgaaaacgatgagacccaaaacgtcgtcgttgaatgtcggatctgccctcgctgaaacgacggcaagaaagaggaagagtagtgaaacggcgccgttgaacatttcctctcgcttttaagatattaaggaggtaaaagg

SEQ ID NO: 159420 - DNA, 251 bp, Arabidopsis thaliana landsberg
aatgtatgttgttctgaaccagtaatttgggtaccccaaaaataagatgcaagatctcataaatcatacaagaatctcaatttctcttacaatacgaataattaacctggcttgctcagtttcgaagacaataattatgggtcttgcgattgggaacaaacaccatttattgggacggacgattctatagtgtgatcccaccgcatcagtcatatattactatgcatttggacatttttttactccaaggt

SEQ ID NO: 159421 - DNA, 99 bp, Arabidopsis thaliana landsberg
atctttctctcctctctctctgggatgttcttcgtcgtcccatatacgaattgtttccccagagagatagagaggaagagaaaagcaaaaggaaaatgg

SEQ ID NO: 159422 - DNA, 310 bp, Arabidopsis thaliana landsberg
tcatcttagattctcttatctacctttgtattttactatttacgaaggtgatgaattataacctttgccatcagattcatcacgaagatctgtctaaattagacaccaaaaacaagaagatattttttagtaaatatccaaagttagaaaaacaaagagtcttcacttatctcgtgtatatactacatagtagcattcgtctactttattcaaaatttccaaccgaggaaataacatttcttggttacaaacaaaaacggacgaaaatatttcttacattcacataaacattttcaaacctgcactaaaa

SEQ ID NO: 159423 - DNA, 546 bp, Arabidopsis thaliana landsberg
tgataggtgtcaaacatggtagagatcacttctccgattggtggctccatgaggctgcttcacttgcctaaatcttatccgattcactgcaacatggtttcagctagcaatacatttgggtcagctcatctcaagctgcaaaacaaagaaccgtgtgagtctacttgattttagttcgagcatcttatctagtagaagatctggttttggataagaccggtttctttagacttggttctgattagtgttctggtaacatttgaagcaggctcccgtttaaggccttgtcgagtcaaacgcgaagaaaataaccaaactgcggatgttgaaagcatttcaatggatgagaacacgttgaagcaagatctcgagactgcggtccaggaagagaattatgtggaggcagctaaaatccgtgataaactaaaagagcttcaagaagacaacaaagcctctgttttatcagccaattctcggttctaccaatctttcagaaacggggatttagctgcgatgcaatcactatggtcaaaatcaggaaacccg

SEQ ID NO: 159424 - DNA, 155 bp, Arabidopsis thaliana landsberg
  unsure (1)..(155): unsure at all n locations
ctctgtatgtgggaaagcagctctgtccatggatgaatctcttttcgaaacttctgggtgatatgctcaatgtgagtgaaattgttcttccaatagaatantattcgtccattgtgagaaaaagcagacgcgtctgtagttgatgtgacttaatt

SEQ ID NO: 159425 - DNA, 210 bp, Arabidopsis thaliana landsberg
ataaaaaaaatctaacattactctctcaacacatctctctttcctattcacgtctttctaccctttcaatttcagacttaagatttaaatctgctcaaatgcttgtaaacaaatttcaagttctttaaacgatttccttttcaagaaaaacccatctccttcttatgtcttaccacatagatcttcctgatccacaatggattcagtttc

SEQ ID NO: 159426 - DNA, 225 bp, Arabidopsis thaliana landsberg
tgacagacgaggagaagtatgttcagctgcttcaactgctgcgttaaagcttgaagatttcttcttgagcaaagtagcagcattattattgactcgcgatttgactgtcgaaatgtgttaatgtcatgacactttattatatgctccaatccatttttctttttctttgggaaccatttaagctctattacaaggaaaagatcatgggggaaattaagtatccac

SEQ ID NO: 159427 - DNA, 133 bp, Arabidopsis thaliana landsberg
cgaaccatcggttattaccttcacttaacacagcagaaaccctttcttcagtcttctcctgcgttctccttcttcacttcccaactaaatctcgccggacgatcgtaaccggagagcttccgtcgaccggtaa

SEQ ID NO: 159428 - DNA, 262 bp, Arabidopsis thaliana landsberg
acagaagcaaagttgtagttggaaccaagagttgttacattattctcacaagagttatctctctctcttctctttgcttgaagaatattataaaacaatttttgaaaagctttctattaaattaagaaaccttacttcccaaacaaagatgtcctcaagtcaaaacacaaacgaatgtttttgtagacagtgttgatcaccatttcatggtccctggttcaccaaccaactggtttgagtggatcttgtcagcttgcttcat

SEQ ID NO: 159429 - DNA, 358 bp, Arabidopsis thaliana landsberg
tgtgtaatattatatgagtaacatttgcaggtatgcctatctaataaaaaatttaagaaaagagtaaatcgtggtgtgtgatgatgatgcacgaccacagtattcttatgccacttacaacttttgtaatagctgaacataaaagagctagcgttgtggatagatagatgaaaattaatctatacaatcgattaattaacattgccaatattcaaccactagatcattactctgttacttgctagtagcttaatttatcattatgatgaagatcttatatgtgctaatgccactgttcactgttgcgcaactaattaatgttctagtttttttttccgcaattaactaatgatcaact

SEQ ID NO: 159430 - DNA, 283 bp, Arabidopsis thaliana landsberg
tcaaaacaactttactaagaaccaatgagcattatttctttctcgttcgtaaacaagtttgaagttattatttgagttttgtaccaagctcccagacaccttaagaacaaatagaaacagaagaggacaaactccgagaaaaatagcttgaaaacaaacatgcatccatccagacagcataacacatcttctttctgcaacaaacaaaaacatacaagtctcatttcctataggaagctacgatagttatgcttaaatgaagctgaaactgtagaaaactagg

SEQ ID NO: 159431 - DNA, 603 bp, Arabidopsis thaliana landsberg
cagatgaaacgatcttaaagggttgtttcgttcatcttctagacttctttttcgaggccttagaggaagaagggccagctgcattggctttagaaatggccgcttgttttgacttagaggttgaaggagcttcttcttgtttaaccttcgtcaaggcaccttgcgagccacggatttgagctgctcgcttgtcctttctcttgggtctgtaacttgacctttcccttctgggaagccacctctcagggtccggagttggacctgagttttccggatcgaatcctttgggatactttggctttctcttcctcttcaccttctctttcttcacttcttcctgactcaatgaagcagcagaaatgccttcaatgggttttgcaccagaggtcttttctaggttatccacatcaacagccttcaaacctggtaggggcttaagctgtttctcgtaagcttctgctttctcaacattgacacgagcaagagtagtcacaagaccaaccaaagcatctgtgctattatggtttttcacaatctcctcgtatagccgtgaagcctcctcttcttgaccatgcctgagcttgaaggcagcagccaccggca

SEQ ID NO: 159432 - DNA, 454 bp, Arabidopsis thaliana landsberg
taaatctgaaccgttatcgatacggcaaaaatacaaccccaaatctatccatctctctctctatctatcttttttttcctcggcaatggcggaagctaaacccagaaatctgagaatcgtgatgttccctttcatgggacaaggccatatcatcccgtttgtagctttagcccttcgtttagagaagattatgattatgaacagagccaacaaagccaccatctctatgatcaatactccttcgaacatccccaagatacgctccaatcttccacctgaatcctccataagtctcatagagttacctttcaacagctctgatcatggccttcctcacgacggcgagaatttcgattctcttccttactctctcgtcatcagccttcttgaagcttataggtcgcttcgtgagccctttcgacacttccccacgaagatcttgaaggaagaaggg

SEQ ID NO: 159433 - DNA, 406 bp, Arabidopsis thaliana landsberg
  unsure (1)..(406): unsure at all n locations
ctcaagctccgccgtcggggaaaaaaggtgaaacctttatacattctccgatttcatttgtctttgcattgattgtttatgcagaatttggatttgtttattccttaaaactctttcttttactattattactcacgaagtttcttcaaaagtgtcatctgcaattagtttaattctcagaaaggaaatggttccattgatgatatttggcgttgaagatgagtaatagattttgctgaattcatgtactgtgcatttgcagaatatggaagcagctactgttcagannnnnnnnnnnnnnnnnnngaatgatttgagaaattttgaagggaagcctcgtggttctctgaggtataatacacagcgaattaaggaagataaaaggtttagagttgttgctttaact

SEQ ID NO: 159434 - DNA, 854 bp, Arabidopsis thaliana landsberg
  unsure (1)..(854): unsure at all n locations
gatgatgatacaaactatcacatggatgtgatagcaggactagccaacatgagggcgagaaattacagcatccctgaagtggacaagctgaaagcaaagttcatnnnnnnnnnnnnnnnnnnnnnnnnnnnnnnnnnnnnnnncatggctactgggctggtctgcctcgagctgtacaaggtccttgatggaggacataaagtggaagcttacagaaacacatttgccaacctggcacttccactattctccatggctgaaccacttccaccaaaggtggtgaagcaccgtgacatggcttggacagtttgggacagatgggttctcaagggaaacccaactcttcgtgaggtgttgcagtggctggaggacaaagggcttagcgcatacagcatctcttgtggaagctgtcttctgttcaacagtatgttcacaaggcacaaggagaggatggacaagaaggttgtggatctcgctcgggatgttgcgaaagtcgagttaccgccttatcgcaaccatcttgatgtagtggtggcttgtgaggatgaagatgacaatgacgtcgatattcctctcgtctctatctacttcaggtgaaaagtttcgagagaatgaagaaagatgaaactcttgagagcaaatttgtgtgttttgtctctgcatctgccctacgttattatcttttggatgcttgtgggtgagatgactgatttttacttgagggggatagagacccattttatctctctcgttctattttagtctttctttctatgtacaattgctgaatgtgtggtttacacacccgttaccttctaaacatgttctatcaaacaaatcttcgagtttttcgg

SEQ ID NO: 159435 - DNA, 471 bp, Arabidopsis thaliana landsberg
tcgaaaacctagcagccgctgagctctatctactcaacttcaccatggacaggaggctcaagaaatgctcgacatccaccgatgtaattcttcttcttcttattatggtttttgtattcgttcttcttctttactctctagtaactttgttattgtttcggatttttaggttgaatcagttcatgatgttagtaaggtcacggatcctttgcagaaaggtatgcatttggctttttttttttgtattatttgtttgtgaagaacgattttaaaatatcttgaatctgcttttttttctattgggtaacaaaagctaagagagagttggataatgtggaaatcaaagaaaaacagaagaagcagaagaaccaaaatgaaacatctgagaaggtctcctgttccgtactacgtttaagctgagatatttaattaaaattaaaacaaactcaagtggttggttttttttcttgt

SEQ ID NO: 159436 - DNA, 364 bp, Arabidopsis thaliana landsberg
taagaagcctaataatactatttctagaaaataatcacaaattaagaacatggttcatctatatgtacatacatgattcttctcaaaattctatttgatatagaaaaggaacccataataataaaatatgagaaagacagagataattaaacacgttttgctttcattcactatgagaacagccaaaaatctaggaaccagattccaatttttggttcctttttcctacttccacacagaacccgctttgtcaatcagcggatttcgatcttcaagactatttaacattcccttcattaggcagaggtacaagatatgtaaaatacacgcatttgtaaatatttgtaactaaccagtgatgatt

SEQ ID NO: 159437 - DNA, 221 bp, Arabidopsis thaliana landsberg
acacactgtggggattctatcactctctaagggtgcctgatgtaaacagctcattaatgaagttttttgttctgcggttgacatcgatccaagacgtgcagtaacgaataatggattcgtgattgagattcttgaggagatgaacctcagagtagaggcgttgtaaaggctcaggtgatcggaaaacctcattgagcttaacttgattccaagcaacttcc

SEQ ID NO: 159438 - DNA, 131 bp, Arabidopsis thaliana landsberg
agagttagttattgatatcacaactaggcagaagaagggttctcaaaagtggctattctttgacaatcaacggactcatttctacacaacttcgggtgaattgcaatgcaacggagagctctttcatggaa

SEQ ID NO: 159439 - DNA, 287 bp, Arabidopsis thaliana landsberg
acatgtggatctggacacagggtttttgagtgttccacgtactccgttctggggtggattcaataaacccaaattctgcggtcattcgttaatcaaacttttctgcgagggtgatcaaaacctaaccctagcgatcgggaacatcactcttcgcgttgtttctgcgaatctggaggatcataaaatttccgttgccgatgatagtttactagacggaggttgcctaaacatttggaacttcaacgggaagaatcagttcacattagactccaacaccgagatgatcg

SEQ ID NO: 159440 - DNA, 343 bp, Arabidopsis thaliana landsberg
aattcaccgctagttacagggattctctgaacctggtcttccttttttgcttgagtaatgttagataaaaagctgggaggcctcttatatacttggagtttatggcataagaaaagatcatctggtaagttctttgtctcaatttgtttactcgtagcttattgtacactattcatattaaaatggttatgttttgtgatatggaacagtggcaaggagtggtgtatcctcttctattgacctcgctcgtttatgctgggtctttggtgttgaagttgttatttctcctggaatcatggaaggaaaatggcggaggatgtagttcctttaattacatcagaag

SEQ ID NO: 159441 - DNA, 363 bp, Arabidopsis thaliana landsberg
agaaagaacaggtaggctcatagaagggctctggtttagataataggtgaactaatcaaactggataataatgcatgctttagtatagggtttatcggcttctccggttatcttagctctaagtataaagagttttgcggaacaccaccatttactctaaaatcattgtttgagttcaagagcagtgcgataacaatcataatattagctagatctacaatttatctatctcccgagacatttccttagacccgacgctttaatcacttgaatctacaactagtttacttgcttatttgacatttacattcatttactttgtctaacttatttaaaaacatcataagtctattgtgtgaacat

SEQ ID NO: 159442 - DNA, 96 bp, Arabidopsis thaliana landsberg
  unsure (1)..(96): unsure at all n locations
acagaatcctcacngtgtcatcagaggccctgtgttaactgcacgaccccggggatgtgatttatttatcagagtacaagaaatgcccagcaccct

SEQ ID NO: 159443 - DNA, 105 bp, Arabidopsis thaliana landsberg
tctgtggcgttgaatctgcgatggcgggaatcagattgctaccggaagaacctgagacgactcctcaacaacaagccagagccgccgccgcggtgacaacgacaa

SEQ ID NO: 159444 - DNA, 349 bp, Arabidopsis thaliana landsberg
ttttatccgtaacaactaattcctcgatatacatacttgtactttaatcatctaaaatgacagaagagagctaattatttataaacttacaaaataaaaattgttcttctttgaacgacgaacaatccaagaaacagagaagaagaagaagaagagatttacagtaatttcttgtaaataagttttgagataaagagacagagaattacacagttaacaaaaatataatttaagaaggaagaaccttcttgacaatgtcttcactaagagcagcaatctgagaatccaaagctttaatggtttcttctttctgactctccaagctcgccaaagcttcttttagctcttc

SEQ ID NO: 159445 - DNA, 199 bp, Arabidopsis thaliana landsberg
atattagattagctttattgattgattataataaaagtcaaaacaacttattaacaaaggtaaattccgttccattacgtgatacaatttcatgggcaaaaactctcttccccactatacactactatataccaccacttctctcattaaccactttcaccaagcctaaatacgggttgttaataaaaccactcaatct

SEQ ID NO: 159446 - DNA, 117 bp, Arabidopsis thaliana landsberg
catacccgggatttttggtggtgagccgttatcaccataaccaagcttggatgggattttcaactttctcttctcacctacacaagctcccaataaaccctggtcccatcctgcaac

SEQ ID NO: 159447 - DNA, 259 bp, Arabidopsis thaliana landsberg
taatactagattttcacccgcggtataccgtagggacaatttatattttaaaattagtatatataaaagtttgtaatttgtaatttgtaacaatttatgtaactatctataaaatatttttattttatagtttagaattgttattaagtaacgtcctgccaaactcgtcccgccaacccatcccgtaaaaaaaactcatttattttattaatgttgatcttctttatcatatgtttatgaatcattgtctaaatatttt

SEQ ID NO: 159448 - DNA, 378 bp, Arabidopsis thaliana landsberg
agcttaaaaccaaactttgatgaaaagatttgattgatacgaaaatcaaagacaagcaacaaagccgaatattaaaatagtgaagaaataaatactccatatgacttaaacttaaaaatggtcaagaagagagagatatgttcgtagctgggagagagaggagagaacaacaactaagaaaatttaagaaatgtaaatcgctgatagacgacgggtcaaaatcagatcaaagagtgccttgcaaaacaagaaaacctttcttctccggtgatactagtacggcagagcaaacacagcaacagaagcggacttcttttctcccttcacagcagatcggccacgttcgaaggcagctcttcgacaaccacattgtagaat

SEQ ID NO: 159449 - DNA, 346 bp, Arabidopsis thaliana landsberg
cagcagatttcaccaaccaaacctaatccgctttctcttcttcctccgagtctcctgtaagcacaatcaaggaacgaacatctgtgtttagtttctttaatccaaatctttggtgactttatagattccctaattgacttgtgtttgaaaatggttagtttcaggcaaagacatcatcgattggtatgagtagaggaatgagatggtgggagaagtcaccggatcacaacatgttagagattcaatctgctaatcatagtgttcactctttgttaaccgctggagataaaaaagttgatacaggtttctactctccaggctgtggtggctgcgaatctcggcgccc

SEQ ID NO: 159450 - DNA, 295 bp, Arabidopsis thaliana landsberg
atgtaaaattaacttacgagattacggcatatatagaaaatatattttcaacaatgtttggtttctaaatatttttgtggatttctttttttattaattattagtcctaggcgtttgggtattcggatcgggtattttgggttcgggttttcgcgtttagaagtttaggacccgttcgggtaatttaagattttgggtcgggttcggtttggatttgggttcgggttcgagtcccctatatattgaaatatcaaattttgtgtgcaaatctattaaattacttgaaaatttcaaa

SEQ ID NO: 159451 - DNA, 123 bp, Arabidopsis thaliana landsberg
aaagaaagccaaagaaaacatgaaaataatagtctccatcttagtgatagcctaacttcttctaatcagttcatctcttgcttcggctactatatcaggttggttctaatctcatcaagaatc

SEQ ID NO: 159452 - DNA, 261 bp, Arabidopsis thaliana landsberg
gttgaaatatataccctaaattagaaatagagaacccaaatatattattttaattttttttttaatttattttggttgaatagatttatataaaattatggtattattattgtccatcaaacttgttttagtgttacttttaggaatttctcaaataattatttgagtactatttatgtctaaaaaactttttaatgctatttatatccaaaaaacttaaaagtatgctatttgtgggaatttctctttaaagatttgctt

SEQ ID NO: 159453 - DNA, 573 bp, Arabidopsis thaliana landsberg
  unsure (1)..(573): unsure at all n locations
ttcagatggagctggtgcatctatctctaatggacctctcaagcaatctgctgaatctacctcaaatgaaacccataccaaagatgtatataatttatcattttcgaatacagcaatggatgatggaagcaaagaaagaagtagacaagatgatggtcaggaatcagtgggcaaagttgatttttctaatagcttagagttgataggttcatcgaaggacttaacagtgaatactaggcctgaagttgtaccttannnnnnnnnnnnnnnnnnnnnnnnnnnnnnntttgatcgtgcttctactctaagagaaactgcatctcttttttctggaacctcaatgcaaatggatggtttcattcacggcagtggattaacctcatccagaaaaggtacgtggctatcatatgaggttaatgtagtaatgtattttgtcctaaccctccttcttttttgttccttaaaggcaacaacctaatttatcattacggtttttgttgctagactctctacaacctactaccaggatggcagggtcttttgacgaagttgccaaaaaccaacagggaagtg

SEQ ID NO: 159454 - DNA, 124 bp, Arabidopsis thaliana landsberg
ctccggcattggagtggtgtggattccgattagcgtgacagaggtggccctttcttagagacgagaggcttctcttccgattcttcctggttatggacgtcggcggagatcggtggagtctttc

SEQ ID NO: 159455 - DNA, 365 bp, Arabidopsis thaliana landsberg
ttgctggcgctctcgggctggctcgcaatatatgctgcgttttgattggtttaaaagattgtgcttctcaatttcctagcaaggcttgcgagggaggggcgaggaaataaattcttatatatacacgataacctagtttgagcgaaactcaaacctaccgcatcaaaccctaaccctaattcttttcttcgattctcttcttctccgatatgttttcctcgtcgccggcttctcttcttctccgatctattttcttcgtcgccgcctctcttctttttcgatctgattacgtcaccgcctctcttcttcttctccgccgggtctcatattctccagcagccgccgtaactcttcttctccagctt

SEQ ID NO: 159456 - DNA, 553 bp, Arabidopsis thaliana landsberg
gcaggaggtacagggcatatcattagagggatgtttaaatgcagtaatgcttacactaatcaggtttataatcatcaacctcattagagttcttattatttgttaatttcaaattctgaatcttgggttttgttaaataggttcataaaggaggtgaaattatgattacgaaggctgagaaaaagaatggtgcctcgtcaaaaagaaatgcaaccacaaacaagaatcaaatcaacaagaaccttcaacggtataacaattgatgatcttttaaatccgattttaactggttactaggcttagaaacatagttacctaactaataaaaccgatatggaagtgatcactttggtatggttttggtttgattttttttttttattttttccgctctgttggatttggttttaatttttggtcggtgtaagaaatattaaaactcaactttggtttatggactaaattttttttgttcgatagttggtatataatgaactcaagatacagcattcctagttctttgacatttttaatcttaaaaccatagtctttt

SEQ ID NO: 159457 - DNA, 107 bp, Arabidopsis thaliana landsberg
gcgtgtctattgctggttgaaaactatttccaaaccccctcctaggcctaagcttgtctagggccttcgagaatttctggaaggtccccttcggagtaacgctggac

SEQ ID NO: 159458 - DNA, 197 bp, Arabidopsis thaliana landsberg
aaagtaacgattttgtttcaagactaatctctatggggatgaaattttctcacctttctactttgcatactttttagctagtctctaacatattttcacaatgtacatactgtatatagctctaacgtgggaactcgaagaatgggtaccccctgtagagaagtgtatattcaagttcaattcaaaagaagacctta

SEQ ID NO: 159459 - DNA, 375 bp, Arabidopsis thaliana landsberg
aaagttgaaacagcaaccaaaggttcataagaaaataagagaaaacagaaaatgaaacttcagaacatcgataaggataagtttttcccgcagaccgaagcagaaaccaaaccaggtgaagatctcacctcccaagtgcatgagactcgaacaaccacttttgatcacatcacaaaagctcagaagcttccaccacgaagacgaagaaccaagtgaagagtcgactccttctggatgttgtaatctgcaagagtccgaccatcctcaagctgcttcccagcgaagatgagtctctgttggtccggtgggatcccttccttgtcctgaatcttagccttgacattatcaattgtgtctgagctctcaacctcaaga

SEQ ID NO: 159460 - DNA, 217 bp, Arabidopsis thaliana landsberg
ttttttttttttttttctggtttttttttgtgtttgtgtgtttttttttttttttgtgtttcttttttttcgttttttgtttttttttggtgttttctttttttttttttttttttttttcgttgttgtttttttgtgtctttttttttttttttctttctttttgtttttgtgttttttttttttttttttcttttttttttttttttttttttct

SEQ ID NO: 159461 - DNA, 247 bp, Arabidopsis thaliana landsberg
gtgtgatgttgtgtgcttaaacttgttttgtgtgtttctgtttcttataacatcctcctttctcaatataacaagagttacatgaccatacattatattgcaaatgtgatttatcaactattgctatgataacaaataattgtaaaactaaacgtaactaaaatgctttggtcctggtcttaacgaatatatgtgcctaggcccaaaacctcttagttgtttaaataaaaaacaaaaacgaaactaa

SEQ ID NO: 159462 - DNA, 290 bp, Arabidopsis thaliana landsberg
gagaagggaaaacacagagtaacattttttttctgaagtaacaaataaaaatgccccaagacacaaagcaaaacgtcaaggggaaagataataaagagagggaggttgcttcactctaaagtttttaacccaactttgccttaagggaagcaacaggaagcttagaaagaaccttctcatcaaacaccatgtaatgtttcttcagctccttcaacgtcttctctgccactggatctaccttgtcctcatgtttctcatacaacattggtactgtatgtaacaccacaagg

SEQ ID NO: 159463 - DNA, 327 bp, Arabidopsis thaliana landsberg
gggtggaattggatgtgaaggtttgattgagataaagctcgatcattatagccataataggaagatgatgagtaaaacagagattgattttcatgcagaggaagatggtttgatcgagatcgatctttttccatgaagaagaagaagatgatgattctcatttctctttgtgcttccgattagaaagaaagaaaaagaagcaacagttaatggttgttcattttttcctatacgaatatcatttgtgtaaatatattatacgagggtaattcaattttcaacttctacaaaaggattaattaatctccgattttaacatgaactgga

SEQ ID NO: 159464 - DNA, 112 bp, Arabidopsis thaliana landsberg
gaacgcaacttcttgtaatgttgaagtctactataacaaagctgtgaactatacactgatggtcacttttgtatcctttactgaaaagtcgtttactctttcataatagaat

SEQ ID NO: 159465 - DNA, 157 bp, Arabidopsis thaliana landsberg
tcttctcatggtaacgctcgtgtctattgtaatgttttatatttttcgtccaattttctcccaagaaattgatcgatattcacaggaggtgccaaaagatgtggccatatctccatcttcagagtttgatatttacgtcgaagctcccggtgaagct

SEQ ID NO: 159466 - DNA, 87 bp, Arabidopsis thaliana landsberg
gggtatcatgtgatcaaaataaggagacacatgacaacactgatattgttaataatgctgcaaaatgctttcaagtggcttgagtta

SEQ ID NO: 159467 - DNA, 85 bp, Arabidopsis thaliana landsberg
aacgatacctttctcagattgaaatcgaaagcacggatctttcttcatacctcaaacctgcaggatccattcatgatgtggagat

SEQ ID NO: 159468 - DNA, 148 bp, Arabidopsis thaliana landsberg
gactaattacataatcgagttcatggaattaataatatgaatcttgttagtgaaaaggcgtattcaaaagcttgttttgtttgtttgttttttcttcttcctacctttcatatgtatgcagagataaccaatcgtgccacgtaaaaac

SEQ ID NO: 159469 - DNA, 120 bp, Arabidopsis thaliana landsberg
atcacatgttgggtgatgaactcagcaaaccagagtgttccacttctgctgacacataaaaaaatagaccgttaagagcatgtttatacttttatgctatgaatcttgattctatatgga

SEQ ID NO: 159470 - DNA, 77 bp, Arabidopsis thaliana landsberg
tggcagttttggggctggatgcatcataagttccgggagaatagcaaagagccattaaaagatgcttctactggtaa

SEQ ID NO: 159471 - DNA, 199 bp, Arabidopsis thaliana landsberg
cgatgatatataccaaatcacaaaaacatctatatatctagagctatatagctaaaaacaatttattgccaaatgatcaaatgaatttcatgtgtcccacttttgttctgcctaaatttagaaatttattgtttttttttctacgcgagcctaactcgttttactcttctgaaatctaaactcttcgaatttaattgac

SEQ ID NO: 159472 - DNA, 368 bp, Arabidopsis thaliana landsberg
atcacaatgcctaacttctttgaattccaaaccctttactagacttaatacttttgtatcccccttagaactctaaactctcactctctctcttttttttttcttttttttttcattctcactctcattcccattcattccatacacaatcccaatcccaaaaatacaagtctccacctagtcttagctaacccaaaaagcgtgggctacgtctacatgaaagagtgctcttgtcggctcatacctaacacgttataccaagctcaattgaaaaagacctcacaatcacacacaaatgatctttggcttgaaataaggctacgctaagggtatggaaaactgctctaaagatgagagacaactacttg

SEQ ID NO: 159473 - DNA, 281 bp, Arabidopsis thaliana landsberg
taaatgccagtaatcataaatatgaaagtttgcgaactctatctatttgattgccatatcaccacaaaagaaaatgaaacgtctcattctacattagttaacaaaaagtttagcataactaattgagggaaaatgaaaagtcttctattgtgttaaatcttccattgatatcactttttactacctttttaaaactttaaagattacaaaatcatgctaaagtatcaaacactattttacaacttatcatatgacattttctcttttcatatttgtgtcta

SEQ ID NO: 159474 - DNA, 728 bp, Arabidopsis thaliana landsberg
atcgtggatctacgcatctggaaatcttctgaatcgaatcgtctcaagtatcgaagaagagaaattcgaaaaagcttcaaacgatgtttacttgctggagaagatctggaaaattttagcggagattgaagatcttcatatgttgatggatccggaagattttttgaaattgaagaaacagttacagatcaaatcgacgggtaaaaacgatgcgttttgtttcagatctaaaggattagtggagatgatgaagatgtcgaaagatctgagacagaaagtaccggcggtcttggcggttgaggtagatccaaccggaggaccgagattacaagaggcggcgatgaagctttacgcgaggaagacagagtgcgataagattcatttgcttcaggggatgcaagcggtggaagcggcggcgaagagtttcttctttgggtataggcagttagtggcggctatgatgggaagtgcggagatgaacgcgacggcgagtcaagagtcgtgtgactcactgagtcagatatttatggagccgacgtattcccgagccttgacgcggcaaagacgtttctgggagagttttggagtcatttgggatgattaattttaattctgctggtaaattatttaatataatctaattggtggtttggttaattactttgtagatagtgaattttggacatttgcgatcatattgatacaatcattttatatgattagagatt

SEQ ID NO: 159475 - DNA, 252 bp, Arabidopsis thaliana landsberg
gaacataccagattgagaaattgaccaacaaggtttaagttcatgactatcttccatccaaggccctttagtcccaacctcaaaggctctaacaagtccatcttcaacagctacttttgatccatggaattcaatatcatgtgcatctccttgaactttctcctgtaaaaacacaacaataaagaacttaagaggagcatttcgattttagctgccaatagatacataaaggtcgaagctttcacaaacaat

SEQ ID NO: 159476 - DNA, 165 bp, Arabidopsis thaliana landsberg
aagtcctttcggagtttagtaataaaagacgtttcaagtaaacataagtagaaactctcttgagacaatcatgtcaacatctctaaactaatggtcaggatcatctttgcctaaagaataagataagaagcttagagatgaaaccatctagtctccttcaaaacc

SEQ ID NO: 159477 - DNA, 396 bp, Arabidopsis thaliana landsberg
tgattcagaatagcacgtgaaatattatatttaaaatatccagctaacagtgatctacgcaaattaggatgaattccagagaaaaagtggtcataaaataaaataaaataaaatacaaaaacccaaattaagttagtagcactaattaatcatgctacatacatagtcaaagttcgtagtaagtagacttagaaatagttaccgttagaggtattacgattaggacaagcgttagcaaaatgtgaaggatcgccacatgagaagcaccttataccactcactggctctccagttgcagagacaaagcttgttccagagccgcgtcgtcctccactgctttggccgcctctacctccacggccacgaccacggctgccacgtctaccgctcccgccg

SEQ ID NO: 159478 - DNA, 800 bp, Arabidopsis thaliana landsberg
agtcgttgaagtaagctggaacggtaacaacggcgttcttgattgtgacaccaaggtaagcctcagcaatctcacgcatcttaataagaaccatggaagaaatctcctcagctgcaaactctttctcttcacccttgtattcgacgtagatcattggcttatcggcaggtccggcttgaatcttgaatggccacaatttcatgtcactctgaacagagctgtcagagaaacgacgaccgatcaacctcttagcgtctgcaacagccaaataaaaaacggatttagtaataaatcaagcaataaagatctgaagcataatcaacaaaaatagcaataaatatctaacaaacttacaaattccaaaaaccaacagatagtactagtccgagcaagaaattactaaaataagcatagttgaatcaatataaacaggatctaaccaataagatctatagatgaaacactaaatccaatatatacgattgttatccagatctaactagatctaactacatcacgactacgatgaacgagatctagatttcaagtataagagagctaagaaaacgagacacgtaccgaaaacggtgttaacggggttcatggcgacctgattcttagctgcgtcaccgatcaacctctcggagtcggtgaaagcaacgtaagatggcgtggttctgtttccttgatcattagcaatgatctcaacacggtcgtgttgccatactccgacgcaagagtaagtggtaccaagatcgataccgatagctggtccttctcctttacccgacatttttatc

SEQ ID NO: 159479 - DNA, 314 bp, Arabidopsis thaliana landsberg
ctaaaatgccggaaaatataaaaacaaaaacagatttaagatcatccagaccatgacactcggactgttgtgctttattcattaaccaatgagtaatttattctcttccaagaagctgtaggtcggtacttccaggttgtatggtgcaggacctttcctaattcttccagagatatcgtaatgtgatccgtgacacggacaaaaccaaccaccataatcaccagcattaggcaaggggatgcaccccaaatgagtgcatactccaaccacgatcaaccattctggattcttgactctaaccgagtcttcttgtg

SEQ ID NO: 159480 - DNA, 440 bp, Arabidopsis thaliana landsberg
aaatcaaatcctccattgtcgacactatcaagagaattaaaaccgtacccagttgtttggttctgaccaggataaacatcggaagacgattcgaaatccgacggtttgaatctgatcgggaaagccagggagatttgaatcgacggcgtaaagaggcaaaatagtagaatctgttgtggttgtggtgaaaccggttttaagtgagttaggagcagaatcgtcatcaagctccaattctttcatgatggaatcccaatccattgaacgcatgacatgttcgtccattgataagtgattactatcagtactattagtgttgttgttgttgttggtcgtgtcttgaggagatgatgcagggattttcatgtgttgtgtgttaagaagaaagaaaggtggagcctttaacgaaaagaaaaaaagtttttttctttctgtctttt

SEQ ID NO: 159481 - DNA, 199 bp, Arabidopsis thaliana landsberg
caaaaaacaatatgttggaaaaacaaatagctgttctatgttttcctgaagctttcaatggttggtgataatgtgtggagtgttgtagggctcttatgtcttatgcttctttgaacaccacgtgtgtgtcttctggtgttattagcgactgcttgcctaaaagttaacgtctctgaaacaaaaatctaccttatcttga

SEQ ID NO: 159482 - DNA, 397 bp, Arabidopsis thaliana landsberg
ccacatggatgcagtggtgctcgtcggacaggtctaaaaacctatttccgaagaaataattcacatctttacttaagtaagctaaaacttacacttaaagatttaaagccgacccagattcgcaccaaataagctgatagtaaggcagaacaatataagccgagtccgctcgcacgttctcgctgacctagaggcatccgcagggtaagccggacaccagcgccgcacctacaaagtacgacgagtcagtctcgcatacttcatacgtaagccttgtgattcgagttcaacgtatacaggataagtcaagggacgccttgccccataatacgtttcgaaatcaagcttaaacgccaaggaaaacctcgcaaaatataagccgaggataaccttgcac

SEQ ID NO: 159483 - DNA, 136 bp, Arabidopsis thaliana landsberg
gagtgcggcggcttgcggcggcttgcggcggaagttgctatgcggctcggcgggtttcgtcgcgcgacttgttggttaacggcggatcttgttcggatcttgtatggcttattgtgactcaaggcttattagggtt

SEQ ID NO: 159484 - DNA, 457 bp, Arabidopsis thaliana landsberg
aaataaagaaactatacattaaagtgttggtgtgttgtgttaatttgacttcttttttctctagttagcaaaccattgagcagtttttctagcgatcggcagccacaaacgccgtcttctctcctccgtctcattcccaccgttttgtaacgcagacgcagtctctgcggctgaaccgctgcaatctccatgaatcgatatactgagtctaggaaccgcagtgatgtcagacaccgatcttcgtcctggttcgatcataacgcttcttgatttcgaaccagagtctccgttttccgaggaaaacatagttgtcatcgaagttaacttgttctccaacattctcttcgcttccatctcttccttgattcgcaagatacctatctgatcctcttcatctcctctcttcacacgatccaatgaagaaaatctctcgctagaaatcgaattaaccatctcg

SEQ ID NO: 159485 - DNA, 259 bp, Arabidopsis thaliana landsberg
ataaaaatcaatcagaacgaagattgactctagatctcacgagtcaagatcgatggggttgggtgtggccatatctctgcctctaattttcttctgtctacttattggatttggctgctacttcctaggaaaatctcgcggacggcgagagatccgtccaaatcctcaggagtgtggagcttctgctgcgtctcctggggctattgacggctcctatccggcggtgtctcctcacgccaagcccggcaattctcacaac

SEQ ID NO: 159486 - DNA, 142 bp, Arabidopsis thaliana landsberg
attatttcaaactcaaaacatcaaagtttgacatagtgcttgaaactatcaagtccaacagcgaaataaggaaaatacatacatatagttcacaatgccccatcatttagcaatatttcgtcgatgcatagcatatgatttt

SEQ ID NO: 159487 - DNA, 456 bp, Arabidopsis thaliana landsberg
taccatacggcaaacaccatctaaaaaactgaatgaatcaatccaagttctcaaaagatatgataggaagcttccatatctcgaaacctatgcagtaacaattacttgctcatgactgaaaaaagttgattgcattttttaaaataatccgtactgaaaaagtaaacatgttttggcatctcaacctctattgttaagactctatgttttgttgttgaaggaattcaagatccttcatctgcatttgaatagcttctttaggcaaccgtttcgccataacattctcttcctctcctccttcctcaacccttgtcgccttctctttgatgattctctctatctcagacttctcaaccgatgggaaaaccgctattaacatcactttaagaagcttctcatcctcctcttcaataagtcctctccgaaagcaacaagcataaataccttcaagagcct

SEQ ID NO: 159488 - DNA, 322 bp, Arabidopsis thaliana landsberg
gtgatggattcgacgcctgttggaagggattttttctctaaatgacatgaatttaacttcatgtagatctcatctctaaaaaatataggacattcgaacttaaattttcagatattcaaaaaaaaaataatagaaaaaagaggaacaaacaaaattaacgacaaatggtgatgtcatgactttggtcctgtttgtttacatgtcgatagcgacagaaatcagcgaccgggaccaaaagttgttcggttacttgtcgctagaattaagtgtatgtgatcacttttctgcaaatcaaggttaagcttttatgactaaatcacac

SEQ ID NO: 159489 - DNA, 144 bp, Arabidopsis thaliana landsberg
caagacattgaaaaagaatcttctcaaaagaagatgtgttgttgtaaaataagcgagtgtatttttatgtagcgttaattattttttactagaatatgtatcattcagcttgacaagattatatgtaatgtagctttatgtgat

SEQ ID NO: 159490 - DNA, 416 bp, Arabidopsis thaliana landsberg
agaacacaactagaaaggtgacatctttgatttgattctcaagcttttttaagctgtgacagagggtttagcaggagcagaagagagtctagacctcttcttggccaaactttcactacggcgatcacgctgctcctttagtctggaggcaagaagcttctggtaatcagctgcatcagagttagccttggcgattctcttcttcttgtcagcaattctagctctcttcctctgaagagtcaatggggtcacaagcctctggatcttaggggctttgctaacttccttgcctgtcaaaaatccaaacagaagaaacaagtttcagaaaacattatttctcaagtgtgattcagaaaccactatttctcaagttcagtgtctcacccttcttgtttgtgaacttgcggcggtaagtg

SEQ ID NO: 159491 - DNA, 467 bp, Arabidopsis thaliana landsberg
gggcaaaggaagctttcattaatctaactcctcaagagaggtgggttcatacaaagtaaaattaaagcattacatgaaagatagagataaagatttcatgagtcttccaaaatgcataacttcaagaaggttgcaagggatggtagatctattgggacctgcagagattcaagcttgaagactagcttcgagaaatctcggatcaacttgtgatcatagtaagctcgtgcgatcgacgcatagaagctttcgttgaaatgctccaaagaggaggctgcggtgtgagacttttctccgggttcaagtttcaaagaggatatctcttacaggagtaaggcttcagggaagggttttcattagaggagtaagcataatgcaatcggcaaataagattacaagttcaaagcgcagataatcttctaatcaaaagaccgagattagccggtttcataaggcttgaggagagg

SEQ ID NO: 159492 - DNA, 374 bp, Arabidopsis thaliana landsberg
tcccaaagagaatggaaacaactggagcttgaatccgtcttcactgacaccattgatttttgttaggttgcagagcctatcaaattcatccaagtggtcgagtggatcctccatttgcagaccatggaatttgttcccccgaatcatcgagatgagaccactcttaatctcgaagttgttgttcaggaaagcaggaggtgcaattcctttcctttgacgatggtcccgtggtgcatctctagcaccaatgtttgcagggccattctgttgattttgttcgtcaaccatttcgagtggttgctgaggtacaaggttgactgtgtttctcctttctctgagttcgcgagctatacggtcgatgttatcgttgaaaa

SEQ ID NO: 159493 - DNA, 365 bp, Arabidopsis thaliana landsberg
tgttgtgaaatctaaccggattgtggatccggccatttaaccgtggtcattagcgattccacaaatccaaaatattttctcatcttcatgtatatttataatttaatttttattttattttcttaaaaggttttcaactctttattttttattttttaaaaagtatttacaaacactaaattaatatgacgttgtgaaatctcaccggattttggatcccgccatttaaccgtggccattagcgatttcacaagtccaacatgtttttcacatctttatgtatatttagcatttatttttattttattttttcttaaaagtttttcaactcttttcttaatttttttttagaaggttttataaat

SEQ ID NO: 159494 - DNA, 294 bp, Arabidopsis thaliana landsberg
agggggggggggagggggggggggggggggggggggggaggggagggaggagggggggggggggggagggagggataagagggggggggaagggggggggggggggggaaaggggaggggggagggagggggggggggggagggggggggggggggggggagggaggggggggggggggggggggagggaggggggggggggggggggaggggggggggggggggggggggggggaagggggggggggaggggggggagggaggggggggggggggggggggggggggggaggg

SEQ ID NO: 159495 - DNA, 139 bp, Arabidopsis thaliana landsberg
aacagagcaactagagctctcttctcctctgctcgtacaacggtataacgatctcgaggatcacaagagaacaggaggtgtattcgaagaatctaccgatggctgaagaccttaatcaaaagatcttgggctcaaactc

SEQ ID NO: 159496 - DNA, 191 bp, Arabidopsis thaliana landsberg
aaatgttaacccatttatttttattaataattaacctgggacaaaataaaaccctgcatttaaattttcgttttgtggtacgggcttgggcccgaaataccaaaaaccaaatatatttcagcattctcataatatttgtatgcatttttgtgttataagttattaaactttttatttgtccacaaaaaaag

SEQ ID NO: 159497 - DNA, 403 bp, Arabidopsis thaliana landsberg
actctcatggaacaacgcctccgactcatcgctcaagatcatgtcagctccagtttcggtaaatggtgaaataattatcaaagtaatttctatcttctctctctctctcttctcagtctatccgtctcctcagtctgatctttagggttcgtagattggtgcttttggtgtatagatttagtgttatggtcatgcctctgtttatgaccagaagagaaaggtgaaacctttcttaacttctgtttttaacttatggataaattaagtcccatcaattaattataaacttatgccgatgagcacaaggtatgttaaaatcgtttttcactttttttgtgtttggatttatcgaatcatgtaaataactctaaacattaagagtaattaacttcgatttgcaaat

SEQ ID NO: 159498 - DNA, 153 bp, Arabidopsis thaliana landsberg
tatatcaaatgaagctctaatgcaaacaatgaatttgtactaagggatttagacaaattcactcctctcttagctcacaaataatcaaaggaaaagaactaagttgcttgaacaaaaagctagggtttgctctgtaatagtaggctcttgtat

SEQ ID NO: 159499 - DNA, 252 bp, Arabidopsis thaliana landsberg
  unsure (1)..(252): unsure at all n locations
catggtttaggcatgcggtctttccggcctgttttagtgggggcccgccctntttgtttgcgtcctttggtttaaaaaaggttctatgcagactttgatggggatcaaatggctgttcatgtgcctttatctttagaggctcaagcagaggctcgtttacttatgttttttcatatgaatctcttatctccagctattggagatcccatttcggtaccggatcaaaatatgctaattgaactctatgtatta

SEQ ID NO: 159500 - DNA, 72 bp, Arabidopsis thaliana landsberg
attctttgcgtcttccttttctatttatcacgagatctgtctttctttttcctcttctttctctctcttctc

SEQ ID NO: 159501 - DNA, 183 bp, Arabidopsis thaliana landsberg
cctttggtttgtaatgcgagagaaccttgttgaataattgcgattctatataactttgatctgttgccaaaataaccacagcctttccatttatttcttggttcatctaccaaaatgatcagaattggcattatttgagctatttatgagaatacacaaaaatctgcttcttgatttattcgc

SEQ ID NO: 159502 - DNA, 395 bp, Arabidopsis thaliana landsberg
tttttggcattgatgttcttcccgctccccattcaggccccagcaaaatcattatcttccagcaagctgaacgaatgggtggtccaatactgacactaggcaccatcgaaacgcaaccaaggaccattgaaaaggacttgtctccaatatccatcacgcagcccaagaacaaaagcccggtgtatgagccatggctatcagattctccaaacgcaacacgacgtgcatttggccctggaactccattcgagtttttccaatcacagtcacgattatcatcatcctctggttatacgcagaaactgcaaagacaactaaaaagctttttaattttttgtttctttcaaatttttacggttccgtgacgtttgtgacttttctgatctcaatggtaa

SEQ ID NO: 159503 - DNA, 369 bp, Arabidopsis thaliana landsberg
tcctttaaaagaaattaaagcatgcaattcgatcaactaattacacatttggagaaatatatagaaactgatacaacacatttaaaaactcttaaacgtgttccggcggaggagacggtgcagaagccacgcgccgtccacgctccgatctactattgacggcgaacttcaaactcccttcatgcataccctttcgcttctcggtctctgtccactctttcatgtaataatactcctccgtagacttcacttcatcttccgtggaaggcaaaaacatgcttccccattgcgggaagtgcactaaagtgacgggtaatgtacacgccataatcatcacccccatccatgtcagcccttgttccgtggaga

SEQ ID NO: 159504 - DNA, 81 bp, Arabidopsis thaliana landsberg
ctctcttctctctttctctttcgccattaaaactctgtttcctttttcagagattctcagagaagattgattctaccctaa

SEQ ID NO: 159505 - DNA, 234 bp, Arabidopsis thaliana landsberg
atgagcgctctgccccagctgtggcatgtcaaaatgcatcggtagggcactgttccgccttatgaggcagcaaccgcgcgagcgccggtggacgatgcggaagcgagaatgtcggcttgagtaacgcaaacattggtgagaatccaatgccccgaaaacccaagggttcctccgcaaggttcgtccacttgtagggtgtagtcaggcgcctaagaatcaatgaccgcaaaggtc

SEQ ID NO: 159506 - DNA, 97 bp, Arabidopsis thaliana landsberg
ctacacagtgatattgtctataatcaaccattcatctacgtagactatgaagtcggagctaagattctacgtttcatccgctcgtcaaggtatacta

SEQ ID NO: 159507 - DNA, 282 bp, Arabidopsis thaliana landsberg
aaaaacgatactagataagcttcaaatatgtacggtgtagtaaaagatataaagagcattctcttccatccatagtatatagtgaaatcgcgcccgcaaattatgagacagcaaaaagaaaaactgaagaaagccagtaaaagccattataagaaccaagaaaatacacaagctggatataagatcaatctagcttatgcttgcttcagaagtatctcagacttgcaaaaccccaaaatataaaacctgtcacaccgtaacgtcgaaaagagatctaaaccg

SEQ ID NO: 159508 - DNA, 523 bp, Arabidopsis thaliana landsberg
atcattgaatagtataaacatattttcattttatttttgtttttgtttaactaagctcacagcgacacaattccgaatattagcaattggagaaagaataaaagacacagagcaccatattattcttttagcccaaaaatttccacaagtacaaatccggcaaaaacacatacatagaccaatttttggtttactgacgaaattttcagatcagaaaaccggatttgattcaagtgggtccctaaaccgtcggttttaaacaatattttcaacgatgagctttttcaagtcaaactagcgaaacagctatcagacctagacaaaactttagaaacacaatcaaatgattatcttgatcgtctttagatggactattaggcatagatctaagcattcttggtgaatctaagcttttttctcaagatctgtctcatcgtagagatcaaatgtcttgtcagattcgatggtgggcttgaggatttgaacttattacacttgttcatgtgtctcgccatagcttctt

SEQ ID NO: 159509 - DNA, 342 bp, Arabidopsis thaliana landsberg
gagagagagagaaagggtaaaaagagggatcagaatctaattgaagtaagaacagtgaaaagcaaacaaagaaatcgaaacgagaaaataggtaaaaagcatcggaaagtgagatcagagctaaatgattcagacattttgtggcttttttactcgggggaagagagagagagagagagagagagagccctgtaacagttaagagctgagcttagctagagtagatacatcggaaactccgccggaaaaagatgccccccggagactaaagtaagccaaatctctctctttatatcacgaaatcacaccgactgagaatggcgtcggaagcgaaatgggttt

SEQ ID NO: 159510 - DNA, 390 bp, Arabidopsis thaliana landsberg
aaaaaataaagggcatatcgaaatatataacaaagagaaaagaaaaacaagaactgtatgtgtctaaataaataaggtgtggtattactacgtagttgatatttttgtatgttgacgaagacgaacgagcttattaagtattattcacaggcgtttttttctttaacagatttgaaccaaagacataagagagaaggaaaaacagaatatgaacacgacagtgaccagttggagaaaacagaatctcttgggaaacaagatatcacttaccttgaattctcatagcagtcaagataagcctttcctttgagttcacgggaaaacaagccattcaagtagtctttagttttcaggcttataaactttgcagcctcttgtctttgaacaagg

SEQ ID NO: 159511 - DNA, 95 bp, Arabidopsis thaliana landsberg
gaatccataccttctttttggtcttgcttacttcttcctcctcatcttcgtcgtcttcttcctcatcttcgtcttcatcttcttcatcctcatct

SEQ ID NO: 159512 - DNA, 397 bp, Arabidopsis thaliana landsberg
ttctttgctcttcatgcttcttgtaaactctcaagttgcatcctttctggatttattttcaggacatgtggacagttctcaacagtagcatacttcaacaaagatcattgcttttcagcggaacctgataatctccaacaaatattcttcggtttacagtattaacaccagcaggatagtgctgttttcccattcttgaagatggacagggcagatacgtcgggctttgtaagtggcggaagttgttcatctctcaacttgctccaaaatatgcttatagctacaagtatgatgtgctaagtggtactatttcggagctctctttcatctatatccttttcatcttcatatgaatttggacaaaggtgtagttccattctctagtgccattaatatg

SEQ ID NO: 159513 - DNA, 151 bp, Arabidopsis thaliana landsberg
aatatataaccaggagaagaacttcatgatggctctgactcgataactccggaatgccttcttgcttcaattgttcttcaacaacactgagacactgagatctgatctgtttgtagggtaacaaaagagaaatctttagtgcgagaaatgg

SEQ ID NO: 159514 - DNA, 240 bp, Arabidopsis thaliana landsberg
aactattctcagtctcacaactaaaaattaactttccactgtttataatttagtgtgacaggaaaaagaagattctactctttaaaattatctaaccacaaaaacgagtatttaaattgtttgtcttttttttttttccattgaaataacaagactttaagggtttgcactctgcagagtccactcctttccaaaagactcaatcctttgacgttataacgagtaaacccaatgcaccta

SEQ ID NO: 159515 - DNA, 307 bp, Arabidopsis thaliana landsberg
tttagaaccctttttttgtgaattttgaaccccatatcaaataatgtgggttaaaattttgagctgatttaaaattaatcacctatctggtatactaaattgaatatccttacctgccttagtttttctgaaatttaaaacggtaatataaatcattaactttaacgatcattatatatttatttaggcgaaaatataaatcaccatttatttattacggttccacctacaacttacatggataggggttggtgatatggaagggtttcaatgacctttaaataaatgaaattattttggttcaaaa

SEQ ID NO: 159516 - DNA, 141 bp, Arabidopsis thaliana landsberg
agttaaaagagagaaaacggattctggtgatgatagatcgtaattgagaagacggagaaggtcggcgaggtaaaggaaagacgatcaccggagagcgagttttggttttggatgggatcgtcggctgcgagagaaggcgag

SEQ ID NO: 159517 - DNA, 183 bp, Arabidopsis thaliana landsberg
cgatgacaaccgcttagtgctccggtaaaacaagagtatatgtcatctctcaacatggcttcccgttaacgatgatgagaaggcaatgaacactgcttgaagcaagggtggtagcctatatatagctccggtgaaacaagcatcaagaagaggatggcaagatcttgagtgccaatggcagcg

SEQ ID NO: 159518 - DNA, 148 bp, Arabidopsis thaliana landsberg
caaaacaacctctgctggtaataattttgatcagaaaactatgatttgggtagacattatttatcttcaggaaccctttgcttcacaacatgagttgttatctacattagggcagagcatagaaagagtttttagtttaccgtcttaa

SEQ ID NO: 159519 - DNA, 315 bp, Arabidopsis thaliana landsberg
  unsure (1)..(315): unsure at all n locations
atctttgaaagttttattgagaaatattagacactgcaaacatatataaccggaaagaaccaagagttaagtttggccaactagtctgccgtcaaattggtaatataattcccaaattcatagattatggatgcggtccatccggagagtgaactcttgttcaccacgcaagcataaatatctaagaatctcttagaaacagaacatgtggacacatctaaattacatttattacatattgacgatgtatataacccngtagtttaaattattgaaaatatgatccaaacacatgcatatgtgttttatggcata

SEQ ID NO: 159520 - DNA, 176 bp, Arabidopsis thaliana landsberg
tctcctctctttctcttttttattatttttagttccccttccatgtcacttccttgacgaattctatatacctagttcgtttttttcttcctcaaaaatatctttttcaattcatttggtttttctttgggtgcaactttgccttacaaaatgttctctctttgttaaatttaaat

SEQ ID NO: 159521 - DNA, 334 bp, Arabidopsis thaliana landsberg
cactaagcagtagaagaaattcaaaaaacaacatggatgatcatgaaacccctcttttgtccaaggacttatcatcatcatcatcatcatcatcatcatcatcatctgtggtggtttcatctttgaaatggatattgaaagttgtaatgtctgtgatttttgtgacttgggttgtgtaccttatgatgtatcctggatcactcggtgatcaaatcctcacaaactggagagcaatctcctccaacactttctttggccttacaggtaccatcacttgctttggtttttccgaaattttccaaaagcattgctaaattcactctctgaatatctt

SEQ ID NO: 159522 - DNA, 372 bp, Arabidopsis thaliana landsberg
tgtaacagctggttagattaaagaaaaaaaaaaaattgaattaaaataccaaaaaattgttatcactttctaaattgtgattattattcaaccccttaacccattccccactattcttatctttaattttcatattagcatttttattgttatcaccactctgattctcacgttctactcatgcagcaaaaatctcttggacgatatacaccacatccatctacgtatttacatcgttgcccttatcaccaccgtcgtccggcgccgggatatacggcggtctagaaaccaaaatcaccttttcccaaactactccactgaagaaatcgtgacctttaatttcctcaacgttaatcctacggctaggatctt

SEQ ID NO: 159523 - DNA, 182 bp, Arabidopsis thaliana landsberg
tactattaaaggacctacagctaagctctgttgaacgtagttctttctaatatattccattgatgattgaaacgttcatttgtatccacaatgcttgtggctcttttgtttttttagatcctttgacgcaataaatgttggacactacgagtctgctaaagatactgaagtattttggatca

SEQ ID NO: 159524 - DNA, 169 bp, Arabidopsis thaliana landsberg
ttttaatagtgtttttccgcggacaatggggaatgagttccgattggacaagaggataacatatcgcgcgtcgcacacaatcgcagaatgcaaagtttaacacctcgtgcattatcattggattgaatcattgaccacgagtgctaacaccgaagttgtcattgctgtg

SEQ ID NO: 159525 - DNA, 127 bp, Arabidopsis thaliana landsberg
ctctctcttgtggacgagtttcgtttctcagatctagtttgctgttttttctttgttcttcaattgttggtcaaatctactcaatgaaagtccaggagtgggctgaatctattctctgtcaacagtg

SEQ ID NO: 159526 - DNA, 517 bp, Arabidopsis thaliana landsberg
catattcgtagacgcatctcgtctgaacaaaatctgagaatcttcatcgatcgcgaaataaacacactggtcaacaaaatctggttcgaatctattttatcttctcgtttctttaaatcaactattgctgatcatatttctttttttctggctaaattcttaaactgatggagtgattgtagatttcagcaataattaggaatggaatcagagttaatatttcatgaaggtggatgtcattgtgggaaaatcaaatggagagttaaagcagcaagaagtgtgattgcttggagctgcaactgctcagattgttcaatgagaggcaatgttcactttattgttccttcaagcaactttgagtttcttgatgactcaaaggacttcattactacttacacttttgggactcacacggccaaacataccttctgcaaggtttgtgggatcacatcgttttatatcccgaggtctaaccctgatggagtcgctgtcacagttaagtgtgtcaagtcgggga

SEQ ID NO: 159527 - DNA, 125 bp, Arabidopsis thaliana landsberg
gtggacatcgaagtcactcttgcattaggaggatttggataatacaccattacctctgtacttttacttatattactcctttcttacaatctttcatgagcatatggatgaaccctcagcttctt

SEQ ID NO: 159528 - DNA, 142 bp, Arabidopsis thaliana landsberg
tgtgatgctaacaatcaagatgtgatcagaagtcactgagtcaagccaagcaataacagtttttggtgtgttctagcagtcctaagtgaacatgcagaaaacagaaaatcaaacagaaatagtaaaacactcgactaacaca

SEQ ID NO: 159529 - DNA, 296 bp, Arabidopsis thaliana landsberg
cctcctctgtagctgcctgtaacgagtaagtggtcgagtgatatgctctgctgcttccctcctgctttgatagagtagagggtcgagtgagttccttgtaagttccttctgcacctgaaaacacaccaaacatgcaatatgtatgcaacatgatcctaaatgcctaagtgtgcaaaataagttaaatgtatgccaaatgatatgaaacaatgagtgatctctaagctaaatgatgataaatacatgcctaaaatgagtaaaatacagtgttatcaactcccccaaacttaatctct

SEQ ID NO: 159530 - DNA, 414 bp, Arabidopsis thaliana landsberg
gttcaatcgcttttaaatccatgtctcgtcattacttacaaaaaaaaaccttccacataattcttcttcaaacagaagcatcaatcattgaaaaaacgaccaaaccaaatattaaactaaaaaaaaaaatatgtagaaaaatatttttaaaagggtaatcaaagtaatgaaaaattcaacttttacttttcctggatttttttctggttaaggtcctcaccatccaaccctgtttcctcactttggttccttcgaccttagatggtgccacatggcaagaagacgtggacgatcctgatttgagtttgatgacgtggaatagatgaccaatacgcttgcgccatctaagcgatgacttggcactattgtgctctacgatactggtattgctcgttataggagattgctgcttct

SEQ ID NO: 159531 - DNA, 511 bp, Arabidopsis thaliana landsberg
cacaaaaaggtctaatttttttcatcaactaacggatagtttccatagtacaacattacatgaaatagacaaaaggccaagtctaaaataggtttcaagactcttgcaacataaaccaaaaagctacatgacacaacaagactagctaaaggttatcggggatacatgaggaggctagatttagaggaagaagcctttgagaggagtgaatttagagaggatctctgcttcacgtttaagcgcattgtctttcttgcattcccattcaggcttcttcaaattagctgattgaacttcctgtacgactttcgggattgagttcgctaccattttttgaccatagcttagatcaaccctctctttctccttggtcccgatgtaccgcttcaattcagaccgtctggcttgaagttgagcgatttggtcatcgatttgacggattgtctcagagtttgtgtctacttccatttggatacttcctagtttttccttcaggtcgctgtattcgtat

SEQ ID NO: 159532 - DNA, 513 bp, Arabidopsis thaliana landsberg
agccgcaggcaaaaccaaaataagaaaaaacaagattcaattgttttctggaatcgtcgcgatagttgctgaactccgtcgcaatgtcaatggcatctgctcactccatagccgccgtttctgttctcgctgcggcctccaagcaagcaacacttccttcttcttcttcttcttcctctgcgctctactctctttcttctcttcgatctaaacctcgccagcagcttctctccctacgcagtgtcgctctcaaaggtatcttctcttctttttctctgtttatttggaatacgagttgcttctcctaaacgtaatagtccaattctacctttgttgggtacagtcgcatttccagtttgaattttaatatagtttgggacaacgaagaggggagtgattaaattagcacaatcgtaatgagtagttgttgatatggctagcttgttgatgagccacaatgattagtttgtggttacttaggtcgagtaaagcgcaagaaaagaagcagactag

SEQ ID NO: 159533 - DNA, 233 bp, Arabidopsis thaliana landsberg
ctctccttctcctaaagtcacttacaagtctccatccaccaccatatgtctacaagacgccttattattgattttgaattgtttctttaagaagaagcatgagtgcaataatttctttttatgattggttttttttattcttctgattttgttctttgttgatttatcttgttaagctttttttatgtaataaaatttggctatctttttaaatgcacttttttgttcctatt

SEQ ID NO: 159534 - DNA, 85 bp, Arabidopsis thaliana landsberg
tttttttttttttttttgtttttttttttttgtttttttttttggttttttttttttttttttttttttttttttttttattttt

SEQ ID NO: 159535 - DNA, 1758 bp, Arabidopsis thaliana landsberg
cctaaaaaagagtttaatggaggctaccaacagcagaatcggccatcagggtttattcaataaccacaacaagccccagcagctcaagatccttaaattaagcaactcattcaacaaatcattcaaggaaaagctactggagctatggtttttgacaagaaaatagctgaattacacaacaagatcgattgttcttacaacggtctaaacgtcaagttcgaagctctgaattcaaaaatcaagtatgtggagagtcaatttgcatcaacctctgctccgaagcatcctcaacaacttctagggaaagtagttcagaatcgtaaggactatgctactggtaatgctatcaacatccaccaagaagatgagtctccaccaagtcgtcagactccccatactgaggaaaatatgattcaagaaggggggggggggggattcaactcaaattgctgcacctgccacccagcaattcatctggactataaagcacacacctttgctgaatactcaccatcctggaaaaaagttcaaaattgaaaaactcaagaaggatcagaatcaagagatgatcagcagtgcctctacccaagaaacatacaagaagaaaatcatccaagaaaagcttgatgatcccggttcattcactctgccatgctctctaggaccattgacattcaataggtgcctttgtgatttgggagcatctgttagtcttatgcctctctctacagctaaaaggctagggattatggaatacaagttctgcaacttagctttactcttagctgacggttctgtagcacatcctcatggtttaatagaaaatctgcctgtcaagattgaaaatgttgagatacctacaaattttgtggtattagacgtagatgaaaaaggcaaggatcccctgatcctaggtagaccattcttagcttcagctggagcagtcatagatgtcagaaatggaaaaattaatccgaaccttgaaaaaggcatcaagatgaagtttgaaatcagagaagcttcagggaaatcaacaacaggagttcagaattttgggattcaggacatggaagttgatgaagaaatagaatctgaaacctcaccaaaagtcaactatacttctcaactcagcaagctgaaaaggacttttgaccacaagaagagagcaacacaaaggctagcttagactgaagatcctacagaagatgaggaaaagatttaagtggcaaagcagagtcatagagggattatcttcaagggtgatgaagctgaaagatcaactatggatgtttgaaaaaagagttaaaaaaatttcaaatggtattgatccagagaagatggaaactgcactatctatcaaggaggacgaacatttcacaacataatggcttgcaccagaagataaaaaaggagttcacttagaggaaagaagcctagagagcaagttgttgagtgagggggaaatctctattccgacttattccccagaagaacactttacacttgattctgttactgaaaaacttctgaaactcaggatataatacaaagctcaagaggataccattggggagctaacttacaagatggaaggactgaaccatgctgataagaaagaagcttactttgaagaagaatcgaaatgaatactcatcctaccatatatcaagagaggatgcagaatatgattcaagcactgaaaattcaaccactgaagatgaggacttctcttttcctctcttcaacctcttttctgac

SEQ ID NO: 159536 - DNA, 187 bp, Arabidopsis thaliana landsberg
atcaatctcctcttctttggtgaccaccgggtttgaatctgatgccggtttatcattcaggacatctgcagaatccgacgaaataatctctttctccatcaacttagcttcctcgctcaccttattctccaatggctgcatcaggtaaaagtaaacctctcttataattcacaacaagaaaccttag

SEQ ID NO: 159537 - DNA, 234 bp, Arabidopsis thaliana landsberg
cgagagagagagagaaggaaagcatgggaatgaaaggagaagggttctatctgagcatatgaacggctaatgtaagagtgcaaccaccgacaactacgagccagcatgggtggagccacgagccaacaactaccttcattgggataaaagggagaagaataactgctgcgggtgattcttgctcggaggctaaaaacgctttgctttggacacttttacattgcgcttaaccta

SEQ ID NO: 159538 - DNA, 103 bp, Arabidopsis thaliana landsberg
tttttttttttgttttttttttttttgtgttgttattttttgtgtgtttttattttttttttttttgtggggttggttgggtttttttttttttttttttttc

SEQ ID NO: 159539 - DNA, 87 bp, Arabidopsis thaliana landsberg
aacgcaaaagccacctcctctctctctctctctctctctctctctctctctctctctctctctctctctctctctctctctctctct

SEQ ID NO: 159540 - DNA, 91 bp, Arabidopsis thaliana landsberg
acagtctcttttatgattagttgaactttttaaaagtaaatattcttaatctacgttcttttagttaaaacaacttatattgtaaaaagag

SEQ ID NO: 159541 - DNA, 361 bp, Arabidopsis thaliana landsberg
atcacaatgcctaacttctttgaattccaaaccttttactagacttaacagttttgtatcccccttagaactctaaagtcttactctctttttttctttcttttctgtcattctcattctcattcccattcattccatacacattcccaatcccaaatacaagtctccacctagtcctagctaacccaaaaagcgtgggcgaggtctacatgaaagactgctcttgtcggctcattcctaacacgttataccaagctcaatcaaaaaagacctcacactcacacataaatgatctttggcttgaaataaggctaggctaagggtatgggaaactgctctaaaaatgagagacagctacttg

SEQ ID NO: 159542 - DNA, 291 bp, Arabidopsis thaliana landsberg
aatggaaacaagtaagaaactgttcaatattcaaatcggaagggtgaagaagagagttgaagattgtatttactattgctaacgaacaaacacattacaattttatcataatatttcaagatcctttaagtatgattctcctaatcgcatgttcacatttaccaagtgatttgaaacaaggcagtctgcggccaatgtgattttggtcagtctatttgttttttctccatgacgcctgcaaatgagtagagttcaagcaaaatacaaatcatggtaaatacaagcgtgcgt

SEQ ID NO: 159543 - DNA, 442 bp, Arabidopsis thaliana landsberg
tatttaaaagtctttagtttattatcaaagaatcaaagaatccaaacgcacaaaattaatagcttagtttattatctgatccacattttcaaatggatcttaacattacgcagacggccatgtatacaaacgcctagccgacgcgagtttgctttttacacttcggggacttttttccactcttgagagccagagaacgctttttgatatattgaccaccacaaagcttacccttgagagtcaagtctcctctatggcccatgactcttctaactatagctcggggttcaacatgctccccaatctcaaaaacccgctcatgggctcgaggctctgccaagcccttaaacgttatgtagacatgtgccctgtaggctttgagtctctcattagacggctcctcatctttggtagcagtttctatcgccactttcacaatctc

SEQ ID NO: 159544 - DNA, 150 bp, Arabidopsis thaliana landsberg
ccaacaatctaatatgatatcagagcccgatccgcacatactcaacctaatccacatcggtcaggctcaatattaggcccgttgatccatgcccgaacatatcgagatcaatggctagaagaaccatcatctcgaaggggcgtattaaag

SEQ ID NO: 159545 - DNA, 116 bp, Arabidopsis thaliana landsberg
cggcggtgaacacgacggggttagctgggagccctccaccacagaccagtgggacaccgcaggggattgatggtgctggtggtggacctgctgatagaggagcactgttggtggct

SEQ ID NO: 159546 - DNA, 323 bp, Arabidopsis thaliana landsberg
cacctgaggagagaagcggcggccatcgttccgagtgcgccaccagcggtgagtcctgtggttatgacagcagtggctatcgtggctggtacgagaatcggactgaatatgataaaaagcggtgtggttatggttaatgccgtggctgaacctgccagtgttagacccgctaacactaagaagactatagagaccacggcagcaataaccacctgaaaaacctccgacactaggaggatgagaaaagaaaacattttgggatagatgttaaatttcaatgactgagatttgttttgatggagttctttggctcatactttatc

SEQ ID NO: 159547 - DNA, 277 bp, Arabidopsis thaliana landsberg
cttcctgattaatcgctaatccagagtgattaagaaattaaattttccttgatgaacaaagaagacgtttgggtgaaatggaaagcgcgacgacgaggacaatgccgagcaagcttaaaaaagcgattggtgcggttaaagatcagacgagcattagcctcggcaaagttgctaacggagccaccggaggcggcgatctcacgactctcgaagttgcgatcttgaaagctacgagccacgacgaggaagtcccaatcgacgatcgactcgtaacaga

SEQ ID NO: 159548 - DNA, 306 bp, Arabidopsis thaliana landsberg
attatgtggaaagttgctaacatctcgagttttaccatactcaggtgactgatgaagaaggccgtagaaggttccatggagcatttactggtggatattctgctgggtattacaatacagttggatcaaaagagggtaaagtttacattacctgattttcaaaggcttttttatctgtgctatgctgtttacaatctaaatcgtacttcaggctgggctccacagtcatttacatcatcaaggcagaacagagctggagcgagaaagcaaagtatttcagactttctagatgaagatgaaaaggcg

SEQ ID NO: 159549 - DNA, 385 bp, Arabidopsis thaliana landsberg
accgggaatgggttcaagtcgggatgttgcctcccgcgttgtctcatgagttatacggtaagaaaggcgacataaactgcgttggaggagctggaaacaagatactcgtgtgcttcaatgctagtcctccagaagtgtattgtagatactttgtgtatgatttagttgcagaagagtggaacgagttgccgaaatgcttcaaggatggagaagctgtggattttgtttccgctctttctttccagcctaggatcgaggctacagtttgaaattttttagcttttattgtatggattgtgtgtattctttctattcaggaaaatgcaatgtaacttgatttgtaatctgttgacattggttagaacaggaatgctctgttttatgc

SEQ ID NO: 159550 - DNA, 356 bp, Arabidopsis thaliana landsberg
tgaaaatgaggaggtagactcatgtaacataactcttaccaatagaggaagaagaaaaagttagcgagagtcggatacttgtgagaaattacaacaaatgccggaggatttatgcacatcttggagcatctgataagaggaaaaaattatgttcgctctcacatttctaaatccaaatccaacacttccatctccattgatccttgccaagtctactcctgaatcagcgttgagcagaacaagcagagctttttgatcttctaactcttatccttggagaccgaaccttagattttatggctttaagctcaagtcagctacagtttccgaaaatgtggaaggaggagatttggaat

SEQ ID NO: 159551 - DNA, 138 bp, Arabidopsis thaliana landsberg
gactgagaaatgagatctccggctttttacaaaaggctggtgaaagcttatgtgaaacatgggagcgtttcaagggttataccaaccaatgccctcataatggcttcactaaagcctatatgctcgacactctttaca

SEQ ID NO: 159552 - DNA, 492 bp, Arabidopsis thaliana landsberg
  unsure (1)..(492): unsure at all n locations
tacaggaaaaatcaaaacttgaagcgataagagagaaacataccaggaagacaacaggagggagtgtggtaaccatacttcgaaacctcgaaattgaatactcggaatcatggggaatgtcactctgagtcgtagcagtaacaacaacaacattatcatcactttgagtgttctgaatatcttcatctggagtcgaggaatcaccaatcgctttacacacgaaacttcctttagtttcgaattgaacccagttcagatttacgggtctccgtctgaaaataaccaaacttgaannnnnnnnnnnnnnnnnnnnnnnnnnnnnnnnnnnnnnnnnnnnnnnnnnnnnnnnnnnnnnnnnaaatttcagaaatgaatcacccaaggaggaagcaaagcagtaccggtataagtgtaagtgaagaagaagagatgggttcgatttttacctggagattgcagagagaatggaattggagagaatcaatggatgcc

SEQ ID NO: 159553 - DNA, 395 bp, Arabidopsis thaliana landsberg
agtatgcgttgttgttaagtacacatttgtttaacgcttctataggcacaagaaacaaaaggaagaagatatatctatctgcgaatgcaagtttgatttcgcagaccctgacagtgcttgtggtgagagatgcctcaatgtcattaccatccactgaatgtactcctggttactgcccctgtggtgtctattgcaagaatcaggttaacaacttgaaatctttgcttccacgttttcatgtaattctagaatctaagatttgcgttaaagcttggtgatgttcttacaagttcctattcaaactaatgatacttgagttaaatgaaagttaattagtagttttacatgctttgccggttacagaagttccaaaaatgtaatacgccaaaacaaag

SEQ ID NO: 159554 - DNA, 788 bp, Arabidopsis thaliana landsberg
cctagaattgttttaggtttcttcatggcgtataaccgtgttggtggtgatcgaggtccccggtacgaattacgattccttattaatcaaaattgttactaattttgcccttgtgtcttcgtgattagcttagattgaggaaaattagtgacaatctgggtgatttcttattggtaggtctatgattaatgtttagacttgttagtttcctgaagaaacctagtttgggagatttagggaatatcttgaggatttgagtaaactgcctagtgttggacttggtttaggtatttgtttgtaagctttcttgggatcgattaggagatgttaagtgaatcatgttgaacactctttctcaaacaaatctccagaggcatgagagatttggtttgctctctctgataattccccactggttggttagcttcaatggtgcttgtcgtcagattttagtcgaaatcaaactaatgattgagaactcactcattgcttgtttgattgttggtggtgaaacagggattttcttcattgtactgggatgtctactgtttatcccggggttttactatacacggattgcatattacgcttacaaaggatacaaaggtttctctttctcaaatataccatccgtttaagccttatgacttggtgtctcttctctcttactcaatgtataggttgtttacgtttttattacttgacttatgctctttagtgtgattttacatgacttgaatgagccatgtttgatacatatgtatctcttttggtttctccttctctat

SEQ ID NO: 159555 - DNA, 753 bp, Arabidopsis thaliana landsberg
  unsure (1)..(753): unsure at all n locations
gggcaaaaacgaaaaacgaagatttttcttttcttggtggaggagattcatctttagaactaaaaagctcatttcaactatatatacatcagagtatgctcttttaccttagaactatcggagcaaatttacatatcacaaagaggaatcttattgtaagagccaaaataaaaaataaaaaaataaacaccttagaacaccacaaaagagaaggtcttttaccttactatgtatacccatcagcggtataaacccttaccgtgctgatcaaaccgcaactattgaacaactatagttctactcactctcattccttcaccccatttgaggaaaactttagcaacagatagataaaactatctcatatctcgtgtgttgaaagcttgttcgttatctccgttgttttgcctgattcttggattgatggggtttttgttttaccataaaccaagagggctctaggtgtagaattacctcagcttcttctgtatgtatgtatttatttcagaccaactgtagaactttgattgacccatttgagctagctgaaacaaccatattnnnnnnnnnnnnnnnnnnnnnnnttgaaacgaacaggttgttgtcctcctctatctccttacctgatattggatcaatagaaccaaacttgtacgaggtaattggcatgggaagagaccggtgataggcataaacctgaacaaaccaagaaacagcatatttctcaatcagagagatcacttaaacaacaat

SEQ ID NO: 159556 - DNA, 428 bp, Arabidopsis thaliana landsberg
  unsure (1)..(428): unsure at all n locations
tagtaaaacgacactgcattcaacatacaaacaaacaacttataggttttcagatcttgacaatgttcattttcgtggaaatcaagaaatatataaaacacaaatcatgtaaagtagattaaaaagttggtaagaatcttggatgtagatctatcgaaaaagattttcaacagattgaaaccggagctccgttccactccttgagacattccaacaacggatcaataagctttccatcagaaatcgctaagaacactttatcaaactcctctcctggcgaccgaacattctctccagtaagcagttcagtatttagctcatcgcggacaaaccgatacaatggataagaccgacattccttaatccggttagctatagccgatgttccttcctcgtattcaaccggacgcgttctacttctttagggn

SEQ ID NO: 159557 - DNA, 135 bp, Arabidopsis thaliana landsberg
aaagaacctcaaaaatcggtgagagagaatcgaatcggtatccaaaaaaacgaagaaaatcaacggtagtcgttcacccaacggaaaagcaagctcgggggagagaaaaaccctaaattcgatgtttaccttctg

SEQ ID NO: 159558 - DNA, 1194 bp, Arabidopsis thaliana landsberg
cggtgaaattgaagtggagaagaaaatcgatgaaaagattgagcagttcattaactggattgagaaacacccaaacaaaaagagtcaggtatatacaagatagcaaatacttgatttccatttcattgacagtgaaccacatattccataccttgctcaagcaaggattgaacgtttctgcagcatatagggttgtacctattccttttcattgtctcatcctttgtggctgttaatgatctctttttctttttgccaagatttgtctatcgttctatgaagtcaaaagcaaacagccttcttggttcaccaaaatcgaacggttgtactgggaacaatggtacatcaatctgaatgtgcttcagcccactaagccccctgtcggaaagtctcaccattctaaactagttacggaccctggaggtacgattgatcaatttcctgttctcatctccaaaaattacatctttttattattataagagtgtgaagtgattgtcatgctctaatcaataactgtagaggcatcggaggagagaagttctcgtaggacactgcttgagcaatcccttcaagaagtcttgttccaaatcataaaattcgtgaatgagaagaaggatcatgttcctcccattaacgatggtgtaatctactacccttttgagatcactatcccaaggtacatcagtcttcatttattcacatatcaaactgtgttctagagatcttagtctttaggtgtagcgatccccacagacatagatgagtgaagaatgttctttatatctttgttgtacaagtgttgaaatgagttaagttttgtttcagctcatcggactctgcctttgggatggatatgttcaagaggatactacacagtggccatccatcaatgctcggctaaattccattttccacttaacttagtacatatacactttgatgtttcttggtgcagcctaactccaatcaacactttcctagttacattttctgtgtaaatatataatatgttaccctctcctcgtcgatggataatgttaccttatctatgctttgttgtatataagtgatgtgttgtatataaatttcagacttgcatttcctaaaaaacgtggactgttctgttttccaagatttctaaagttggaattgacattaaatagagccaaaaaaacaaacaaacaaacaaac

SEQ ID NO: 159559 - DNA, 273 bp, Arabidopsis thaliana landsberg
ctaatattcatgttaaggttgcaaattgcaattagataattgatctctctatttaaaaaaacaaaaataatactaacaaactgaacttttgagaaaaggaaaagaatcaaagctcgagtggtggctttatttatggtcttacttctaacgtctggtccaataagcaaatgctgactttgatttaagtctactcgacaagcccaaccccacacagttttccatcaccatgcgaaaaaacactgccgttttgtgccaagataagaagaacgattc

SEQ ID NO: 159560 - DNA, 105 bp, Arabidopsis thaliana landsberg
gcttacgattgtgccaaacttgctaaagtggtttctcaaaccatcaggctgtgtgaaccaagggagatttccgacatagaccttgtgttggctttcgtacatcag

SEQ ID NO: 159561 - DNA, 99 bp, Arabidopsis thaliana landsberg
gtccgctcgggctgtcagaggaggaaagagtgcgtgaccaaaaggagagagaagagctggagcagcatttaaaaggtcgtgatactgcgcggacacgaa

SEQ ID NO: 159562 - DNA, 116 bp, Arabidopsis thaliana landsberg
  unsure (1)..(116): unsure at all n locations
gatggcaaaaatcaacagttaacatctgctcagcttccaagtcatggtcgaaacagatagggcaagtcgaaggcatatctntgctaacctcatgaagtactaacgttccaaacttt

SEQ ID NO: 159563 - DNA, 129 bp, Arabidopsis thaliana landsberg
aacaatgaatttgtactaagggatttagacaaattcactcctctctcagctaacaaataatcaaaggggaagatcagagttgcttgaatagaaagctagggtttgctctataattgtagtctcttgatt

SEQ ID NO: 159564 - DNA, 149 bp, Arabidopsis thaliana landsberg
  unsure (1)..(149): unsure at all n locations
atncatattcatattagtttatctagataaccaaatcaatctttacaacttatcatgcaactagtttaattaattaattttctcacttttaaaatattatacaattgtacaatatctaaaagggagttagaactcacctgacaaagata

SEQ ID NO: 159565 - DNA, 57 bp, Arabidopsis thaliana landsberg
gctaaggaattctgaggtcagattatgaagtttagtttacactggacaaatatttac

SEQ ID NO: 159566 - DNA, 139 bp, Arabidopsis thaliana landsberg
  unsure (1)..(139): unsure at all n locations
tgtgatgcaaacagatgagatgtgatcagaagtcactaagtcaagccaagcaataacggttttgaggtttctaactagccctaagcgaacatgcagaaaacagtcatagtatcagtattactagaatcactcgactnnn

SEQ ID NO: 159567 - DNA, 80 bp, Arabidopsis thaliana landsberg
ttttttttttttattgttttgttttgttttttttttttttatcatttgttttttttattttttttttttttttttttttt

SEQ ID NO: 159568 - DNA, 426 bp, Arabidopsis thaliana landsberg
atccttttgttatccattaatgtttagggtctagcgatgcttagatcacattttcatctctcgcataagaattcaatcctagacaaaactaggaaagcttaatctctaattcgatacatatgcttataatcgtcgtttcaattaattacgtaactttaatttaattccacgaaactgattgtataatttcgtatgcgtattctaaaaccattgcatgtacccatcagctttatacaataacagctgggacattttcttctaagggaattaatatacattgcaaaaagacaatgtatatatatttaccaggaaattagtattatcttcgttcacaatctctaagcagagcatttgttcaggaacaacacattcaataggaatcttatctacccggaaaagccccagtccacttggtgccttcttttt

SEQ ID NO: 159569 - DNA, 692 bp, Arabidopsis thaliana landsberg
cacttttcaagaaaaaataaaatactgagtactaaactggaaaccctttataaatcaaaaagaccaaaagttaaaagttaattaagatttggtttaaggcgctttgctttattagagaggaaggaacgaaccatcatagaaatctctccctcgttcaagtttttctctactgtgttggttgagcaatcgagtgatggttattgcggtggcgacgacgagctccattgtttccggaatcaagctttcagggatcttaacttcgttcaacgccgtagatgatgcgtccagtagttgcggaagaagcaacgatagaatttttccgacattgagtcggcgacgattctcatcgatcggagctgtgtccccaattcgtgggcatgcccaatcttcctttagtcgcaggtaaagtcttgattttgggtttaggtgtctgcttattagagtaaaaacacattctttgacgtcttttgtggtcatttgatttgaatctaggaatctaattgtgctcttgatccattgaattgctgcagctctttcgtttgtccccagaatctcggtttgagcggtggttttagtacagctgaagctctgccacctgcttgtgaaaatgccagcccttcttccatcaaatctttcaaccaggtgacttttcgtttgtctgtatctgtgttctgatttgggttgagttattg

SEQ ID NO: 159570 - DNA, 196 bp, Arabidopsis thaliana landsberg
ggatcaactagttgatgagaatatgtgtaatgaggtgaaaaatcatgcttagaaagacttggaaaatgtggttttgaggattttctgttgcaggtttttcttgatcgtctcaagatgtatctttagttggtttacataaagttcataagtcgaatacttggtttaatttaataatggatttgaatcagaatccctg

SEQ ID NO: 159571 - DNA, 1201 bp, Arabidopsis thaliana landsberg
atgtcccttgggagttcagacaacgaaatcagatcccgattccgagagagagagagcgatagcggaagtcgatggctttgacggtgtagaagagtgcgttgtaggcgattatagagaaaggtctcggcggtttcatgaggatgatccgagaagaaggcttcatgttagatatctgtctctctattacaatctctctgtcctctgcctacatttcatcaggattataccctcgatttcattagttagatcccaaataatctagaaatttacaagaattttcggtgtttgttgaagtttgtttgcaatgaatggttatcattcttcggtttttttcactcaaatgttaaattttcttgatgtgaaatgaaaatcaaacactttgtttttggtgaacatcaattttgaacggtgatggtgatgcttgaaattggcataatgtttctggctgcttataagtctaagatcttattgtttgtattccgaggtaatcactagtttatggaatttctctaattgcttctttcaattttttttcttcattgcaggagatgcctaccagatgggaacctcttgtaagtaatttatctttgataattagtgcttagtgtttcacttctttgtggattacgaatatgattcaagtggttgttcaagagttctttacagaccaaggtcattttcatattcttatatgtgtatgttgttgtgtgagcgaacataattttgtcagattcattatactgtgaacagagctcgccaattcttgaacagcttactattctttgacttggactgctgatagatgttatgttagttgattttggagttcagtaaagaaacagtgacagtaaatgatggttggtattccagagatagtgtagttacatgtttgaaggaattgacaatattatgccataaggctattcaagttgatgaggaataagagctcaaagattggtgaggcctgttaatggtgatgaaattggcctacaaagtagtcttgaaacttgaaagatcttaagagtcaaaatttatgtgcctctttcaccaagtctataagctggatttgtcgttctcataggctctagataattggtgcatttggctgaatatagagaaccttttccacagatcatttctttatgcgtaatatacatataacatatactcagtgttgcttctatgcagtgtacagagatgt

SEQ ID NO: 159572 - DNA, 331 bp, Arabidopsis thaliana landsberg
gatgctgcaactcttgaggatgaaatatcgactttttctgcagatgtagccatcactgagagttgggaattggagtccacaacatttaccccaccgattatctcttgcaggtgtcagccagtgctcatgaatgggtagtcgcaccatctcatgttccatgatgtaagagatctagtgagaattactcgctgaactttatggtctctgatttctcttagctcatgtgacggagataagtgaagaaaacaatactagttattgtatttagtactcattgaatgggtaattatatgagtatgccattatatcagtaaaagaaagcttagatctg

SEQ ID NO: 159573 - DNA, 75 bp, Arabidopsis thaliana landsberg
ttgttttcggtttttttttttttttgtttttttttttttttttttttttttttttttttttttttttgttttttt

SEQ ID NO: 159574 - DNA, 222 bp, Arabidopsis thaliana landsberg
ggtaatgaacaagaatgtaatttgatttacaatcactgttatgaaatcttttgtcattgatgtacttcactctttttatcgtctggttgaattgttgaatccatatccccatcgccacatcttccagcttgaaaagctttcaacaaacaacataagaacaacgtcacttatgatatctaggattcgttatatcttaactctatggtgatgaaactacaaaac

SEQ ID NO: 159575 - DNA, 567 bp, Arabidopsis thaliana landsberg
ggctcttgctacctaaacttttctcaatctctagaacacaggttaaccaaaatctccctcttcgtgtatgtttatgtgcatgtatgtatatctgggatttgcgtgtgttttacctctcatttttttgttaggttccagctgcatcattgttccataacctgtacggacgtcaccgaaggtaatgatttgatatttagatttttggttttggtgaagaatagtagcaaaggatggattttgataattgggttgtgactataatctgggtttgatatgtacaagtgtctcatctttcagattgttgttcttgttgtggtttgaatctcaagaagtgaaatcgaattcactgatttgttaatacctataacttttggtgtatttgatgttattctccatttgtttgagttctatagaggacaagtttctctgtatacaagtcctggcatgtaaagatgatatatttttgcagttttgttcattggactagtaagatgtcacaagatactgtaagatcatccactactgttggttcagcttctggagctagatcattttgctccctagaag

SEQ ID NO: 159576 - DNA, 549 bp, Arabidopsis thaliana landsberg
aaagggatatttattcataaaccaatcttacaaaccgggtgaaccggataacctagtaaaccggtacccacaaccccttcagcgaaatatgcaaacagaagccgacacaatttccagcgagtgaacaaccggaaacatctccggattatgaaaacagacagctattaaaccgaaaaagataaaggattcaatttaatcttcaaattctttctcttctcatcactggatcttttccgaaaacaaaagcatgaaagaagtcgtcgacaaacaatcaacgacgaggtgaagcttctgatctcttgtcatcacttgctaataagaatagactttggaaattgataccttgacttcttggaatggcaagacggacctcaaatgaggtgattgaaaccgtcaaaaacgccggaccgtttcaactataacggttggaaggagccaagcaacccataattcgcccagatctgaattttgattcatgtggatgagactaaaacagtcgcccaatcgaaacaccaaaacacttacctgattgtggatggtggtgggaca

SEQ ID NO: 159577 - DNA, 209 bp, Arabidopsis thaliana landsberg
gagtgattctagcgttttctctcgtcgcatcttctcttttcatctttgaccctaaaactttgcaaatctcgagctttcaggtcttctcttgtttctcttcactttgcattagatatgattcctgattgattgattcactgattacagatttcgacattgtctctaggtttaatcgattttgatgttgttgctaatcccgtagaaatcag

SEQ ID NO: 159578 - DNA, 251 bp, Arabidopsis thaliana landsberg
tatggttggtgctgagtgtgggaacatgccaaagtgcgtacgctgagaacatgtacactgactttgttccgatggcgggatttaccgacgttaatcaaggttcggattgtactttgttctgattgaatacattagatttttgattcttcgagcgcttttatgtatcatactagatatgctactctatgttgagcacgatactgaatgaaaagttgaccacaatttcgatatgacaccatatggtgaaacca

SEQ ID NO: 159579 - DNA, 232 bp, Arabidopsis thaliana landsberg
acacctctcactcaaatttcattcaccatgttctctctcaaatcctaaatctcctcacctttcacacaattcaccactcatgtattattcaccaaccccattacccgaccccttaatccattaccacctaccctttccttcacccttacccctttcaatatacccaaaaaaacctcctctaacatgaaatcccaaaaaccctccggctaagcaacaactctaccaacccttt

SEQ ID NO: 159580 - DNA, 76 bp, Arabidopsis thaliana landsberg
acgaaccagagagatctttcgaatcaaaacgatctgaagaagaagaagaagaagaagaatcaaaatctggatcagc

SEQ ID NO: 159581 - DNA, 439 bp, Arabidopsis thaliana landsberg
aatgtatccgacaaacttggtctaaaagacccattactgcgccgtctctcttccgctgccgccgtaacaaactcttttctccaagccaacgatctcttcctctcaccatcacagaccctccgccttgaatccctaatctcatctctcccaatctcaccttccccttcttcctcctcctccgccatcaccaccaccacgtggttcaaccgcttcttaacctccgccacagaagacgaagatgatcctcgctggtgtctttatttccgaatgtcaaaatccaccttcttcagtctctactctatcctctcccattcttcgcttccttccttcgctgccacaatcttccgtctcgctcacggtgcttcttacgagtgtctcgttcacagattcgggtttgattcacttcccaagcttcacgctctttcttcactgtctgcaa

SEQ ID NO: 159582 - DNA, 461 bp, Arabidopsis thaliana landsberg
tacgccttgttattagtttttatcggtacgactaaatattcagacatcagttcacgtttcaaactattctctttacatagttaagaaaataaaggcatcaaaaagattactagtaatgtttgtgtctactttatacatacatatgtcttgtttctttgtgtttttcagaatctgatctcttcgggaacgtttgtttaatttgtttcagcctttgaagatatggtgaagaatcttaaagtggatcctcttgctaaggtcactgcctgcaccacttccatggtaataaagattctctcttctctgtttattacagatgattcatatgttttggttcttaggatgatttatcagttatgtgtttttgtgttcctttcgttttgcaacattaaaggtttctgcaaaagagaattagaatcagtctgaggcagagccatcatattatgaaactcttgagacatatc

SEQ ID NO: 159583 - DNA, 332 bp, Arabidopsis thaliana landsberg
ggggagtggaaggtattgtataatttgtgcaaagacaacagtggtttgctacacaaggagacagtgagagccgtctatgatggttcttttttcgaacaactcgacaaacaaacatcttctaaaactccttacaatataatcatccaaaaaaaatcctaatgtaaattcattgttatgctcgtgaatctgttttagttaaatctttagtacttacagtaatctatggtgtgaagattgcgatgtgtttgattttcaagaattatactttatttgtgtaagtacttgtgtgattgtatcttattcaaataaaagattatatgatttttttaaaa

SEQ ID NO: 159584 - DNA, 311 bp, Arabidopsis thaliana landsberg
tataagatggtgatactgcaaaagaatcagggtgtgttgttcttgaggagcctcattgataaggtattgtacactgcctctagttatccattacaagttaatatattagaaagttggctcataaacattatttgtatcagctcatgaccaatagatatactcccatatacttgggaataaaggaataatgtgatattcccactcgttgtgttagtgtgtgagagattcaaataccctcatgatgtaaatgtcctttgatgagcttaagtcgttgtaggccattttatccacccttctagcctttgtggttg

SEQ ID NO: 159585 - DNA, 222 bp, Arabidopsis thaliana landsberg
tgatcttcactctccaaagaatcaaaccaaaaaaaaagttgacatggaccaaaaaagctttttccggttgatttttctcatagtcacagctggcttcatcatctctttcacttccaccaacttccctcacgcgccgtcaaggcttcttgaaaaaaccggctctatgtcttcacctctttgcgcttcgagaaactttcttttcggcagacttcgaccaaaacc

SEQ ID NO: 159586 - DNA, 130 bp, Arabidopsis thaliana landsberg; identical to SEQ ID NO: 70437

SEQ ID NO: 159587 - DNA, 693 bp, Arabidopsis thaliana landsberg
catgtcttcaatcgtcgagcacgtcgtcctcttcaagctcaacgaggaccacgttgactccggaaagataaactccatggtcaacggaatcaacgaactagtcaatctcgaccaagtgcttcatctctactgcggttcaatacaccgccttagctccaccaccgcctccgacttcactcacgtccttcatagccgttacagatccaaagaagatctcaacgcttacgctatacatcctgatcacgttcttgttgtcaaggaatcagaatcgattcgcgaagatatcatggccgttgattggatcgccgatcaagctccggaaaccctagcaccgcctccttgttcaatcggtaaaatcacgcttcttaaattgaaagagaatgtcatggaagaagcgaaattggagattatggaagtgatgaaggagaaatttgaaggaattgatcagattactgtcggagaaaacttttctccggggagatctaaaggtttctctattggatcgatttcgtattttagggatttgggtgaaattgaggctgtggatgatcagatgaagttgcagaatgataagattcgtgattatgttgatgataccattgttgttgagttcaatgtgccgtcttcttcataagtcttctaagtgtacctgtaaaatgctccaatttcattccttaaccgaaattttaaacc

SEQ ID NO: 159588 - DNA, 241 bp, Arabidopsis thaliana landsberg
agaattgaactgaacacaccacacttcagcacattaagtaggcgtaaaaacctacttatcaatttggcgccgttgccaattcattgttgcatggttacattcaagatatcagaaaaagttaagatcaatttcttttacattactcaagttactaactcatcttttcgtctgcttgtttttgtggtataggtactaatatttgtgcatgcacactcggtccaaaggatctgcacacctacta

SEQ ID NO: 159589 - DNA, 454 bp, Arabidopsis thaliana landsberg
  unsure (1)..(454): unsure at all n locations
ccggatctgaatgatcaacttatagtgtttggaagagtccttaagggagaggatgtagtacaggtttgatccaactaagcacannnnnnnnnnnnnnnnnnnnnnnnnnatagtttcatgtgttaaaagattaaatcatattattacaggagatcgaagaagtggatacggatgagcatttccaaccgaaatcgccaatagggatcactggtgttgtactgaaactagagacatgaaatgaaaatttctcttccttgcttcctctgtaaatgaggctcacgccaaatccttcttcatactcgctcttttgtataaatcctcttttgaggtttttttctttctttctattttacagtttcttgttgttttgtaattttatttgatttttctcgaggaaatagaatctttgtttaattatgcttctgatacttgagcaaatacatgaactgatttt

SEQ ID NO: 159590 - DNA, 105 bp, Arabidopsis thaliana landsberg
agaaatgctttgtatctagccacagcttcttgcaaaaagacatcattatcaacatgagctcttgaaacctgcaacaaaacacaaacaaacaaaatcaattacaaa

SEQ ID NO: 159591 - DNA, 147 bp, Arabidopsis thaliana landsberg
accattttcgtgtcttgactttggtttggttcaacgaagacacatagaggaagaagtcgccggagaagtgaaaagacgttgatggtgattatgaagaagatgaaagattcagtcttgttcctcgtcgtaggcctcttctctttaaaa

SEQ ID NO: 159592 - DNA, 208 bp, Arabidopsis thaliana landsberg
ggttaaacatatgggcagagattctctgcttcggggatcgtgtattctacaaagattggtcatatgcaaaaagtgtgggatatgtgagctattttactcagaataggtcttatgatttttaatgttgtcgttgtttttgggtcatctatctaatcaaattcatgtattgcttgtcttcctttatcagttctgcataatctggaatatg

SEQ ID NO: 159593 - DNA, 103 bp, Arabidopsis thaliana landsberg
ggcttcttgttttgaaattacaggaagtgttaatgggaaaagcagagtattttgagtctttcaagcagaacgcagatgggtttatctgttctatattgcctgg

SEQ ID NO: 159594 - DNA, 325 bp, Arabidopsis thaliana landsberg; identical to SEQ ID NO: 55042
  unsure (1)..(325): unsure at all n locations

SEQ ID NO: 159595 - DNA, 100 bp, Arabidopsis thaliana landsberg
ggaggggtttggtgttgaacatatttaacaagagatgcttgcttatgaatctgatcatcttagggctcaacaaagaagaacttggtaccgctatcatgga

SEQ ID NO: 159596 - DNA, 354 bp, Arabidopsis thaliana landsberg
gactagtttaacttgagggtctctgttgcggtggcacttagatttggttaaagaacttgttgtctaggataatttattgagcatgttaatcacctgtaaactgaggaaacaaaactactcaattaccccatcctcgggaattctttatctaattgatttctttatttactctgctattgtttactgcatcttgttacctgttgcttagtttttgcatttctctcctgttactcgaccagatactcgaccacctagttgtcggcaacagactgtgtagtcgagtatctttgtcagtgtctttgctgtttactcgacctgtcactcgaccacacccagtgcttggcagcaagctgt

SEQ ID NO: 159597 - DNA, 288 bp, Arabidopsis thaliana landsberg
cgaaaaaatcatcacaacttataatagaatttagaattcaactataataaaaaaaaaaagtatacatattgaaattcttaaaattcgttacaacatcaggaatctgtaatatttgctattcgtataagcaaaatgtacaattcacatcactaagacagattacttaacgaagacgtttagttaccttatttttcttcgtcgccgtttcacacacaaacactacaactagtggtaaacgtatacttaacggcgttgtctccgacggtaactccgtagacaatgttaccg

SEQ ID NO: 159598 - DNA, 278 bp, Arabidopsis thaliana landsberg
catgtacatgttttaaaagggtgttatgctttgtttctcagatggtgatcccaccagcagtgagaccaccacgtctcttcgactacctaaaaccttacgtgctgaaaatgcatttcacaaacaagtttgaccacgcacatgtcatccactcaccaacagccacagtggcttgctcagcgagctcgcaagagacagcattgagagaaacaatggacatcacacgcgacgtcgctgctgcttcaaagattggtcaaattcttggagaaagactcttgatg

SEQ ID NO: 159599 - DNA, 154 bp, Arabidopsis thaliana landsberg
aaccattgctggcaaaccaacgaaagcaagtccaggggcaagcgctggtggaaagacatgcttgtatagaggttcaacacgtttttcatcaatgcgcaaatagccatttgtttcaagaaatgggaagttatacttgtacctagacacacaaacc

SEQ ID NO: 159600 - DNA, 462 bp, Arabidopsis thaliana landsberg
aaataacatgtagtcgtgggatcatgctgttgggatcatatgtgtacatgaagctggaggaaaggttggtgaaatcatattgctctggtctttcctcatgatagttttatgaacttaggaatctacacagagcctgaaaaggaacaaaacttttttcattctgaggatcatgatctctttcttgctctctaatctcatcaggtaacagattgggaaggagatgaaataaatttggaggaagatcaatcagaaaggaggctcatttttccggcgggcggtgttgtagtaagcaacggaagtttacataatcagattcttgagatgatctcttctgcttcaccaactctttgatttatgacactactactctctatacacttgttaatgtttaccgttactatttatgtatcataattcttttctaacaataagcttataagaaaaaggaaaacattaacctcc

SEQ ID NO: 159601 - DNA, 225 bp, Arabidopsis thaliana landsberg
ccgtgtcatgtacgagccgtgaacgtggtatgatcgatgtgctacggcgaggcggagcggatgttacggtggcttccgttgagaatcaggtcggcgttcatgcttgccatggaatcaaaatggtcgctgatactcttctctctgatatcaccgactcggttttcgaccttattatgctccctgtacgtctctctctgccaatctgaatccatttaggtatccaaa

SEQ ID NO: 159602 - DNA, 255 bp, Arabidopsis thaliana landsberg
ctctcatcctctctcttcttcagtgtttactttttctctttctctttttttttctctttattattacgcttcaatgagttttatctgatagaatctgctccacccaaaaacagcataagaagaaattcattgtcagagaaaagtgcaaaaaaaaaaacgatcttcttcatcattctactaaatgggttcttgcctcagttctcgtgtccttagtccggtttctacaattctccatctcccatttttttttttttt

SEQ ID NO: 159603 - DNA, 140 bp, Arabidopsis thaliana landsberg
tgtgatgctaacaatcaagatgtgatcagaagtcactaagtcaagccaagcaataacaggttttggtgtgttctagcagtcctaagtgaacatgcaggaaacagaaaatcaagcagaaacagtaaaacactcgaccaaca

SEQ ID NO: 159604 - DNA, 374 bp, Arabidopsis thaliana landsberg
tacagggcgagattgctactcctagctagtttcctaatacattttttcaataataagaagagattaatttgattttttaaaaaaggtcataataatagtcaatctcatcctctactccaaaattgtagtgctaatcaaacgtgggattatataacagactacaatgtaaatagtaggatccaccaaactcaaaaatatttgcaacaattttttctgttaaaatggctttcaaactttaaggccgaatcgatgacttatgtatcttattttctggggtctggctagatcatctgttagcacactaaattttgtaatttcctacaaaatgcatgaataatattcacaaaatatcttataaggatcttcagtatctg

SEQ ID NO: 159605 - DNA, 381 bp, Arabidopsis thaliana landsberg
gtgaaaacgtttttccttccattagcctttcaaggtccgagattgcaacgtcgtcatttatagctgcttcccctcttctctgtgcactgatactgagattgccttcgttcacgtttgcagtaccgctaggacctcccacttcaattgatgctggctccggtttctgaaaagtttttcgaatcaattaatgggagaaaatgatgtatgccatcatagcaaatcacaaaagcaggcattaaatgacgagagaatgaataggaggagggaataaaattgtgatatttacttggaatcaagcgaaaaatccaacgcaagagcacggaacagaaagattacaacattcttaggttatgcaaagatctgtgttatcatggtatattc

SEQ ID NO: 159606 - DNA, 227 bp, Arabidopsis thaliana landsberg
cagcatttgaaaaaccaacccactaagacctcgtcaaagtaatgtgagagagagatagaatgaatacccaccaacagcacaatctctgggaatgtgaaatgtttgtctcgattcttcctcttcttcttcgtcgttttagacaagactgatatttccgattttttttcctgttttcatagctttttttcttctttgtttgtgtgcgttttggtcaatcagaggatgtg

SEQ ID NO: 159607 - DNA, 147 bp, Arabidopsis thaliana landsberg
ccatctgtttgttagcagtataagcctgcagaccccctcatgagtggagaaggatctatgcaacagaaagctgtacatacagctcaaatcagtaaaccttggtcagacatgaagagctaaattaatatctattttggagtcatggct

SEQ ID NO: 159608 - DNA, 440 bp, Arabidopsis thaliana landsberg; identical to SEQ ID NO: 9094

SEQ ID NO: 159609 - DNA, 397 bp, Arabidopsis thaliana landsberg
ccacatggatgcagtggtgctcgtcggacaggtctaaaaacctatttccgaagaaataattcacatctttacttaagtaagctaaaacttacacttaaagatttaaagccgacccagattcgcaccaaataagctgatagtaaggcagaacaatataagccgagtccgctcgcacgttctcgctgacctagaggcatccgcagggtaagccggacaccagcgccgcacctacaaagtacgacgagtcagtctcgcatacttcatacgtaagccttgtgattcgagttcaacgtatacaggataagtcaagggacgccttgccccataatacgtttcgaaactaagcttaaacgccaaggaaaacctcgcagaatataagccgaggataaccttgcac

SEQ ID NO: 159610 - DNA, 166 bp, Arabidopsis thaliana landsberg
gcctctgtttgtccttgttatgttgttgtaaaacttgaaacttttgaagcaaactcatttttataacaaaaggaaatcttattttatacattgcattaaagcaacatgaaagacaattcatgctggtcttgttcttgttcttggtcttatcagaaaatttgcctgt

SEQ ID NO: 159611 - DNA, 620 bp, Arabidopsis thaliana landsberg
tactgaatattgtgtagatagttatgaatagattagattgaagagaataagtttagttggtgatgaagactcgatttgtcgattttgtaaaccatttgtggaatatgcttttgtttgtcgaatatgcttataattaagtgaataagtttgtggattttctagtgattagtgaagaatcataatatatgatttgaatattattaattattgatttcgtgattaaatatagtgtttttagggatggaatgtgatcatattttgaattcaaaaaggacatagattccttatttttgtgaacggtttagattaaagggaattaattttattgaacggtttatattgaatcagatcatataaagtttaggaaattgttaagaccaaaatactcttaatgattttgaatagcaaagaacaaaatccaaaattgaaatcaaaattagggtcaaactagacaaaattccaatttgtacttcattttaataacaaacggatgacaatgagtgaattgattcacattatttatttattactcaaaacctcatcacattttcgttgtgggattttttaacgtctctttgaaattattagatttatttcggatgaaatatacctgaactata

SEQ ID NO: 159612 - DNA, 372 bp, Arabidopsis thaliana landsberg
aacaacaatggggttgaagctcaagcgaaggatgagtcaatagataccactcttgttaagtctgggtattgtcacctcttgagcaaaagaagagatagtgattcgacatgtcctgttcaacatacgagctggtcttgacacgaattaaaaaacgacccagatgagctccactgtacagaaatttgcctccctctgctttaagtaagctatattttgatgcagcaataacaccgaactgggactctgaaacttgatctcatgtacccatcggctgggaatgttcttagtaggttaagaagagagacaaaaattgaggagatggtaaaaaaaaaaaaaaaaaaaagagagaaaaaagaaaagaggagattgtaa

SEQ ID NO: 159613 - DNA, 685 bp, Arabidopsis thaliana landsberg
atgctgcagttgtctagatccctgacttgtcaaccagacagttcttttacattccagttaccgaaaacttcgttgtggtaattaggttttgtgctagatgaaataatcacttcagtgatcataccgttttgcttgttcatagtggcgacagacacagacacactcatcaacgcagatacatgtcgatgtatatgtatgcataacttttagtttttttcttgtacatagttcatcagctgtactacatatctagatgaatcatattcatatgtgccaagctgtagtttttcattcttcaaactctacttaactcttactggtcgctaatttgcatgaccatctgttctttttatgcaggatgttttatggaccaggtgggccatatgctctgtttgcagggaaagatgcaagccgagctctggcaaagatgtcatttgaggaccaagacttgactggagacatctcaggtctcggtgcatttgagctagaggcgttacaagactgggagtacaagttcatgagcaagtatgctaaggttggtactgtcaaagtggctggttcagaacctgaaaccgcatctgtctctgaacccacagagaatgttgagcaagatgctcatgtaaccacaacgcctagaagaccgttgttgataagagtgatgatgctcctgctgagactgtgttga

SEQ ID NO: 159614 - DNA, 928 bp, Arabidopsis thaliana landsberg
atggtgttaggaaagcgtcatggatcactgatcaagagaacaactagcatgaagatgatcacactcgatacacccacgatctatgacgcatctcagccgtccgatcatctaacctttcatcaacaccctcacaatccgatggtggtgatggctagtaactacgatgatttcttgaagacttgtagtctctgcaatcgaagtctctgccatcatcgtgacatttacatgtataggtacgattttatttactttttattttgtaaattttataaacgtaattaacccttcacacaatttgaaatgatatgttttgatcatggttgtatgctatatagttttaatgaatattttttttgtatatattgaatcgtttttgtagagggaacaacgcattttgtagcttagaatgcagggagaagcaaattaagctggacgagaaaaaagcgaaaaccggcttcgtatcatcgaagaaaccaattcgtatttagttgatcatctatgatctaaaatgataacgatagtttttccttatgagtaaaatgaatatgtttttgcgtttcgtgtacaagaatgatgaaaataaagagagaaaaaatgagactaaatgagtgtagtgatcatatagtaatgggacttcataagcatgatttgatttgttcgtgtgatttgtttctttgtgatgtgtaatatgtaatgtaatatcaatgttgatgtatattcaggtggtcttcttagttcttactacttgtcgtaacatataaagatatttagtaaacgtactctgattttataatatcagatggaccgtttcttaaatggacttagaaaatagaatttgtgatagtgatcagttctgagaaattctataaataattgtatcgaatcttgggtgacgaaaaccaaaagattttcctctctgttttttaag

SEQ ID NO: 159615 - DNA, 1305 bp, Arabidopsis thaliana landsberg
atggtcgacgcagcatcatatatatgttctaccgcgaaagcagcagcctcttctcaaatggaggcagccattgatgcattgtcccgggatttaactaaattaagaactggaagagccgctccaggtacttatcacctctttctttcgggtttaggttaagcctctctctctctgtgtgtgcttattgtgtgcatttgcaggaatgcttgatcatattgttgttgaaacgggaggagtaaagatgccactcaatcacttagctttggtctctgtcttggatcctaagactctctctgtcaatccttatgatcccgatgtatactgattctttctttctctttttctaagaaaaacttcgactacattagagtgtcatttttctccaacaagccgccattgacgctttgtttgtctctgcagacggtgaaagaacttgagaaagcaatagtcgcgtcgccattaggattaaacccgaaactggatgggcaacgactggtcgcatctatcccagcgtatgaaagttcttctctgtcaaatttcattgtttatcacagccgtaattgactgactttgtctgatttccgctctatgtttttatttcgtgagcagattgaccaaggagcatattcaggtaaagcatccaagtcatgtgttattgtttagtcactgaggttgagccttgaccctatctatctatatgaactccaggcaatgtgcaagattgttacaaagtccagtgaagttgtcaaacaaagcataagaagagcgaggcaaaaggtagttttgaatggtgtagagaacaaccatagaagctgtttgttgtaaactgtctccaatacgtcagaacatctaatgatcagagacattttttttggtcaggcactggacacattaaagaaagcaggctcgagtctaccaaaggatgaagtaaaaagactggagaaggaagtgagtgtcattgtatgatctttctgcaaatatgcatcctacttcagttactgaaaataatggcctttgtgtgaacaggtagatgagttgacgaagaaatttgtgaagtcagcagaggacatgtgcaagtccaaagagaaagagatcaccgaagcctgattcatcatttctatacatcactagtcttttcacgctaccttgaaagaatcttttattcattgccaagatttgttttcaacttttgaatgtttgatttggggatcttggaactgcaagaaaattgatgatgaatagcgacggtaggcccttcatagggcccaagataggccttaatagaattccaataagtatgatgtt

SEQ ID NO: 159616 - DNA, 381 bp, Arabidopsis thaliana landsberg
atatgtgtttcttttccttctaatatactttgtggtctattgtgattcctcgggttagagactatgctgacaggccttgttcttgtattgcaggcttgctcaaacatgctttaataaatgtgtggataaaaggtaaactatttctccttttgatgttctataattacgtcgtggaacttgtctgcaattgttgaaacttttcttagctgagagatgagtaagttgcacctgttttgagattctttgcctaattctcaggtacaaggaagctgagctaaacatgggtgagaatagttgcatcgaccgttgtgtttccaagtactggcaggtaaggctctctgatacttcaacaattaacaatttgatacttcaaatcttctc

SEQ ID NO: 159617 - DNA, 5559 bp, Arabidopsis thaliana landsberg
  unsure (1)..(5559): unsure at all n locations
caataacttgaatcttttcatacatcttcagaagcttcaaaaagaattcaaacattttaaacaaaaaaacaatagatatggctttcgtgagaagtctattgggagcaaagaagattctaagccgctccaccggagcaggatctgcggcaccaaaagggtttcttgcggtgtacgtaggagagagccagaagaagagatatttggtgcctgtctcatatttaaaccagccttcatttcaagctcttctcagtaaatccgaagaagagtttggatttgatcatccgatgggaggcttaacgatcccttgtcccgaagataccttcatcaatgtgacttctcggctccaatgatgatgatccaacattttttccttcagttagaaatagacttattcattgtaaatagatgagccctttttcctctttcttcttgaaagagttgttctaaaagtgtagaaagtgaaatacaaaattgatgttatatacaaacttcatgtcaatacttttttgattgatcattgaaaaagaaagacaacaccaaattcaccaatcaaaaactactctaattatagtttcatgttgattaaatataaataagtggaatatctaaacatccggatccgtggcgcaatggtagcgcgtctgactccagatcagaaggttgcgtgttcgattcacgtcgggttcaatcccccgaacaatttccggatttttttttttttcttctcctgaagtctatcccatacggcccaatcatactaagttaagcccaataaagcccttatcaataattctaattgcccccctaattatacgactagggtttatctgtcctaagccatgaaaattatttgaaagggtttaacagagagattcctcgtaacacttccctctgtactaatttcaaattcgtttacgtttcttcatctattctggctgcttgcagccaatttttttgaagttcgaagcttcaattgaaatgggttcgtcagtgattacttcattgtcactgagcttcaagcaagttccaccagcagctattcctgctttccttgactgtgttttaagctccacaggcgtatctccttcaactcttttcgaatctctcattgagcaattcccttttcgtttagaggtattgattgattggtttattgtttcacacttcggcaatttgcttcggattgttcaatttaagatttgaacatgtttttgaataggatacggtaaatggggacaagagatttgattctgatgattgcaaccacatagcttcattggtggctgggctttgtcatctactaaagaattttggtgagttaccaattttgaatttttagatatgtatgatgtgttagtgattacagaattgtttaattgatggttatgaggttgaagcaggctttgttgctacggataatcataatgcgttgcagctatttgtgtggagagtgtttattccattgatgaagatggttcgtgcatatgatttggatatgcttaataaggtagaaatttctgctgttgactatagtccttagagttttgatctccttgagattgttgatcattttgttgtttcttttggtttctttgtttgattgtaccagattgtagaatcgttctttgatgtagtgatcgagactaatgtattggatatgttgggagtgagcttggtgccatttttactaagatcagttggtttttcgatgggaatgcgtcaacacgaagaatcagatttcatcaaatggggcgacctctgcctccgtgattctttgaatacaatagatatggatgaaaactacattgcacagttgtctggatcatttcgaattccattgtcgtgccatcttctgaatttgattctgaatgctgcttttcaaagtcaccaagcagctccgaaggtggaaagttttgcagctggtatgctttgggatttgtgtaatacgactgagcggcttttgtcacaaagtgtagaacatcgttcttgtgctgttagtttcctcctccctgctattttcaaggcattctcttctcagtcatccttgaagatctcacaccaaggaaatctgttcatactttcaaggtgaggttaagaaccaaaaatttatgtgctttttggttagtttttttctttgatctctttaatgatttttaaagctgtaaactccaggaatggcttcataaaaagaatttgggaatgctgcaagaagctgttctcggttggatcaatagagagaagggatgcttacagtgttctgtctttgtgtctttcttctggctcttggactgacggaactgaaagttttgtttcagaaaaagacgctgttcaatttgacttgaggtctgaacaagagttttggcatgaaatcaagataggcttggtatggcaaaaataccgctattcttacagattctccaatttccacaatagggtcatccatgagtacaaaacatttcttttcaggttgttgatgagagcttagtaaggaagcagtcattgcatatacttaaatcagttttatccattattgaagtgagtgagaccatttctgagaagaagcccgaagggaattcagttaatcggtctatgacaagaaaggagacgtgggcagaaaaggaagccaagtcgcttggcgtcggagaattgtatggctctgtcgactctgggttgactagtcagcagggatggcaagcttttctgctcttgtatgagatgcttgaggagtacggcactcatcttgtagaagcagcatggagtaaccaggtcagttaatctctctggtatttgtaaatattctgctcttgatgcgtttctcctctgctcattgctttttttaatctacctttcagattgatttattaatcaagtcatctctcagatatgatggaaccttgaaatccgactgtaataactctcatcatggtcacatggaaactccagatgaagaagctaaaatttttaattggttagaggttctttggaatcgaggctttcgtcatgataaccctctaggtactgtttgcttgttgtagcatattgtttagttagtattcaacaatttcttacacttgttcatcagataaaatcagtatttgaagttgtcccattgtggccaaaaattctcttttactcatggatagagcgtcacttaaagtaaagtatccatgttggcaacacactttggttaattcagacctccatttatatcagttctgtttctaattcatctatttcaattttagtcaggtgcacggtcatggagtcatttttcggtatcgagtggagaagatacaaaacatgtacacaatcaatgtcccaaactttcgttcttggtcctttcatagagggtttgaatgatcctacacaccacaaggattttggtatgtgcttcttgaagaaatgtattccaatgtctttaataaattgtattggaactcttcattgttttaaagccatcttgccgaagtgataacggataactagacttatttcttgcttattctgctctcccagggctgaaaggaatctatacatcaagaacaattgaaggtgcagctcaatatgtgtgtgcgtacacaagttgcctcaacccaaggtaggatgtctcaagttacaattccaactttttatgtttgttgctttcatgtaaatatgttatcggtcatgtgcggctggatatgttctctagggtctgtgaattattaaaccataaataaaaatcattatgttattgaactgtttactnnnnnnnnnnnnnnnnnnnnnnnnnnnnnnnnnnnnnnnnnnnnnnnnnnnnnnnnnnntctttttgtagagctggatttatggctctcgtacaatgtattgtttctacggcatatgtagttgtaggatacggggacaagaaaatggggcacctcgaagataaattctctgggactgcccaggaatcttcttgtggacatttaagtcaagatgatatgacacatatactggatgtcttgaagtttgttgcagagagcagcagacagcattttaatcataaatacggtattcgaggtcactaatcagttatcttgttaaagtcaattatacgtatgtggaattataattttgtagcttccctcacgatattaaacacactaaaattccttcttttgattgttcttttccattttctagtttatcaaaaagtgttagaaactgctgcttctgtggtgaacccttgtaatgttcctcttggaacactattgcagtttgtttcagcaattcctcgggagtttactgaccatgatggtgagcgggagactatttacatatggaaagtaaatggaaggtcatcgtctaacatcatatgctttcttctatgtcaggtttattgcgcaaaatgatgttagaatggctccaggggtgcaacagaaagacttccaacagtttatgtactgatggcactcgtcttctggcgagcctttatgagtatctgaaaggatttatcagtgataatgttgagagttttgatgatgaagacttggaggcatgggattcccaaacaaaacgatgggcaagagtatttttcctcatgattaataaagaagaacatctcaccgatatcataatggtttgtattccttgactttgattttgacctgtcaacaaaatatttctggtgcaaatttgacaataatccctatctctgcagtttgtgcaaaataacggccttagttttttccaagagaagaaccatttaaaacgagcacctgcgaagtttttaatctttattctgagtatgcttttagagctccagaacatgcaagatggaatttctgagcttagttcttcggtgaaaagcaagtcaggcattggctctgatgagcaaactggcaagcagattgttgtcgatgcttccagtattaagaaaaagtttgctgtagttctcttatcaatactggtatgtgccaacactttttcttgatacacaataatagaattgtcctctcactaacttggcttactatgatggttccttcctggcatgacaatacagaaggagctgattccatttgctgattcatcttgttcaatattctggtctcatactactgaggagaatggtgctctgcctggctctgtcatatgaaaactagggggtgcaagacaaccccggctatctgttcctactacaacagctgtactggaagctgtatgatttcttttcttgtttttataggacaattacttacaaatttccataagcatagttccttggaggacaattacttacaaatttccttaagctcagttcaacattgaacaagtttcatgccagttctctatgatgagcaggtattgacggtgaaaactattggggtgatctcgtcatactgtgctcaattcactagtggtgttggtgaactcaaattgacattggctttcttttggaagttcacccagcatactatattatctcaaatttgtaattctgaagtaatggcctgcttttaaaaggccaaacttgataggatgcatgtaatgcgttaagctctcaacttttttgtgtcttctatggaatcacattgc

SEQ ID NO: 159618 - DNA, 1343 bp, Arabidopsis thaliana landsberg
acattgaaatagcagtcttcaagaaaaggaatatccgtgtcgcatatttaaggtaacttatcatcattgtaaaaacaactttaattagatatgtatccaaataattgccgacaaattagaagaaaacaaaaggaacacgaaggacttgctttcatacactaactggtgtcactagtcgtcgaagactaacgctgtcgtaggaaaatcagttccacgtgttccttacgctggatccgccaactgtttagatttttatttttcacgttattatataaagtcaaactctaattagagaacatgaaaccaaacttattataagaaagaaaaaaaaaacagaaacaagaacggtggaagagaccaagatgtgtagttccgattctcttcagcttcacaatgtcttcgtctatggtagctttcaagatcccgacgtcatcaacgtcatgcttgatcgtactcttgagatagtctccgcaacactcccgggcttgtacgtacctttctctgtttcttcttcgattgagttatttttctgtatagacctaagatttaatggccggttttggttttgttcatcagtcaaaggtttaggcttaaaggacgtttgtatccatgtattgttccttctgagaaaggagaagttcatggcaaggtttgattcttagatgattctttggttttaatttgtgtatgaaatatgggattttagggttttgatttgggaaatttggtgaattggtttgtgtaggtactaatgggagtaacaagtgatgagcttgagaatttagatgcggttgagggaaatgaatatgagagagtgaccgtcgggattgttcgggaggtaaaagtttaaaggttgatgattataaattttggaacattttggatgattataaattctgattttgcacatgcaggacaattcggagaagatggcagtgaaaacatatatatggatcaacaaggctgatcctgatatgtttggagaatggaatttcgaggtttgatgatttaaacaatgtatttttagcttttgtgaactcattatgactggaaaaatggtacattgtttcgattcgcttcttaggaatggaaacggttgcacaagaagaaattcatagagactttcaagaaaatcatggaatgtaagaagaaacctcagggacagggaaatgatgatattagccatgtcctacgcgaagatcaataggataagactccatcgtcttggatggacttgtgtttgagtatgttctatatataaccacctttgttaaattatcaacaacaaaaaaccttcgtttttaaaagtctaaaataaataaaacgtagagagtgttgtattg

SEQ ID NO: 159619 - DNA, 1577 bp, Arabidopsis thaliana landsberg
ggcaaacgacgacgtatgcgactattcatacggaagatgggttcgtcgacgccgtgatgtggacgaaacctcttattatggagaagagtgtcggtttctggatcctggttttcgttgtctgaataatggaagaaaagattctggttttcgacaatggcgatggcaaccacatggctgcgatcttccacggtaattcttatgtaattttgcttggacctgaaggtatggttctgagtaaaacaaacatcagggttagggttacaggcaattacattgatccattagagcttatagagttattacaatcactggttctaaaaactaactttaatcttgtttgattaaaaagaaacaaagatttgcccacttgaattttgaattgcttttgtgacgtaagggttgaaactttaaacctttatttatgaactttgcgccaatgccaatgccaatcaaattcaattttcttttactctatgtgttaaatatgtttacttgttgtgaaaacgattacagatttaacgcaagtgattttctggagaggagtcggaatgggaggattgtgttcgtcggagattctatcggaagaaaccaatgggaatctcttctgtgtatgctttcacaagcagtgtctaataaatctgagatatatgaagttaatggaaaccctataagcaagcataagggtttcctttcgatgcgatttccggaacaaaacctaaccgttgaatatcatagaacaccgtttctggttgtggttggtcggcctcctgagaactcaccggtagatgtcaaaatgactgttagagtcgatgagtttaactggcagtccaaaaaatgggtcggctctgatgttctagtcttcaatacagggcattggtggaacgaagacaagacctttatcgcgtaagatcttcatgttgaatgcaacattctggtaacaagagaaaggtgtttgatgagtcttaccgggtttcttcctgttgttgttgttgtggttgcaggggttgctattttcaggagggagggaaattgaacaagacgatgggagtaatggagggatttgagaagtctttaaagacatggaagtcatgggttttagagagactagattctgagaggagtcatgtcttcttcagaagcttctctcctgtacactacaggtctgtttcagaaacaattaaaagaggacgaatcagacgacatagtctttagaactttgacccaggtttgacctttatgggtgttgtaggaatgggacatggaacttgggtggtttgtgtgatgcagatacagagccagagactgatatgaagaaaatggaacctgaccctatccacaacaattatatttctcaagcaatccaagaaatgagatatgaacatagtaaggttaagtttctgaacattacatatctgaccgagttcaggaaagatgctcatccttcgcggtatcgagagcaaggcacttctgttgatgttcctcaagactgtagccactggtgcctacccggtgtaccagatacatggaatgagatcctctatgcgcaactcttgtcaatgaactatagaacaaagtga

SEQ ID NO: 159620 - DNA, 580 bp, Arabidopsis thaliana landsberg
accgtagaaggaaaaaacgacgctaaggatagtctcaataaaggagacgttggtgttgaggctaccgttgagaaagaggaagaaaacaattatgaaattgatcaacatggtggtggaggcggtgctgagttagagaccgtagaaatagatagtgcgtcagatgaggatgtacaaaattatagaggtggccatggcggaggatggaagggaggcggtggccaaggtggaggatggaaaggaggcggtggccaaggtggaggatggaaaggaggcggtggccaaggtggaggatggaagggaggcggtggccaaggcggaggatggaagggaggcggtggccaaggcggaggatggaaaggaggaggtggccaaggcggaggatggaaaggaggcggtggccgaggaggtggcggtggaggtggtgctgagttagaaaacgaagaaataaatggtgcctcagaagagattcaatggcaaggaggcggaggtggacatggtggaggatggcaaggaggcggaggtggacatggcggaggatggcagggaggtggaggaggacatggcggaggatggcagggag

SEQ ID NO: 159621 - DNA, 2072 bp, Arabidopsis thaliana landsberg
atcaccattatcattcactcgaccaatcactctaccacatggtcgagtaccttcatcaccttcactcgatcactctaccaccaagctgagtctcaccatcatcattcactcgaccaatcactccaccaacatggccgagtatcaccattatcattcactcgaccaatcactctaccaacatggccgagaatcaccatcatcattcactcgaccaatcactctaccactaagtcgagtactaccaccaccatccactcgaccaatccctctaccacatggtcgagtcccttatcatcattcactcgacgtccttactcgactgccagcttcagagtcttctccattccgcactcaaccagacactcgagcacaaggaagaaaagatgactccagcttatcactcgatcaccctactctaccacagggtcgagtacagttcttaatccgtcccaatactgcgtcgttttgagtattagggtttcagaaaattttgctataagtagcatgtactttacattttcgatgaaagagttttattctgcagacactgtgttcttgatgtttttgtaatccgtatttctcttaatctattcagtattcagtttttgcttttgatttcgtttactgttgttcatcctgttatcatcatgctataactctgttgatatcatgttttcatcctattcaacgtttatgctttctgctatgatgtctgagtagtgactagatttctgaggaagggttagagtagtttagaattctcagaatgctaggtggttgagtttgatttatagatcccttctggattagttgttcttaatgcctattgctttctgatcaactggaatttgagcccagacatttctacgcccaaaaggtgttcgataaaatgcccgaacccctaattccagagattcgtgaccctgtaccaaggtattggttgcagggagcgttttggctttaacttgttgattcttatatgcttgttaggttagctctcggcaatggtgagtgagtctgggactaggttaacttgagagtctctgttgcggtggcacttagatttggttaatgaacttgttgtctagggttaatttattgagcatgtcaatcacctgtaaactgaggaaacgaaactactcaattaccccatcctcggaaattctttatctgattgaattttttttttactctactgttgtttactgcatcttgttatctgtcgcttaatttctgcggttctttcttgttactcaacctcatactcgaccaccaaattgtctggcaacagactgtgcagtcgagtatctgtgttttattttctgtctgttactcctcacctagtgctctgcaaagagctatgttggtcgagtgttttactgcttctgcttgaatttctattttctgcatgttcacttagaattgctagaacacaccacaacctgttattgcttggcttgacttagtgacttctgatcacatcttgattgttagcatcacacccatttggatcgacaaccttcagtactacaacgacatgatagtcgctgtaggtttaatcgactgaaaaatctattatcaatatggcgcctttgccaattgggtgtttgtttgttacatttgacatttcagacttgcttagatcaagttcttttttcaattttcttttcggatactaactatgtgtttttcttgttgtcttcttgatccaggtacacttctgctgtatgtgaactcgatcaacaggcaatcagatgatctttttcgacgacaacatcaaccgcatagctcgcgaactcagaaaaaggagaaccacagtcaaccctgtacctcaggaaccactcgaaatggctgaagaacagaatcaacaaaatggccctgccaacattggtgctggagatgcaccacgtgatcaccgtcagaggaagggaattgcacctcctgctatccagaacaacaacttcgagatgaagagtggtctcatctcgatgattcaggggaacaaattccatggtctgccaatggaggatccactcgagcaccttgatgaattcgatagctctgcaacctaa

SEQ ID NO: 159622 - DNA, 3690 bp, Arabidopsis thaliana landsberg
atcggcttcaaagttttcaaaagtacctcaagtttctcttttgacttctctagctgctttcgtttcttctgattccctttcttccgctttggtccacctccacggcggtaataagaagagcttacggcttgcgtcgtgtccatatcgtcctcttcgttcctactttcctcaagcgaagcttctaattgctgatctctaccgtcggactcctccagatcctgcaagttctgcgtttcttcgtcttgtgttgattctaaatttaaggctttttcagcgacattctccacggaaagacttccttgctctactacgctcggcttctcgattaaactagggttctgcgaaagagtttctgcatctcgatcggtgggatctgacggcggagaagaagccatggctgatcttctcctcggaaaagctaaactgaagaaaattagacggtcgcgagacaaaaagcctttctgaaaggaaattaaccaatcacgaagagccacgtcaataatccgagcacttatttttcattggccagtgccccaaggcccaaacactcatttaccattatttcatgggccaacatagaggcccaatttagcgctaaaatccaagaattacatgatacacccgaatctttctctttttcacgaaacattccaaaatattctcgagtctattcagattcactctcttgtcactgttagatcttccagtttctccgatacctttaacggtaactttctggtgctccactgcaaaatcagcggttataaaaaaaaaactcaaaaccttcttctcaacactcctttgcttgatcttctccctctctcgttactctcttcggaaatgataatgtctctccctcagtgttctcatctgcgtctctctattctcgctgcgacggcggcgatgttaatggtgattacgactgcgcagatcggcggtcaagtgatacaggtggagttatggtgtgtggcgaagaacaacgcggaagattcgtcgctacagacggcgattgagtgggcttgtggtcaaggcggagccgattgtggtccgattcagcaaggtggaccttgtaacgacccgacggatgttcagaaaatggcgtcgtttgttttcaacaattattatctgaagaacggcgaggaggacgaagcttgcaatttcaacaataacgctgctcttacttcactcaatccaagtaaaaagccttcttctaagaatcgatatcttatatctgctagtgtagtgtagtgaaatcaggattatcatgatgatctcttttgaaatagaaattcaagtcttagattcagatacatatgtgcatcttgttgaagtaattttccccccaatgtgtgttttcaggtcagggaacttgcaaatatccttcgaggtaatcaatttcaaactatctttgtgatttgaattattcaatttcagtttcctcaataagagctaatcctattttggtaataatggatttggttcttagattgttcaatacatgaatgtatgtctttgtttatacttgtgtgattctctgtgtagctttgttcactgatgattcaaatctatataccttatttcaacaatactctttaaaatcttatgatgtgcagtaagggagccaacaatggtcgattagcggatgacacttcaatgggtgcaggacaagcagatatgagccgtggtggcagaccgatttccagcagttggatggtgaccttcatcggtttcggtagcttattgacgatgacatggataattcatcatctttaggctcacacgcatgatgctctcattgatgatatgagagacggatactattttgatctctcttagtttacctttgaagataagcgtaatatctaattctttttttgtctggcattttgatctttctttctgtgaatgaacttataaggatgtaatatcatcaaccataattgtttaatcgattcaatgattggtcttttatcgttagagatttcatatataggttcaattggttttctttcacgattgcatgatttgatctttcctacttaccgaattggttaatagctcctcgattgccactagtccactatcccgactcaccatctttgcttgagctgataggctttcccaaagccatactgtctcaacaccatcaggtagctgtcctgatgctaccttttgaggctgtgataagataacactgcagtttcctttcgaaaccaaaacgcgaatagccctcaataaccctgtatatgtcttgagatgtctccgacgatcagcatcaaattaagtggtgtacttccacctctaaaaattgtttggcctagtaagtctactaaaatcctgtcacgtgtattttctttagcaccggaaatatacccaagtaaggattagtaaaagagaagaagagatagagatagaacctaccgtggaatcgacttgagggatcagggtcggctcaacaaaacgtgggaccctgtgctcattaatttgttttctaatatatgttctatatgtttagattttagtttgattatacactattgtttgtataatggaccttgattgcttaaagaaaatgaatgaaaaaataaaggaccctgtgcactagcaccaacggcacaccctctaagccgggcctgcgagggatcaatcatgtttttaacggattcaagacaagagagatgcggaagaaggcagacaagactagcggaggaaagggttgttcaatgaaaccaaaactacagtatgtgtatttgtctttttaaattttaaaagtccaaaaatcagacaaaataaaataagggctggttggcaaaaagatttagtcaatcccgaatagagagttattcgcgtttccaaacaaactctctggctttacactcgacggactacgaataacgacggtttgccaaatctcttccatctcatccgccgagcgatattggtgagttttttctcctctttcgtactttgattattttgatgtggacgtttgggaattagggttccttctgctactcaaatgctgacaattttaccattctcgtataagatttaggatcgtattttggggattcttgtcgcataaatcgttcaattttggatccgagtatcgtatctgctcacaatttgtttatgaaatctatacaactatgaaagatgcacttggtttttgagattctgtgattgagctaatgcttcattaccttttgttgaaatctttacttatgtggttaagctttctctaaacagttgatagctcaaaaaatggaggacactgggagcattaagcaagaagcacagtctcatcctccagggatcttcgagataccgggggagcctgcggttgttatcaatggtgtgcctgatgaacctcaaactgattgtatgattgccaaagatgaaccaatatcaagtggcactgtaggaagcggggaatggcttgagggtagagaagttcgcaagtttttcttgggtcgctactattctggtacggtgacaaagttcgataaacaatctggatggtacagagttgaatatgaagatggggattctgaagatcttgactggtctgagcttgaagaagtgcttctacctttggatgttactgtcccattgaggtctatctcattgcatatcatcaagaatcgacaaatacatgcccagctttatggatacacgccacaacgctag

SEQ ID NO: 159623 - DNA, 535 bp, Arabidopsis thaliana landsberg
  unsure (1)..(535): unsure at all n locations
cattttctctcactttctcgagaaaatataacttcagaacttttcagagttagtttgacttcaaacgtgggaaaaaatggccggaagtcttgtaaaatgcagcaagatccgtcacattgtgagactcagacaaannnnnnnnnnnnnnnnnnnnnnnnnnnnnnnnnnnnnnntcagccgttgtgtaccgtcggatgttccatctggacacgtggcagtttgtgtgggtagcggttgcaggagatttgtggtgcgtgcgtcgtacctgaaccatcctatcataagcaatcttctggttcaagctgaggaagagtttggttttgctaaccaaggaccgttggttattccttgtgaagaatcggttttcgaagaagcgatccggtttatatctcggtctgattcttctcggtctatccggtttacttgtcctgatgatcttcagaaatgtaacggaggaatcaaaatcaaaagcaagctagatctgatgattgaatctcgaccgttgcttcatggcgtcgctgagaaagctatctgg

SEQ ID NO: 159624 - DNA, 345 bp, Arabidopsis thaliana landsberg
ctgtttctttttcctataaaattgcagattttgtatcacacatgggatctaaacctagctcgctggctgatgaagtagccattattgttgagcaagtagacaaggttatggggatggttttttgtagccccctctactgggaatctatagaactccttgcaaaagatgagctttcacgagccatattttatgaactatcagaaggaagtaagattgattatcttaaatacaagacaaaagcttccatggtcccagaaatgacacggttttatagttaaaagcttaaaacatctatgtttttatgtttttggattttcgtgttgtgcttgagtttgatattgtcga

SEQ ID NO: 159625 - DNA, 1003 bp, Arabidopsis thaliana landsberg
taccaaacgatctggggctttgttgttgtgcctgcttgtccaaacaaattcaacactggagaatttttgcctccaatatttgatctctctgatccaattgtggactttaaagttttgtgtttctcccttgactagcttcaagactatacgattatccccttcaaataacactttcttgtgtccttgtatccatgtgtgttgtattgccattaccaagctttgaattcctcgcttatagtattgcctccggagacatcttttgcatattgcattggttattaagttctgattctgatctagagcccttgatataagtattatgcagtgattataattgggcttttatggcccaatcattgagctgattaatatattggactttaatggcccaaatcatggtaaacaaaactcatcctactgatagaagaaaccctcgttactatcctctcactctccgaagcgattcagaaagttttaacccaaaaaagcaaaaaaaaaaaaacttttccccactcgagggcggcgaagagaatcggagccggtaaatctggcggcggagatccaaacatattagcgaggatttcaaactccgagatcgtgtcccaaggaagacgcgcagcaggagatgccgtcgaagtatcgaagaaactgctccggagcaccggaaaagcagcgtggatcgctgggacaacttttctcatacttgttgttccattgatcatcgagatggatcgagaggcacaaatcaacgaaattgagcttcaacaggccagtctcctcggagctccaccatctccaatgcaaaggggattgtaagaatcccttattatggattagggtcctctgttttacgagtttttttggttatatgttgttggttgaatttgaatttcgtataagagtggtttaattcacatcgttggattcataaagttcaggctttggtgttttatatataatcttgagattgatttgcaatcaataatttgggtttttggattca

SEQ ID NO: 159626 - DNA, 349 bp, Arabidopsis thaliana landsberg
catgtacatagctaaaatagctaaactttttagagtatcagtagcccatttaatattttttaatgtaccgaaatacataaaattgggatgagccgtatcagtccattgagacttctgatactcagtctcatattacgtggcaggacgtgatttgtcgcccatttgtttttgtcgaaagaagaaaaaaaaaattccttttgtttctctcaaaaatattctctttcggggcgattttgccgatcaattttcttctgtttcaattccttctgaatctcttcccttttctcgaaaatacttaaacatgtggtatcaccaatgcaaacatatttactaagaatatcataaaaaa

SEQ ID NO: 159627 - DNA, 2047 bp, Arabidopsis thaliana landsberg
  unsure (1)..(2047): unsure at all n locations
gtctggtttaacttgagggtctctattgcggtggtacttagatttggttactgaacttgttgtctagggataatttgttgagcatatcaatcacctgtaaactgaggaaacaaaactactcaattaccccatcctcgagagttctttatctgattgatttctttgtttactctgctgttttttactgcatcttgttacttgttgctaagtttttgcatttctctcctgttactcgacctgatactcgaccacccagttttctggcaacagactgtgcagtcgagtatccctgttggcaacaagctgtgttggtcgagtgttttactgtttctgcttgaatttcagtttcctgcatgttcacttaggactgctagaaactccaaaacctgttattgcttggcttgactctgtgaactctgattgcatcttgattgttagcatcacacccatttggattgacaacctaaaatactacaacgacatgatagtgctttaagtttaattgactaaaaacctattatcaatttggcgtctttgccaacacagcttgggggagttgataagtgtgcattttacatgttttaagcatccatttattatcactattgcatcatatcaccactgttttataccatttcttatcatttctcatcactttgcatgtttaggatagttttgcatgcatattgcatatttgtgttgttttcaggtgatctggagatgttggtgagctaattggaagaagtgaacctgatcaaatcaacatactcgaccaatactactcgagttacgtcatcctggacttcctgaaatactcggccacaacctcttcaacacaccactcgacccccttgtcgagtagatgactttatcacttcacaccaccactcgaccccctggtcgagtagttgccttcaccattcctcatcactactcgaccaagtgatcgagtatcaccacatccaattctcgccgtccactcgatcactcccactcgaccacgaggtcgagtactaccacaaccacctacttgaccaatcactctaccacgttgtcgagtcccttgtcatcagccactcgattgtccactctgtcaccaagtcgagtctcaccatcatcctccacttgaccaatcactcgaccaatcactcgaccacctgggtcgagtagagttcttaatccatcccaatatgatgtcgtcccaatacagttcttaatccggcccaataagtagcatgtattttacattttcgaagacaaagttttattccgcaaacactgtgtgttcttgatattttgtaatccggatttctattaatctattcagtatttgcttttcatttcttttactaagttgttcatcctgttatcatcttgctattactctgttgctatcatgttttcattcttatcatcgtttatgctttttgcaatgatgtctgagtagtgagtaggtttctgaggatgggttagagtagtttagaattctcattatgctaggtggttgagtttgatttttcgatcccttctggattagttgttcttaatgcctattgctttctgataaactggaatttgagcccagacattcatggctctgtacaaaggtattggttacatggagcgttttggctttacttgttgattcgtaatgcctattaggttagctctcgtcaatggtgattgattctgggactggttaactgtgagggtctctattgttttgacacttagatttggttatcgaacttgttgtctagggataatttattgagcatgtcaatcacttganaactgaggaaacaaaactactcaattaccccatcctcgagaatttctcatctaattgatttcttgtttactttgctattgtttactgcattttgttacctgttgcttagttttgcaacttttgcctgttactcgacctgatactcgaccacccagttgtctggtaagagactgtgcagtcgagtatccctgttacattttctgtctgttactcgtccagtcactcaaccacacccagtacttggcaacgagctgt

SEQ ID NO: 159628 - DNA, 1778 bp, Arabidopsis thaliana landsberg
atgtcagttgctagtgtagcgttgagtccagccctggaggaacttgtcaactttccaggtattattggacggtttggtttcaacttagacgacccaatcctggtttttctgactattgctggatctgtgatccctaagcgggtcatggagtctgattcaatagcatctgtgaagctaaggattcagagtatcaagggtttttttgtgaagaagcagaaacttctgtatgatggtagagaggtatctcgaaatgattcccaaattcgagattatggccttgctgatgggaaactgttgcatttggttattagactttcagatctccaagctatttctctaagaactgtttgtgggaaagagtttgagctcgttgttgagaggagtagaaatgttggttacgtgaagcagcaaattgcttcaaaggaaaaagagctcggaattcccagggatcatgaactcacattagatggtgaagagctggatgaccagagactcatcactgatatctgtaaaaatggagagaatgtgattcacttgctaattagcaaatccgctaaagtcagagctaaaccagtggggaaggattttgaagtgtttatcgaagatgtaaatcacaagcacaatgtggatggtagaagaggaaaaaacatatcatcagaagcgaagcctaaagagttcttcgtggagccttttattgttaatcctgaaattaaacttccgatattgctgaaagagcttatcagctccactttagaaggcttggagaagggaaatggcccgattcgatcatctgatggatcaggaggagcttattgtatgcaagatccatctggacacaagtatgtctctgtcttcaagcccattgacgaggaaccaatggctgtgaacaatccgcatggacagcctgtttcagttgatggcgagggactaaagaaaggcacacaggttggtgaaggagctatcagagaagtagcagcctacgttttggactatcctatgactggaccacgaacttttcctcatgaccaaaccggttttgctggagttccgccaacaacaatggtcaaatgcttgcacaaagatttcaaccatcctaatggttacagtttctctcccgagaacacaaagattggttccctccagatgtttgtgagtaatgttggaagttgcgaagatatgggataccgagtattccctgtcgatcaggttcacaaaatatcagttctagacataagactggctaatgctgatcgtcatgctggcaacattttggttagccgagacggaaaagatggtcagatggtgcttactccaatagaccacggctattgctttcccaataaggtaaaatgacactccaatatacacaacaaacacaagtgtgcttacgatattcacactttgttttcttaatttcataacaccttatttgtttttgtgcagtttgaagattgcacattcgaatggctatactggcctcaagcaaaagagccatactcttcagagacattggaatacatcaaatccttggaccccgagcaagacatcgaacttctgagattccatggttgggagattccgccttcatgcgcccgtgtcctccgaatttcaaccatgcttctaaaaaaaggttctgcaaagggtctcacaccttttacaatcggaagcataatgtgcagagaaacactcaaggaagaatctgtaatcgaacaaatcatacatgatgcagaagccatagtgcccacagagacaccgaagatgagtttataagcactgtc

SEQ ID NO: 159629 - DNA, 290 bp, Arabidopsis thaliana landsberg
cactttgatctgtctctacgcgaagcagtctccgactcatccagataccaaagtttagagagaagaccaaagagaacaaaaagagaaaaagagaaagatgaggttgttcgatccatggccagtgttcttcaagagagaatggaaacgttgttggccgtttctcaccggattcgccgttaccggcgttctcatcaccaagctcaccgctggactcactggtaagtctattcagatctgaccgatcgtcatcggaaatgaaagagctaatcctcaattgatccgtatttgta

SEQ ID NO: 159630 - DNA, 1201 bp, Arabidopsis thaliana landsberg
ctgaaatttggtgagtgtgagtgttttatttgtgtgcttttcctctagattcaagttttaagctaacattttctgatttctcagtgacgaggctgaagagaaatgcattccaagcactatttctaggaagagagtcacttttgactccaaagtcaaaacctatgaacacgttgtttcagaagaatctgttgaactctcagaagagaagaacgaagaggttgaatccgaaaagaggtcattaaagtcaagcaagactgatgatcagatcattgaggttgcctccaactcctcagggtcgtatcctgaaaaccacagatacaagaattgcagagaaagtgatgatgacatagaggaggatgagtttgactgcagtgacagcgatctagatgaagatgaagaatattacagtgatgttggatttagtgaggatagcttgcataacccaaccaaggaagtttatactcaagatattggggataaaacagaggagattgattcaaagctgagaaggtctaacgagactgttagagatggaaaccactatgatggccaaggagtacttaaccctgttgagaatcttactcagtggaaatccgctaaatccaaagggagaacaaagcagaaacagtctcaaaaggagaactctaacttcatcgcagatcaagaagaaaaaagggattcctcttctttcggtacagaccctcagattgatgatataacactcagcgtcaaaccgaaatgcagaattgaacccaagaaactgcgaaaccaagaactggccgttgatgctagcctttcaacatggttatcaacatctgagtctggtagtgaatgcaacagcgcctctatgtataccttaacacccgagaaactcaagtctaccagctgctactcaaaaccgcttagaatcaatcatgacgatagacctgtattatgcgcattgacattggaggatatcaaacagttctcggctacatctacgccaaggaaatcaccgagcaaaagccctgatgagacacctattataggcacagttggtggttactggggtaatcgctcaaaggcaatagattgcggctctgcatcttcattcaagggaataccaaacaccagtagcaagtacagagaggtacgcataaaccagtaaaaacactccaaaagatagtagaatttctgatattgatttcatcacactttcaaa

SEQ ID NO: 159631 - DNA, 1817 bp, Arabidopsis thaliana landsberg
caataattttggtttcattgctatctttgatactaacctattgacatttgagctttgagttctaaatctctacaggagaatcatgagcaattacagtggcagttcttctgttgatcctgactacaacatggatgagacagagtcgtcatcttcaaggccagagagagaacagagagaatatgaaagcttcagaaggaaagctgagatagcccgaggaaagagagcgatgacatagaggtatgagcttatagacgaagatctggaagacgagtacatgcctgaacagactcgcagagctaccaaacttctgcacaagccggacgtattgcctgctgaggaatatgttaggcttttcaagctgaatgagttatgtagcacgaggtatccttgctcgacctcacttgcacaactcggattgttggaagatgttcagcacctgtaccaaagttgtcatctggacactctgatggcttatccgtatgtagcgtatgaagatgagacaatacaattcctctccacgctgcaagtagagctctaccaaggtatgacctctgatgagttggattgtgaaggattgggattcttgcgattttctgtgtatggtcatgagtataggttatcaatcaagcgattggaaggattgtttggcttccccaatggaacgggatctaagccaaagtatgaaagagaagagttgaaagacttgtggatcaccattggcagctatgtaccgttgaatgcttccaggtcaaagagcaatcagatacgcagccctgtcatcaggtacttccagcgttctgtagccaacgtactctactcccgagagattacaaggactgtcactaactctgatatggagatgatcgcaatggccctcaagggaactcttcgccaaactaagaatggtatgcccctccagggtgaaatcaatgacacacccctagctgtacttcttctgatccatttgtgtggatacaagagttgggctgtcaccaataaccgcaagagagcacgaggcgctttgtgcataggtggcgttgtgacaccgattctgatagcttgtggagtcccaatcatttctgctggactcgagccgcgagcaatggatatcgagcacctacgtcattgcgaattcctggagtttgcaatggttgacgatttccacaggttcaggtttgagcactctacagacaggagagctaacatccttctccctagccttgaggttacaaggataatagaaggagataacattgattttaggcctgaggttggacgcctctactatgagaacgctccgccattggatgaggacgatcttcttgaagaagccgcttcggatgggatggatgaagatagggcagtggcgttcgacactagcatgtatcactttggtgaacatgtacctccagcgaggcagagcaagagcttgattgaagctcataaaaataacagtaaactgcagaagtggtgcaagaagcaggacaagctgctcgccaagtgtttcaagactatcaagcttctgacagataagctgagttgttcctcccccaccactgctattccacagggacagcctcctctggagatgccatcgaggagatttgatgagcttgagcacaggcctgagcttagcgagcagagagtatcacatgtcccggctaggcattcgtcgttcgaatcccgggagcacaagagaagaaggaaggctacactcactcgatctagcagcagatcacgcctcattcactcgagaaggtcactcgaccgcggtgctggtcgcagcagaaggagagaggtcgagtttcctcagagcg

SEQ ID NO: 159632 - DNA, 606 bp, Arabidopsis thaliana landsberg
atgacaaaaatagatccagaagaagaacttggtcgaaaatgttgtacctgcttcttcaagttcatcttcacaactggtctcggcgctcttatcttatggcttagtctccgtgccaagaaacccaaatgctcaatccaaaacttttacattcctgccctcagcaaaaacctaagctcacgagacaataccactctaaatttcatggttcgttgtgacaatccgaataaagacaaaggaatctactacgacgatgtccaccttactttctccaccatcaacacgaccacgaccaattcatctgatcttgtcttagtcgctaactacacagtgcctaagttctatcaaggacacaagaagaaggccaagaagtggggtcaagtttggccgctaaacaaccagacggttttacgagctgttttgcctaatggatcggcggttttcaggctggatctcaagactcatgtgagattcaagattgttttttggaaaactaaatggtataggagaattaaagttggtgctgatgttgaagtcaacggtgatggagttaaagctaatgagaaagagattaagatggagaaatctaatttttggaaaactcatgct

SEQ ID NO: 159633 - DNA, 1112 bp, Arabidopsis thaliana landsberg
agtttctctattatattgtctttgttatggagattattgtaattgacctgatttggtttagtcgctctgtagattgatctgttctactcgtgctgctcataatgaagaagccgccgcgaaagctgcggcttctgttgctgacaccggagctccgaccatgtatggtttctcttaattttgatttcaaagcaatccatgtttgtgtttttgctacaaatgatcctaatctttcaaacatgtgacctagttaattcttcgttattgatttggatgtgattcgtggaagtttatgctagacgctcttgtgtatgtgtatcttgtggttttagatttgacaagattatagcaaaagagattccctcagatattgtctatgaagatgaaaacgttttggcattcagagacattaaccctcaggctcctgttcatgttttggtcattcccaagttgagagatggcttgacctcgcttggcaaggtgagtcagttttatgttttaaccctcaatctgtttcttctcgtgacttcctttggtcttgctcttagaggtctcaatgaatctcatcattgtgttctgtaactagtaacgcgtttcatcatggtattgtgccactgtttctggtcaatatatgtaaatgctgccacccacactaaaaaaggagttaaaagtattattttggtggaacagattaagattttacctgaaacatatcttcctctgaaccgccgtcgcaggctgaaccaagacacgtagaggttcttggccaacttctacatgcatcgaagattgttgctgagaaagaaggaatccttgatgggttccgtgtggttatcaacaacggtgttgaagcctgtaagtcttttcttttcttttccatccaattaagcatcatcgtcctcatacacatgactgaattaacttcctctcattcaggccaatctgtttaccatcttcatctgcacgtcctcggaggccgacagatgatatggccacccggtggagaagaaggattcatgtcaacccaaagccaacgtgctccaaaattgtcaactacaatcctttcttatatggtttatgagtttttaccactatcggattttatccagttgtga

SEQ ID NO: 159634 - DNA, 1958 bp, Arabidopsis thaliana landsberg
  unsure (1)..(1958): unsure at all n locations
ttccgtcttgttacctaaccttcgtgacgaggtgaaatcgctgattcctcatttgggttatcctgaaatctttagggttttgcttnnnnnnnnnnnnnnnnnntctcgagctattacgttctttaaatgggttaaatttgatttggggaagaggcctaatgttggtaactactgtttgttgcttcacattcttgtgtcttctaagaagtttcctttagctatgcagtttctctgtgaattgattgaattgacatctaagaaagaagaagtggatgtgttcagagttttggtttctgctactgatgaatgtaattgggatcctgttgtttttgatatgcttgtgaaaggttatctgaaattgggtttggtagaagaagggtttagggtttttagagaggtgcttgattccggttttagtgttagtgttgctacttgtaatcatctactgaatgggttgttgaagttggatttgatggaggattgttggcaagtgtatagtgtgatgtgtagagttggcatccattccaatacgtatacgtgcaacattcttactaatgtgttctgcaacgattcgaaatttcgtgaagttgatgactttttggagaagatgtaagaagatggttttgagcctgatttggttacttataatacgttagtgagtagttattgtagaagaggaaggttgaaagaagcgttttatctgtataagatcatgtataggcgtcgtgttgtgcctgatttagttacttatacatcgcttatcaaaggtctttgtaaagacgggagagttagagaagctcatcagacttttcacaggatggtagacagaggaattaagcctgattgcatgtcttacaatactcttatttatgcttattgcaaagaaggaatgatgcaacaatcgaagaagctgttacatgaaatgcttgggaatagcgttgttcccgacaggtttacttgtaaggttatagttgaaggatttgtgagagaaggacggttactttctgctgttaattttgttgtcgagcttagaaggttaaaggttgatatcccatttgaagtttgcgactttctgatagtaagtttatgccaggaaggtaaaccatttgcagcaaagcatctattagatcgaattatcgaagaggaaggtcacgaggctaaaccagagacttacaataacttaattgagtctttgtcccgttgtgatgctatagaggaggcattggttctaaaaggcaaactcaaaaaccagaatcaagtacttgatgccaagacataccgagctcttataggctgcttgtgtaggattggtaggaaccgtgaagccgagtctttgatggcagaaatgtttgattctgaagtgaaaccggattcatttatatgcggggctttggtttatggatactgcaaggaattggatttcgataaagctgagagactattgagtttgtttgctatggagtttagaatctttgacccagagagttacaattcgcttgttaaggctgtttgtgaaacgggatgtggatataagaaagcgttagagcttcaagaaagaatgcaaagactcgggtttgttccaaacaggttaacttgtaagtacttgatccaagtgttggaacagccttctttgcccaatcatctgcctgagaattgaagcaacgcttgatgcgatgaaatttgtattccttaatcttggccagatgcgtaacttaaagaaaatacaaacttagaggatgagtactgcggatcgttttaagtggtggtgaagtctgtaggatctcgcacaaagggtccagtacttgcttagcatcctggaggaaaatgttgtccttataattcagtgccaagagcatttgcctcagcttttgctgctttgtttgctgttgaaagcttacctcgactccaaaacacaagtcttctctgttgatcaaacaagagccaagcaatgccgatcg

SEQ ID NO: 159635 - DNA, 348 bp, Arabidopsis thaliana landsberg
atgggctgtcaagaacgtagaggaggtaggatggtcagttggtcagatctagttttgatcgtacatgcacggtagtcccagttgggggctctcgtagggttccctagtatgaaattgatccctgggcaagaggatcaagttggcccttgcgaacagcctgttgctctatctgagtgcaaccctctgggcgatatgcagcgaaaggagggaagttgcaaggaccgaccccatagtctccaccccgtaggaactacgagatcaccccaaggacgccttcggtatccagggatcgcggaccgaccatagcaccctgttcaataagtggaatgcattagctgtccactggca

SEQ ID NO: 159636 - DNA, 1649 bp, Arabidopsis thaliana landsberg
caagcccaagatcgtcagaaaagctacgccaacaaacgtagaaaagaattacaattcaaagtaggagatttggtgtacttaaaggcgatgacctacaaaggggcagggcgattcacctcaaggaaatagttaagcccaaggtatgttggcccgtacaaggtgatcgaacgagtaggggcggtggcatacaaacttgaccttcctccaaaactaaatgcgtttcacaacgtcttccatgtgtcacaattacggaagtgtttaagtgatcaagaagaaagcgtggaagatatacctcccgggttaaaggagaacatgacggtggaagcatggccggtacggatcatggaccgaatgatgaaagggactcggggaaaatcaagggatttgttaaaagtcttgtggaattgtggaggtcgtgaagaatacacttgggaaaccgagaataagatgaaggccaattttccggagtggttcaaggagatgggtaaagatcaacttgttgcggattcgaggacgaatccaattcaagggggggagacttgtaacgcccgcgatcctcaataggatcgttggctaggacttggtccgagagaagaaggtgtagtctcagacaagtgagaaggagctggccataagctcggacaaaggagaaatcatgcaggctaagctaggattgtaaagaaatcagttgggtcagctcgcccaaagctcaagctcagctggaaggagtgacggttactcaggtcgagtgacagtccagctcgggcagctggacgagtgacggttgagctcgaggtagctggacgagtgacggacgagctcgaggtagctggacgagtgacggacgagctcgaggtaactggacgagtgacggactagctgggtggttatgggcgaagagatacaactcttcagaaaggcgcaactcttcggaaaggtgcaactctttggaaaggtgcaaggaacggatgtgttgattcgggaagcatccactcaccacaacacaccgaaaacacaagaaactcaccattaaaactctctccctcttgggagaataaatagtcttaggattcggtagccgggctgtggccggcaataaagaaggagggtcggatcgacctaacctcgagaaggaaggtaagggatcctagactttgagtctaagggttctaggatgtgagttagtagtcggatccttgaaaggatcgactagagggctgggtagtatccgggtcatgtgcatcctacacaagactcggtccgggtagggatcggctgaggcggggacgcggctcggcggaggaccggcgggtcttaactgacctgccgagaattggacggactgatgcgcgatcttcccctctctgaattctctccacggatccgagtagtgtatggcatatagagcattgcatggacttgcatatgactaagtaaatgagattacttatggctctatgactttcaggaacgaatggtgatcgtgggaaggacttggcttaggcgcgagagactcaaggccgggatgatgggtggtgatagttcggatagtctagggatcgattatatgacttgtaatagcttatatgcaaactcataggttgtatcgaatcctttgcttaattaataaagtatccgattgtttgttt

SEQ ID NO: 159637 - DNA, 4575 bp, Arabidopsis thaliana landsberg
tactcagtactctataccgaggtgccttaccaaagatccggatgctcttggacacagcttccaatggtaactttctcaacaaagatgtattctgaaggttgggaacttgttgaaaacctatcacaatctgatgggaattacaatgaggactatgatcgcactaacagaggcagtagcgattctgaggataggcacaagaaggagatcaaagctcttaatgataagattgataaattgttgcttgctcaacagagaaatgtccactacattacagaagaagagcttacacaactccaagaaggggagaatcttactattgaggaggtgagctacctacagaatcaaggtggctacaacaagggattcagcaactacaaaccccctcaccctaatctctcttacagaagcaacaatgtggcaaacccacaagatcaagtctaccccccacagaaccaaccgcctcaaggtaagccctttataccctataaccaaggctacaaccaaaagcagaactttggacctccaggcttcactcagcagccacagcaaacttcagcaccagactcagagatgaagactctacttcatcagcttttgcaaggacaggcctcatgctccatgaccatggacaagaaactagctgaactcaccaccaggatcgattgctcttataacgacctgaatttaaagatagatgcacttaacactagagtcaagaccatggagggacacattgcttctacttcaactcctaaacaccccggacaacttcctggaaaatctgttcaaaatccaaaggagtatgcccatgctatcaccacagtgagtacttctgccactgaggacagtgggattcaagaaggggaggttttgagaccaaaatcaagacaggagattgaactcgacttctttgctcggcttgtcgaacgagcatatgacccgagcaacccaatccctattccacctgcctatgaacctaaaccatactttccagaaaggattgcacaagttaatgcaaggatcttccagaaacacaagatgatgttcataaagtgtatcaaagagttagaagagaagatacctttggttgatactcccaaggaagtaatcatggaaagaccccaagaagctcagcatatagttgaattgagttttgagtgcagtgccatcattcaaaggaaggtgataccaaagaagctaagtgatccaggttcctttactctaccttgttcactaggacccttagtgttcaacaacagcctttgtgatttgggagcttcggttagtttgatgcctttgtctgttgcaaagagattgggatttgataagttcaagcctagcagcattcatcttattctagctgatagatcagtgagagtgcctcatgggatgctagaagacttaccggtaaagatcggatcggttgaaattccaaccgactttgtggttctagagatggatgaggaaccgaaagaccctctcattcttgggagaccatttttagcaactgcgggcgctcttatcgatgtgcaaatgggtaagatcgacttgaaccttggtaagaatctccatatgagctttgatattgctaagaagatgaagaagcccactatagaagggcagcttttctttattgaagaaggaaatttagatgctgagttgttgagtgggttggaaaatcctattccgtactccattccgactcgccacctaggagagcccgagaagcttcttatgatagaaggaggacctagcttagaggttgagactaaggggaaccatttggaagttggtcctattgctagagagcttatggagctcaggaaacagtatggagctcaaggagagaccatggaaaagttggacctcaagatggaggagctgaactacgctatcctggagcttaaggagatgattaaaggttatccaggtcctgagatcgatgaatactttgaggaacccgatcttggagaagaggactatagtactgatgagaaagaggcttacttcgaggaaagatcaaatgagtactccacactccagctatcaagagaaaatgcggagtatgattcagactttgaggattcaacaagtgaggatgaggacttctcagttcctctcctcaatctcttctctacctaaacattgtgagagtcaagcttagtgactttaaacaagctcacttgggaggaagtcccatgtctatccttgtatatattgctttcttgttatttttgatgtttttgtttaagtgtttcagggaaaaagacttctagagaatttcaggccacactcgaccgtactactcggctacaggccgagtgtgggcttcaattgaccaaatgcccaagattgaatagtactcggcccacaccactcggcccaaggtcgagtatggacctcactgttcaaaggcccaacaagatgcagcactcggcccgaagccgagtcagaaaaagaagcccatcaggcccaacaccgtactcgacacgcgcgtcgagtatgtcggccgagttcacacgtgcgaggtcaacacaattcaaattcgaatttgctgggccccaccaatcaaatcctgctccccaaagcccttcaaagagtctgctgcaaaaagtgagacatgtccccttgaccaaatgaagggtgatgatccaaggtgtttggagggctaggatcaaatcttcttgtctataaaaccacactcaacaagctaagtcactcacactctctctttgctcaaaaatttcgagttttacttcttctctccaaacatttcaagtttttactctcacttctctttagaattcccagaagctgaaccataatcttatactttctttccatacaaaccatttcagaacctcttaaaacttcaaattctcttctactttgacctactttgggttattttgggtgactagctccagtacctctccacaagactatggattccgaagaaacaagacgaagagcctctgcttgtgctgtagctagagggtttgccatgatcaacgagagagctccggtttggaatcaggaagctgtgagtcctggttttactcggttgacaggccgagtgcagtggccgagtatgactccagaatcttctatgggtcgttctgctgctgttagagaggaagttacaaggggaagttgtgccaactagagaagaagaagagcctatgttagagggggaagcatctgaaaaagatgtagagattgttgaggaggttttgccagttactgtaagaaggagaaggaactatccaaggaaaaagagggagcccaccatagaagagcattaccagtacctaatggatcttaagtttgaagggacaagatatccccatacgccaaccatgctagagacattccttacctacaagttcgagggatgcaaggaggggagctgccagttccttgctacttgataagtaggtttttaggcctacttatgtgctgaatgtgaggttcagttcaatttcccttaaacactaacatgtcgatgcagctatagggggtgtcaacccagtccactgttattgctagcaatcaagatgtgtacataagcaactaagtcaagccagattatagagatggttggtttctagtaacaatcctaggtcaggattcagacaacaaaaataagaactttaagagccctactcgatcattgggtcgagtagaatcaacaagccgaactaaaaggcaatcaacaagggatacagataacaggtaaataaaagtgcaatcaaggggtgaatacaaataaatctaagaagaatagaagtcctaaggatggattcattgataagggcaactctagggttcatcaggtggctaacaggcgaaaggcaaataccctagatgatagattcaaaaccgggtcaatccactctcgtgacaaagacacagatgactttaccacttcctaatctcaactctcgttgatgaatagcagagcaggctttaagcaacaatctaccaaagtcaagcagtctaaacatccaatttcttgggctagaatctacaaatctcttgaattcctagatcagacatccatttgaacgtcttttggaagctggatacctgtggtcgaattcccacattagccagcgaaaaccgcataggggccaacgaatccagaagggatcttacctaatcttaaccacctgactaccctagagattaccttaatctaataaatcctcaagaaccctaatcactactcaagcaacataactaagaaaaaaacccagaaattactgaaagcatatcaaaatgtagatctaaacaagataaacaactttgttcaaagaactaaatgcaaaaacaaaatagattaagagtaattaaggttttaagattcaagaacacaaagaaaaactaagagataaaagcttattttctttagacaaaccccaaagaacctatttatacttaaatctcaaaaaccctagattcactagaagacaagagacttgaggcggtttggatggatgctcgatcttgaagatcgagtaaagagggtgctgcaaagtctgcaccttttcctccatgctctgagtgatcaat

SEQ ID NO: 159638 - DNA, 1546 bp, Arabidopsis thaliana landsberg
  unsure (1)..(1546): unsure at all n locations
atgatggcgaggtttgtttctgtgtcgtcttgtcagtttcatttcggcttccgtgaggtttctcctccgtcggtaacttcttatcctagacgattcgaggtaaattcttgtcatgtgttttcttcagtgacagtagtgtgtgatcggtcatttgaagtcagatgttctgaattaggtctctgatcggagatttcctgcgattccgattaaatgttcttcatctgagccggaaaacggtgaggattcggcaccgtcgctgtcttcctcctcctcatcgtctacaagtgaagtatctactagtnnnnnnnnnnnnnnnnnnnnnnnnnnnnnnatcggcggtattgggatgttagacactgcgtatttgacttacctcaaggtcactggctccgatgcgttttgccctattggtggtggcacttgcggtgatgtcctcaacagcgattatgccgtcgttttcggtattatccatcgctttattgattatagcgtttgatttctgtagctaattttcctctcttttatagtaggcatgattaaatactcgcatgtgatagtctctgtgaatctttgcttgaagctatatcatttaggagctttggtacttagtatgcatagaattgttagagttaaatagcatgcttcactccactctatgtagtgctttgtcttcgttgtttgtccaacattgcattgcaggtaagttgaactcaatgaaaatccttttttacattttgccaggtgttcctcttccagtgattggatttgttatgtatggtgtagtaaccgctctaagtgcagagcttggggaagggaatctaccttttggaatcagtaagagcaatgggcgtttcgcgttatttgggatcacaactgcaatggcatctgctagtgcatatttcctgtatatccttagcacaaaactctcaggatcatcatgcctgtattgtctggtgtctgctttcttatcatttagtctatttttcctctctgtaaaggtatcccattatttccatttctttttttttcctgatgttgactcaagataacttctaaacttcggattatgataatgtgctccatgcatgtggtaggatgtgaagttgcaagaaacacagcaagttgtagtattgcagatatgcttagcaatcatagtagttgcctccttgaatgcgtcttacagtactgctcaaccgatcccttcacggtaatcatagttcatagttttctctggggagtccagatagaaattttagtcatttgtaccgagtagtgaacatatagcttccgaaagatgtatgagtcttatcaggtggtctcttttaatcccgatcgttttttgtttcactccttccagctctggtgacattgaactgccatattttagaacagagatcagttcatcatcgagcccttatgctattgctttagcaatacatttaaactccattggagctataatgtatggggcactttggtcgttctcactgcttagagcaaaaacaggtagttagttcattcatcacctgtttgccaagaatcagtt

SEQ ID NO: 159639 - DNA, 1400 bp, Arabidopsis thaliana landsberg; identical to SEQ ID NO: 29563

SEQ ID NO: 159640 - DNA, 354 bp, Arabidopsis thaliana landsberg
cgagaccagattgtgatagacttcacagcatcatggtgtccactttgccttttcattgcaccagtgtttgcagggaggggtgagaagttcactaatgttgtcttcttcaacatcgatgttgatgaattgcaagctgttgctcatgaattcaaagttgaggcaatgcctacttttgttttcatgaaagaaggcaacatcattgatcgcgttgtcggtgctgcgaaagatgacatcaatgagaagctgatgaagcatggtggacttgtagcttctgcttgattgatttcagtttctaactctttgcatcataataaagtttttatctttcgtatgaaataaaagtgatgcattgct

SEQ ID NO: 159641 - DNA, 1158 bp, Arabidopsis thaliana landsberg
aaagaagcttgagcagttcctaaagaaagttagcgagaagagggcagcttggcggagcagagagcatgagaaggtccgagcaattattgatgacatgaaagctgacatgaaccaggaaaagaagactcgtcagagattagaaatcgtcaattcaaaattagtcaatgagcttgcagattcaaagttagcagtaaagcgttacatgcatgattaccaacaggaaaggaaggcaagagaattgatcgaagaagtttgtgatgaactggcaaaggaaatagaagaagataaagctgagattgaagcattgaagagcgaatccatgaatctcagagaggaagtagacgatgaaagaagaatgctgcagatggctgaggtttggcgtgaggaacgtgtccagatgaagcttattgatgccaaagtaacactcgagaacaagtattcacaaatgaacaaactcgtaggagatatggaagccttcctcagttcaagaaatactacaggtgtgaaagaggtgaaagttgcggaattgttaagagaaactgctgcatcagttgataatatccaagaaatcaaggaatttacatatgaaccctcaaagccggacgatatcctcatgttgtttgaacaaatgaacatgggtgaaaaccaggatagagaaatcgagcaatatgttgcctacagtccggtcagccacgcttcaaaagctcacacggtaagtccagatgtcaatttgattaacaaagggagacattcgaatgctttcactgatcagaatggtgaatttgaagaagatgacagtggctgggaaactgtgagccattctgaagaacacggatccagttactctccagatgagagcatccctaatattagcaacactcatcaccgtaacagcaatgtatcgatgaatggaacagagtatgaaaagactctattgagagaaataaaagaagtgtgctcggttccaagacgacaatccaaaaagttaccgtcaatggcaaagctctggagttcattagaaggtatgaatggaagggtatcaaacgcgagaaaatcaaccatggagatggtttcaccagagacaggctcaaacaaaggcggattcaacacattggacctggttggtcaatggagctcatcaccagactcggctaatgc

SEQ ID NO: 159642 - DNA, 1124 bp, Arabidopsis thaliana landsberg
agtctgatctcaaaaaccttggaccattcaagtttctcttcaagctcaatcaaatttgcgaggcaagcttcaagcaatgtattggtcaactattcaggagcaaggtaatgatatcgcttgtgtcgtctacgatgagtacatgtacttctcccaagctgcagttaaagagtttcaacttcctagcgtcctcttcagcacgacaagtgctactgcctttgtctgtcgctctgttttgtctagagtcaacgcagagtcattcttgcttgacatgaaaggtactcaagattttttagcttgttaactcaaactttaaaagtgcatttagatatataaaccaatccaaatgctgttgtttgctttgcagatcccaaagtgtcagacaaggaatttccagggttgcatccgctaaggtacaaggacctgccaacttcagcatttgggccattagagagtatactcaaggtttacagtgagactgtcaacattcgaacagcttcggcagttatcatcaactcaacaagctgtctagagagctcatctttggcatggttacaaaaacaactgcaagttccagtgtatcctataggcccacttcacattgcagcttcagcgccttctagtttacttgaagaggacaggagttgccttgagtggttgaacaagcaaaaaataggctcagtgatttacataagtttgggaagcttggctctaatggaaactaaagacatgttggagatggcttggggtttacgtaatagcaaccaacctttcttatgggtgatccgaccgggttctattcccggctcggaatggacagagtctttaccggaggaattcagtaggttggtttcagaaagaggttacattgtgaaatgggcaccacagatagaagttctcagacatcctgcagtgggagggttttggagtcactgcggatggaactcgaccctagagagcatcggggaaggagttccgatgatctgtaggccttttacgggagatcagaaagtcaatgcgaggtacttagagagagtttggacaattgcggttcaattggaaggagagctggataaaggaacagtggagagagctgtagagagattgattaggataggaagtagcat

SEQ ID NO: 159643 - DNA, 1405 bp, Arabidopsis thaliana landsberg
caattttcttttaaaatattctattattgccttttttgcgaagtacattaacactggcaatgcatatgaaaacatctaactactacctccacttctaaggttggttttatcggtcattatagatgtttttcttttttttggcaaatgtcaagattgggtgttttaaattgtaaaaatacccaattttctatatatttcgaggtttaatctatgtttcggtccataatctactcagttacaaaaaggtcattatttagcaaaactagcatttttggttctattagggtagtacaagtcttttagagacactaattaaagattttatagagataaattaaaattctttggtcccaaaatatacagtcttaaaaaaaaagtattttcgtggtgaattaatgctgatatcccgaaattatgttttgattgtatcccaattgctttacagattcagaacaagatgatccagttgagaagtttccaccgcttagaaagaaagatcttttacggattcttgaagcagattcggtgcagggagactcgtactcggatatgattttggaaaagacaaaggcgtcttcaggtcttatattcatgtcctgtgaagagttggaccaagactcactgagtcaagcacgtgaagattttaaggttccgatatttgcgataggaccttctcatagccattttcctgcttcttctagtagcttgttcacaccggacgagacttgcatcccatggttagacagacaagaagacaaatccgtaatatacgtgagtattgggagcctcgtgaccatcaacgaaacagagctaatggagattgcttggggtctaagtaacagcgaccaaccattttatgggtcgtccgggttggttcagtcaatggcacggaatggattgaagcaatcccggaatatttcatcaaaaggcttaatgagaagggaaagatagtgaaatgggctccacaacaagaggttctaaagcatcgagctattggaggtttcttgacacataatggttggaactcgacggttgagagtgtttgtgaaggcgtccctatgatctgtttgccttttcgttgggaccaattgttaaatgcaagatttgttagtgatgtatggatggttgggatacatctcgagggtcggattgagagggatgagatcgagagagcgataaggagattattgttggaaactgaaggagaagccatccgagggaggatacaacttcttaaggaaaaagtaggaagatcagttaaacaaaacggttcggcatatcaatctctacaaaatttgattaattatatatcatctttctagccatgcatatgacatgttgtttctttgtgttttaagtttttcaaccgataaattgtttgtgtatcagaaatttcttcctttgt

SEQ ID NO: 159644 - DNA, 2855 bp, Arabidopsis thaliana landsberg
  unsure (1)..(2855): unsure at all n locations
tgtgatgctaacaatcaagatgtgatcagaagtcactaactcaagccaagcaataacaggttttggtgtgttctagcaatcctaagtgaacatgcagaaaacagaaaatcaagcagaaacaataaaacactcgaccaacacagctcgttgcagagcactgggtgtggtcgagtgacaggtcgagtaacaaacaaaaaatgtaacagggatacccgtctgcatagtctgttgccagacaactgggtggtcgagtaacaaaaaaaagaattgcagaaactaagcagtagatgacaagatgcagtaaacaccagtatagtaaacaaagaattcaatcagataaagaattcccgaggatggggtaattgagtagtttcgtttcctcagtttacaggtgaactacatgttcaataaattaaccctcgacaacaagttcattaaccaaatctaagtgccaccgcaacagagaccctcaagttaacctagtcccagactcaatcaccattgacgagagctaacctaacaggcattacgaatcaacaagttaaagccaaaacgctccctgcaaccaatacctttgtacagggccacgaatctctggaattagtggttcagacatttcatcaaacaccttttgggcgtggaaaagtctgggttcaaattctagttgatcagaaagcaataggcattaagaacaactaatccataacagatctataaatcaaagtcaaccacctagcaaaccaaggattcctaactactctaacccatccttagcaacctattcactacttagactttattgcagaaacataaacgaagacatgaatgaaaacatcatagcaatagagtaataacaacatgatagcaggatgaacaacttcgttaaccaaatgaaaagcaattactacatagattaagagaaattcggattacaaaatgtcaagaactaaaagtgtctgcggaaaaaaacttagtctcgaaaatataaagtacaagctacttatagtgaaatgttctgaaaccctaatactgaaaataacaaagtattgggacaaattaagaacagtactcgacctaggcggtcgagtgattggttgagtgattagctagagtcttcttctcttccttatgctcgagtgtctggttgagtgcggaatatagaagactcttaagctggcagtcgagtatgatgtcgagtggtggatcgagatggtgagggcacctactcgaccagggggttgagtggtattgagatatggtgaaggcagctactcgaccagggggtcgagtgacggatgttggtgaaacgcctggttgtggccgagtacttcaggaagtccaggatgtcggtgctcgacctcaaggtcaagtatattggtttgatcaggttgagtatattggtttgatcatgtccacttcttccaattatctcaccaacatctccaaatcacctgaaaacaacacaaatatgcaatatgcatgcaaaactatcctaaacatgcaaagtgatgacaaatgatgagaaatggtataaaacagtggtgatatgatgctaaagtgatgacaaatggatgcttaaaacatgtaaaatgcacacttatcaggaagctacttcttggctgaaacaagtaaaagcaggttccctcaagacttggagaaacatcaagatagcattgttgaacaatttctatgatgatgctatggctctagatgcagcaagcaatggtaacttcatcacacaatatccggctgatgcaaccgccctaatagagaacctagcttgcagtaacaccaagaatgttgactttcagaggaagaagattgctggagctgtttcaggcaatcaaatggcagaggttcatgccaagttagattcagttaatatattgcttacagggaagaagcatgtccactttgcaactgaggatgaaaccatttagcctaagactgagtcagaggagggcgtcttctacatagatggtcggggctacatgaagtttggacagccacacgacaacttcagtgtcaaaaggtttacagggaaccagagttcctcaaactacactccaaagctagccttccagaagacatttccttagagcaacttctagaggacttatggtaattcagcttaccaagctccctccgcccctcattagagagcataatgaaatccatgctcgagcagattttttagagccaaacaaagctcgttgttgagtttaatggcaagttcgatgctgtctacacagatcttaataggaagattgacaatctgagctctcacatgaagaagctagatgtacatgtagctcaaactacacaatccattaagagacaagagggctttcttcctggaaaccctaatgctaacttgaggaagagctgtaatgccatcatgatcagagacggagatgaggtgtgggaagaagttgatactgaacaagagctagaaccgtatggaacactgttttcttaaacggttccttaggagggtgtcgatcgacactgggttcggactgcaccatatgaggtgagaatccctatgaagccagagtctgcctacactcnctcatgtcccttatccgaggaagcgtcgctctaggcaagagattcatgctgctaagtgcacagttatcatggaaaagatcctcccttctctccctaaggatgcttctgagacatcttttgttccactcaacaggtatgtcaagcgacttgttgacaatggtattagcttagatgaagctaaactgctgaaaagggacatcagtgcaatcatgctgcctaaggtcaggaaagagaaggcgtagagagtggacattaatgagtacatccgcaccatcactccggat

SEQ ID NO: 159645 - DNA, 1209 bp, Arabidopsis thaliana landsberg
aaaactcattcactgagaaaaatggagacccttctctcccctcgtgcgctctctcctcctctcaatcccaaacctttgtcccttcaccagaccaaacccacttcacattcattgtctctctcaaaacccaccaccttttccggtcctaaacacctctccgcgcgggttcaataaaccgcaatcaagaaattggttaattgatgcaaagcaggggactagctgctttagcttttatctctaaactctcacttttctcaccctgttggccactggcttttagccctctggggttcaattatccgccaccaactggtccaccctaaacacactctacgtagtcgattccgcctggtgttcttactcgagtgacacagtcagatcttaacaagcttttgtctgatcttgaatacagaaagaaactgagactcaatttcatcactgtccgaaagctcaccgttagttttttgttttcttatgaaaattgattgtttttgtttaaccggaaattgatccggaaccggtttggtaaaacttggcacagtaaagcacatgcgtttgagtatgcagaccaggttttggaaaaatggtatccttctattgaagaaggtaacaataagggtattgttgttttgataacaagtcagaaggaaggagctattactggtggtcctgcttttattgaagctgttggtgaaaacattcttcatgctaccgtctccaaaaatcttcccggtatggttctattactctagtttagtgtatatatagtgtacttttggaattttgatgcatcatctagtgcccaagacaaaaacaaaactagaggtttggttttgattaggatttttcggtttataaacaatagtaaccaaagtagaacctattctagtgtccatcgtttggaatggtttcggttttggtttggtttcggtctaattttcaagtagaattttgggactggctgtttctaatttctctttgtttttttttttgtatatagagaaaatgaatccattaaattttaacattttcttttatatccaatctttattttgcatactaagttgaaaacatattttttaacaaatttagttttaacttttaagaaggagaatattgtaccaacataagttttcacctgccatgttagaaatcaactatgttaagtataagtaagtattgattagtttttgaatgtatgatggtgca

SEQ ID NO: 159646 - DNA, 1296 bp, Arabidopsis thaliana landsberg; identical to SEQ ID NO: 483

SEQ ID NO: 159647 - DNA, 951 bp, Arabidopsis thaliana landsberg
caagatttacaagctaaccaaggagttctttgcgcttccgaccaaagaaaaacagaagtgcccgagagagattaatagtatccaaggatatggtaacgacatgattctttggaatgatcaagttcttgattggatcgaccgtttgtatataactacttaccctgaagatcaaagacaacttaatttctggcctgaagtcccacttggattcaggtaaagtttattataccttttcagtttaaacagcatctttgttcattgagtttggtgattttgacatattgtttgtttagggaaactttacatgaatacacaatgaagcaacggatagtgattgagcaattttttaaggccatggctagatctttggaattagaagagaatagttttctagacatgtatggagaaagtgctacgttggatactagattcaacatgtatccaccatgtccgagcccggacaaggttattggtgttaaaccgcacgctgatggctcggctatcactcttctcttacccgacaaagatgtcggagggcttcagttccagaaagatgggaagtggtataaagctcctatagtccctgatacaattttgatcaatgttggtgatcaaatggaggtaatcagtcacctacatatatgaatatgattttgaaagattaattgatgtagatttgacataaataaatctctatttctcgtgtgttttcagataatgagcaatgggatatacaagagcccggttcatagagtggtgactaacagagaaaaggaaagaatatctgtggcaactttttgcattccaggtgcagataaagagattcagcctgtgaatgagcttgtgtctgaggcaagaccaagattatataaaacagttaagaagtatgtggagctctacttcaagtactatcaacaaggccgaagacctattgaagctgcattgatctga

SEQ ID NO: 159648 - DNA, 1431 bp, Arabidopsis thaliana landsberg
tctttgttattgatccttcacttactaaactcgtgtctgatatcatgtacctcgaatgatttgtctcagattcctaaaaatatccttagtccagctaaaagagaagattttttccattggatggttggaatcagaaggagaatccatgagaatccagagttaggttatgagaaagtagagacatctaagcttgttagagcagagttggagaagatgggtgtttcttataagtacccaactggtgttattggatatgttggaactggccatgccccctttgttgctttgagggctgatatggatgcacttcctattcaggtataataaggttttcatttacaaagtttttgaatctattcccttcaagcccaaattatttaatcactgatcatattttgctagtcgaaatggtgtcatgttttaaatttgtttttttctgaatattttttttagtacaacaaacaatactaactggcatttaagatataaccattatcatttgacttatggatcagatttcttatgtgattttaaattacttgagttgcaagctagtggattcttattgaacatggtaatgatggaattgtgtaggaaatggtggaatgggaacacaagagtaagattccagggaagatgcacgcttgcggacatgacgctcacactacgatgctcctcggtgctgcaaagttgctcaaagaacaccaagaagagctacaggtttagtattgtattgtgctgtattttttagctaataacattttcaaactgttgcaatcatcaggttgtttggtttcttattaacacttgttggacattttattcatcagggtacagtgattctggttttccaaccagctgaggaaggaggagcaggtgcaaagaaaatcgtggaggctggagtattggagaatgtgggtgcaatctttggattacatgtttcgaatctattgggattaggtcaactgagctcaagagagggtctattgatggctggtagtggacgtttcaaagctacgataagcgggaaaggaggtcatgcagctcttcctcaattcgccatagatccagtattggcagcttcaaatgttattctgagcttacaacacctcgtttcgcgagaggcagatcctttagactcgcaggtatatatagttactcttttggctcttcaagaaaagtgtctcttatattataggatgttggttgatttgagtgcttacaggtggttacagttgctacatttgaaggcagtgatgcttttaatgtcattcccgactctgttactatcggtggcacattccgagcccttttacctaaaagttttgagcaactcaagcaaagaattgttcaggtcagtaactttgcactctgatgtgtcttcctctcctctcgagaccaaactttaaaacgcgagatccaatgtttcag

SEQ ID NO: 159649 - DNA, 1544 bp, Arabidopsis thaliana landsberg
ttttcaggctgtggtgaacaatttggaggatgctcatgaacagatcgacaaggcgatagcaacagctttgaaagagagcaagcctgtgtacattagcatcagttgcaacttagctgcaactcctcatcctacgtttgctcgtgatcctgtcccttttgccctaactcctaggtaatcattactctaaacagactcatcgaatcaacgtttgttttagatttctcactattgtatgtattgtttcttaggatgagcaacacgatgggtttagaagctgcggtggaagcaacattggagtttctgaacaaggcagtgaagccagttatggttggtggcccaaagttgcgtgtggctaaagcaagtgaggcctttttggagctagctgatgcttcaggctaccctctcgcagtgatgccttctgcaaaaggccttgtaccagagaaccatcctcatttcattggcacttactggggagcagtaagcacacctttctgctctgagattgtcgaatctgcggatgcttacatcttcgcaggtccaatcttcaacgactacagctccgtaggttactctcttctcctcaagaaagaaaaagcaataattgtgcatcctgatcgagtcgttgtggctaatggtccaacgtttggttgcgttctgatgagcgatttcttcagggagttggctaagagggttaagcgtaacgagacagcttatgagaactatgagaggatctttgtacctgaaggtaagccattgaaatgcaaaccaggagagccattgagggtcaacgcaatgttccaacacattcagaagatgctctctagtgaaaccgctgtgattgctgaaactggtgattcttggttcaattgtcagaagctaaagctgcctaaaggatgtgggtacgtgtctaacaaagaaactgaatctttgacatttctaacattgtgacaatagcgaaacaaacacaagttttgagaaaagttgttctctatattgtaggtacgagtttcagatgcagtatggatccattggttggtctgttggtgcgactctaggatacgcccaagcaacaccggagaagagagtgttgtctttcattggagatgggagtttccaagtgactgctcaggacatatccacgatgattcgtaacggacagaaggcgatcatcttcttgatcaacaacggtggctacaccattgaagttgagattcatgatggtccttacaatgttatcaagaactggaactacactggtcttgtcgatgctattcataacggtgaaggaaaatgctggaccacaaaggtaattaatgattacaactagtaactaacgtatgaatttggtgttgaagtaacattgtgtttggcaggtgagatacgaggaggagttagtggaagcgattaagactgcgacaacggagaagaaagatagtctttgtttcattgaagtgattgttcacaaagatgatacaagcaaagagttgcttgagtggggatctcgcggctcagctgctaatggtcgtcctcccaatcctcagtag

SEQ ID NO: 159650 - DNA, 842 bp, Arabidopsis thaliana landsberg
  unsure (1)..(842): unsure at all n locations
agctaagtacaaactaattacgagttatcgtaagaaagaaataagagttatcctaagatgttaactcgactaaatcaacacaccccttatctatatatatatctgcataagtcacaagaagtttcataaaatagtaattcccttaataaaaatagtatatataaaacataaagaaaaaaatatgagcacacttcttggttgtcttgtcctcatattctctatggtcgcacaggcctcatccgccagtcttacggtgaactggtcccttggcaccgactacactccgctcaccactggaaagaccttctctgtcggcgataccataggtgattaatctcttaactcccccaagacttacataatttgactcatagttacctcttctatacacaaatttattcattaggttgagatgaaaaaaatagaagccaagagaaaccccaattcagaaaataatctcatttcatggacataataatatgattatgatgacattacggttatgtttgcatagaatgattatgtaaaccgataaaacaaatcaagctaacaaacatatacggcttcatatgaatatatgggttacaattgtaccagtttaatattgttacacttgtgttactcagtgttcaattatggtgcgggtcacacggtggatgaagtgagcgagaacgactacaagagttgcactctagggaacgcaattacgtccgacagtagtggaaccacaagtatagctctcaagacacctggtcctcactacttcatctgcggtatccccggccactgcactggcgggatgaagctctctgtcattgttcnnnnnnnnnnnnnnnnnnnna

SEQ ID NO: 159651 - DNA, 3162 bp, Arabidopsis thaliana landsberg
  unsure (1)..(3162): unsure at all n locations
tggttagtctattaggtgcaatattctgatctttcgtaaactgtcgtatgactagtgtnnnnnnnnnnnnnnnnntctaaggtgggcaacaaggtcaagtcgaaaatgcgagcaggtgataataacgctgcaaaccttgagggtggaagtggggacagtcatcaatctgatcagggtttctttgatgctgctttcgctgaccggagggaggatgcagcaacaagtggtgctgatacacctaggggggattttatccaatctccttttggtgtattcttacgtagcgatgagaaagcttctacaaagcccttcagagattccagtgatgaaagtgatggaaactctgttgtacctaaaacactgacctcaaaagctgaagagtggatggtaaagaaaggattatcatggccatggaaagggaatgaaagggaaggtttggaaggaaggcgtagtcattctgtgtggccttgggtgcggaatgaacaaaagaaagagaggtgtcaccagatcaaccgctattctggtgttcagtatgaaagccatgcctttgaaagtaataagcctatcaataatgaggcttctggtttgtggtcttcccctataaatgcaaacagcgctattagccgtggaattatcagtcacagtactatgaacaaggtggatacaaatagtaattgcttggagtatgaaattttgtgggatgatttgacaatcggagaacaaatcgagcaaggtggtttaatctcttaaacagattcatgttttccagtctactccactctttataacatctatcatacattttactgattttgtgtaatatagagtccatcttctggtgacatgctccagtaacttccatattgcaggctcatgtgaactgtctatcacggtctttggtttggatctgtacgtttttttggcttctgatgatattttagaatattcatttgttgatttatgaacccttgccataaacatttgcaagttcagagatcggtcttattgagagttgctaatgtcaccacaggatgtagctgtaaaattgatctccaaacaagaatattcagaagaggtcatacaatcttttagacaagaggtaatgtttttactttctagtcgtccattataattgctcggagtgtagtttttgcagaagacattttaaatgggtcttgctatactgtgaaggtatcgttgatgcaaagacttagacatcctaacgttctgctgtttatgggagctgtgactttacctcagggtctctgtatagtgtcagagttccttccacggttcagtctcaacacttttggttactagtctcactttctttgtgttttgggccttttaagccatatctcttatacattcccctaatcatttggataaaattttggcagtggaagtctatttcgtctactgcagagaaatatgtcaaaacttgattggaggcggcgtatcaatatggccttggacattatgagtattagttatatgtccattagacatctgatttttccatttctatgatcattgacagttgcacgttttgtaagtatgagatgctttatttgattacttgtttttacgtcttcttgttcactctatttggctcagtcaacttacatctcaagtagcatattacataattcttcacacaggctcgcggcatgaattatcttcaccgctgtagtccccccatcatccatcgtgatttgaagtcatcaaatctgctggtagacaagaacttgaccgttaaggtaacatgttcatcttgataaacgtttgtttatgaatgataatgttccatcttcaaactgattatatagctttctgataacattgtcattttacatgaatgatctagaaaagtgagaccccaaatctgcaaactggaactagaaacattgtcaactaacagtgacatctctaacaggtagctgactttggtctatcgcgtattaagcatcatacatacctaaccagcaagtcgggaaagggaatggtactattctagacgcttatcgatatgaatcctgatttgatttatagtcaacgtctcacacgatcttgattggcttcttacctgttctgtagcctcaatggatggcaccagaagttcttcgaaatgagtctgctgatgagaagtatattctcgtgttctgtttggttaaattcccagattacttgtttttctagcctcaatcgctaactagctccatttctttgagacaggtctgacatttatagctttggagtagtattatgggagcttgccacagagaagatcccatgggaaaatctcaactcgatgcaggtatctttctgagcgatagaacaatgaaagtgttttcacttacaattgttcctagaaatcacatatttggtcaaaacttacatgttttgctctatcaatgaagctgacaaataataagaatctctatgccaaaagattggtttcagggtaaacctctattaaaaatccactagtttcaggtgactataaataaattgtactaattaggaaggtatgaatcataaacaccattatacttactgtaatgtgtaaacaagtgaattgtgctgttacacacatacactttgaaatacctgcaggtgatcggagctgtggggttcatgaaccagaggctggaaattccaaaggacactgatcctgattggatctcattaatagagagctgttggcacaggtaaattaacatattgaacattgcataatccttgctaaagaatacaacctttcattatcacggttctccttgatttagatgttcaacataagtcacagctaacagtgacattattttgcgttggtatttctgtttatcccacactgcagcgatacaaagctgagacccacattccaagaactgctggagaaactacgagacctgcaaagaaagtatatgatacagagaaactaagtgacctcccaagaaagaattcaatacagttccaagcgactcgtgctgcgttactttacaaccctctcctcaaggagaataatgcaaaacaaagttgacatatatctcttatgcttatttgttccttgaggcaccgcttcaagactcaaagactgttcataaaaacaaagaaagatcgagaattgatctgcttttagcagcaacgagtggaaccatg

SEQ ID NO: 159652 - DNA, 3175 bp, Arabidopsis thaliana landsberg
ctcttatttctctggagctaccaagcaacttacaacacaatagtcgaagtgttaacggcaacaaatgtccttccacatatattaatataaccacgaaaatcctagcagattttcgataatatacacacaaaaaaagaataaattgctcctcaagtttatcctttccatacactgattcggagaatatatattgaatctccgcaccaacaacaacgtaccacgttagctactcgcttacttgtcacgtcaaatcagttagtcaaaagtgccatgtcagtttcagacgttatgtgcactccgcagactcctgatgtacaaattttgatacagactcctgttgacatcaaatggttgtcttcaacattagctttatgttgccgtatcttcaatatctttgattttaaataattttgcttatagctgtaaatatatttgtgtatgtgcaggtactctatggatttatttccgggacatttttatgggagtgtcatacttgtatggtaagaaatttgtagctacaccaacacctctcattttacagcttcgggaagagctttatcctcaaccttatgacaaaatcttatggagtcaagctcgcaatcagtgcgcaaaggtaaaaagttgaaaagtacatgagaccaatgaagtatcacataataataataataaatgacatgatgcaggaagatctctactattcatcctcatttttacaagatttgttttggaaaggtgttcatatcttctcagagaatatcctgaatcgatggccttgcaacaagcttatcaggcaaaaagctcttcgaaccacaatggaacttcttcattatcaagatgaagccagccgttactttaccggtggatgtgtgcctaaggtaaaatttcctcaatataccgtattagtacaaatcataactagtactataacactgttctttgatttttgatatataggcctttcatatgcttgcttgttgggtagaagaccccgacggtgattattttaagaaacatcttgctcgagtcccggattacatatggattggggaggatggtctgaaaatccaagttagtcataaactaaagagtatatatattttttactctgttttgaaaatgttgagtttttaaattagagaatgttatttggtgcagtcttttggtagccaactgtgggatacagcattctcacttcaagtcatgttagcttatcaagatgttgatgacgatgatgatgagattagatcaacgttaatcaaaggatacagtttcttgaataaatctcagcttactcaaaatcctcctggtgaccatagaaaaatgttgaaagacattgcgaaaggaggatggacattttcggaccaagaccaaggatggcctgtttcggattgtactgctgagagtttagaggttctgactccaatggttattagttctttaattaaagtaactttttacgatcaatcaactaacgttagaggattaaccgtggtttacactttggctggccagtgttgccttgtctttggaagcatgccatcggagttcattggcgagaaaatggatgtagagaggctctatgatgccgttaatttgcttctctattttcaggtaatcacctaagaattcactaataatttattactatatgatattcgaaatgatattaaattacatatctcagtataatattaaaattgctaagttgtttaaaaaaaagtttgatagtataaaatagattcaaacttttagattattagtggtgtctgcatgtttctttagcatgagaattcgactctgcctccccgtattgacaatgaacaatggaccctattgacacaataaaagagactatatatactggtgaaatttgaaaacatatatattgaaatgattaaattgtataatttttagtatcaaattaaacaataggcaatatttgaaaaaagaatgatacaaattactttaccgaccatacaccaatctaatatattttcttatatatgattattatagagtgataatggaggcatagcagcatggcaaccagttgaaggaaaagcctggttagaggtaaaactattatctagttatatatcatggacgcttttttgtgatataacgtaacaaattacttaaattaaatgcagtggcttagtccagtggagttccttgaagacacaatcgtggagtatgagtacgaacgatatacttatcaccctctcttcatcgatatttattttgtttgtttgagcataattaaagttgttaaatatcatgatttttaggtatgtagaatgtacggggtcagcgattgcagcattgactcagtttaacaaacagtttccagggtataaaaacgtagaggttaaacggtttataacaaaggctgcaaagtacattgaagacatgcaaacggtggatggttcatggtacggaaattggggagtgtgttttatatacgggaccttctttgcggtaagaggtcttgtggccgctgggaagacttacagtaactgtgaaacaaattcgtaaaacagttcgttttcttctagacacacaaaatccggagggtggctggggagagagctttctctcttgtccaagcaagaaatatacccctttgaaaggaaacagcacaaatgtggtgcaaacagcacaagcacttatggtgctaattatgggtgatcagatggagagagatcctttaccggttcatcgtgctgctcaagtgttgatcaattcacagttggataatggcgattttccacagcaggtgattttaatcctataactggttttcattattcatatataatgtgcatattattagtatttcaaacacctaacatgaccctctaaagcacaactaaagaaagaaatatatgtcaacagaattaatagttctcattactaggcagccattagtccattattaggcacatgatgaggtttaatttggcttatcatcactcaaattcaaggcatgtgtcaaaatgttgttgacaagtataaaattatagatatcataacacttaattttgtttttatatatttccaggaaataatgggaacgttcatgagaactgtgatgctccattttccgacctataggaacacgttctctctttgggctctcacacattacacacatgctctgcgacgtctcctccct

SEQ ID NO: 159653 - DNA, 1832 bp, Arabidopsis thaliana landsberg
  unsure (1)..(1832): unsure at all n locations
taatattttatttggtaatgtttaaaacttatnttgattaccccaatactagtactgtatatgcttttatttaatatatccataaccaaataatnnttatattaattttatttttgaagtgagtttgttgcttaaaaaataaaaaagttaagcagaacttttgatttccgaataattaatttctaggtcaacgaagttggttccgccgttaactagactaaagattgcgttttggatttactttggattctaagcttcttttttaaatgattgcagatttgcagaaagaaagcttcttcttttattaagttgtggacaaatggctggtactagcatggctgaacctgaaggtgtcaagatgtcccatgactgttcagaggaagacgcaagaaaggaattaaaggttttgttagatagggtcaaatcagctgcaacaagcttgagctatttgagatcaaaagctagaatcttggccgttcctggtctgtcactcggtgctcaacagctacaacttaaagatgatactacgttggctggaaccaacaagaaccaggattccttggttatagaggatggagtctatactttgaatacgctccaatccatagaaatggttattactgattcgctggagtctcttttgaggagggtcacagcggcagaatctgaaacgtgttctcataaggagaaggtgattatatgtgaggaagaaattacaaggaagacagtccaaatccagaatctgtccttgagattagaacagacggaacggattgtaatgacagagtgtgagtcgcttaaaaatgccctcactgcttccaacaatgttttagatacacttctttcttcctccagacggcacttccaaaccattgaagcccggtcagtctcatctcttttatttgcaacttgttagctgttttatgtaaatgataagacatgtatatatgtgatgttccttttggaaaggtacaaactacaaagtatgtaaagcaatgtctatgatagcgtgaagagcagaaaaatcaatatatagtacaagcagctgacgagttatagaatttattaacaattgctatgtatttcaatgttactgaagctattgtcatatgtttattacggtggaagcaggttggttgctaagtcgacacaattggaaggcgagaaagcgcagaaagaggtacaagtgcaaaagctgatggaggagaacatgaagctgaccactcttcttgataagaaagaagctcagcttctggccttaaatgaacaatgcaaagtcatggctctgaatgcttcaaacatatgaaatttgctttatctttgcattgttgttggctcatctcttatttttttcttgagacaatgctttcgcagaagtagatgaatgcaatcttcttccttcattgttcttttcttcaaatgtgacattgtaatttttttatctgtagattattatggtttatgcataaggaagaatgttcgtactccgaaacggcaagtagttcttacgtctgtatatcagacggcaagaatttgccatcgtagcaaattcgtgtatgacgtggcaaatagaattagccaacgtcttttatccacgtgtaaatacgatcgctctgttttcgtagactttgtgttgaagaagtttctctctaaaaccccaaatctatttttccctcctttgcgagaaattaatcggagaaagaaaaaagttgactagtgcgattttgagcaatttcttcgtttccatggagtctgatatcgagattttgtctgaagctgatgcgtctatgcggaagctacgcattttcggaattgatgatcgcgaagatgag

SEQ ID NO: 159654 - DNA, 989 bp, Arabidopsis thaliana landsberg
atgtttaggatagttttgcatgcatgttgcatatttgcgttgatttcaggtgatttggagctgttgacgagctatcaggaagaagcggacctgatcacgacaaaccactcgaccaagaggtcgagcaggagcttcaagacctcaagagaccactcgacccccaggtcgagcataggacatcaccacttcacttcaccactcgaacacgaggtcgagtaccaccacgattgatactcgatcacttcactcgaccatgaagtcgagtgtcttcaccttcactgccagaccactactcgaccacatcactctgcctagaggtcgagtatcaccatcaccacctgatactcgaccacccagttgtctggcaacaaattgtgtagtcgagtatccctgttatattttttgtctgttacttgacttgtcactcgaccacacccagtgctctgcaacaagctgtgttggtcaagtgcttttactattctacttgaatttttgttttctgcatgttcacttaggactgctacaacacacaaaaaactgttattgcttggcttgacttagtgacttctgatcacatcttgattgttagtatcacacccatttggattgacaaccttcagtactacaacgacatgataatgcattaggataattgatcttaaaaacctattatctagtacgccgatatgaagggagcttcgatagaggagggggatgctaatcaaaatatggatgaagttgaggatgtaaatgcagaggaggatacaaatgaaaaaaggatgaagacgagatgtccagatttgattgtttcgatgacgctgatggagcgagtgacggggatgaagagtctagtgtgtgcgcaacgtatttgaagatcaaaaccagtgtggatttgataatggaaatggtgacaatttgtttaactatgggaaagttcatcaggaggacaacaagtttatagtagaaaaaatgagtttgtgaaccttgaa

SEQ ID NO: 159655 - DNA, 1338 bp, Arabidopsis thaliana landsberg
tacacagctatgtctgtcttacattagtgtgctccctctctctctcctatcgttcaacatgggaagcttctcgtgatccttggccaagacccttcaattgcacacgaagccggaagatttgctgcttggctcatcccaggactgtttcgttacgctgttctacagccgcttactcgctacttcaaaaaccagagcttgataacacctctccttatcacctcttgtgttgtgttctgtctccatgttcctctttgttggcttttggtttataagtcagggcttgatcatattggaggagccttggctctcagtttgtcatactggctctatgccatctttcttggatctttcatgtacttctcctctgcttgttctgagacacgtgcaccgcttaccatggagatattcgagggcgttagagagtttatcaaatatgctcttccttctgcggctatgctttggtacatcacttttctctgttcctttttcacttctcattgcctctacattttttgttagaaactcttttatgtgttgcagcctagagtggtggtcttatgaactcataatattactatctggtctcttacccaacccacaactggagacttctgtgctctctgtctggtactcccccctgcatcttactaactctcgtcacaatcatgaatttgccaaaacataatgttatttatactatgaacagtctccaaacactttcgatgacttattcgataccactagcgattgcagctgcagcaaggttagagccaccattatgctgttcataaatggtcaagcatacttgctgttcatggcaaggaatcatatggtttcatgttcataaggggatgtttcttgtgcagcacaagaatctcaaatgaattaggtgctggaaactctcgagcagcacatattgtggtctacgcggcaatgtctcttgcagtagtggatgcattgatggtgggtacgtctctattagctggtaagaatctgttgggccaagttttcagcagtgacaagaataccatcgactatgttgcaaagatggctccactggtctctatttctctcatactggacagtttacaaggggttctctcaggttcgagaactgttcctatttcttttctcaaacatatactagtgtcgaatattatgttatgcactttttagtcaaagataactaaaggtgaactcttttctgccattcctaaccctcatttgttggtttgcaggtgttgcaagcggatgcgggtggcagcatataggggcttacataaactttggagctttctatctctgggggtatcccattgctgcacctctagccttctg

SEQ ID NO: 159656 - DNA, 9985 bp, Arabidopsis thaliana landsberg
tgccactgaattttccaactatgatttcataaattttcttggtaaacactacaagaatggaaaacgacggagcctccaccgtctgtcctctcgaccttggcaatcaaatatttttatccggcgatggttttgaaccagacggtgtcctcttttcccacgccgcttttcactttcctccaaaagacaaaaaggaggcgtatgatttcatggataaggtcgggattcactcttccttcctttattaaacttcttcttcttcctctttttatgctaaacaattttccgggctaagttgtagacaaacatcgccgcttgtgcgatgagaggcagcgtttaggcctcaagaggcaaactcttgaggcccgtatcgctcgagtggagaggaaggtgaggaccatgtggagtgatcctttccaatcgaattggaggaaggtgcgtggccaggatcccgactaagcttcggatttacctccatgcccgtggtcaagtctctggtcccgtaaatgctcccgtcaaggtgatcccgtccgacagcgaggaggacgacgaggaagaggatagcaaccactggaagcgtgtcaagaatgaacccgaggtggatgataaaaatgaagcatcctcttcgaacgctgatccggcgatgaaggagcctgttcttgagcctcttccataaatgttcctgaactcgttactttttattttattttattaattttgaacctgctatgcgctctggcccatattattttatggaaactttgctactttccttaatctcgaaatattcgttttggacatatgttttaaatgtagggttgactagaaggctttaactctttctgtgaaacactctggtctcaaatggaattgcgatcctcaagggatacaaagtccctataaattacgactcctttttccgcgaatcactccggtctcaaatggaattgcgatcctcaagggacacaaagtccctataaattactccaaatttcccttatttttcatcacaactttcttttccttttgctgctatggagtttaaccttcgatgctcggagtctatgccagacttttccatggtcagaatggtggacgaagtgatgagatccacccaaagactcggcactcttaagttgagcactggatagaggtggctgtgaaaccgtgatgatggatagatttgtatgaatcgatggatatcacagaagcttgcggaagggtttcaagataccgaaacttagatcctttggatatacacaccaaaaaagactaagggttttgctggatatacacaccaacaagatgatcttcttcgaaaaggtttttgattaaaagaatgataagttctcaaaagagaatacaagagtatataaagagaaggagaagagaagatgaagaggcaagtcttggaacatactccaagactgcctagaacacaacagatattattaacatagtttgaaattcaagatagacccttcaacttcaaaagccacaaaattgtctttttattttagtgggttttggccttgaatcatcaaaatggattatatgaagtgaaaacataagcctcattaaaaaccttcctttggaaaacccggcgggacaaaatcaaaggtagggaaaaagagcactcatgaatcacttatccatcttgatgaggtccttgagcttgaatcaaaaccaaaagggtagtgacttggcttaagtcatttggtcggtcctaaatatggttaagcatcccgccaatggcttgacaagaacatcctccgctacaagcttctcctcagctacaagctcatccccagctacaagcttagctccttcctcggctacaagctcacgttcaagcttcggttcatgctccatatccttaatattgtccatgatcatatcacaatcggtttacagggaaccagagttcatcgaactacactccaaaacctgcctttctaaagtcatttcctcagagcaacttccagaggagaccgaccaaagagagtagaatgaaatctatgcttgagcagattcttgagagctaaacaaagcttgttgtggagtgtaatgacaagtttgatgctgtctacccagatcttaatgggaggatcgacaatcttagctctcacttgaagaagttggatgtacaggtagctcaaacagcacaattcattaagagacaagagggctttcttcctagtaatcatgatgctaacccaaggaagagctgtaatgccatcttgatcaaagaaggagattatgtgtgggaagaattggacattaaaggtgagttggagctcgctactgtagagttggtgtcgaccaacacctactagtgtcgatcaacaccatatggaacattgttttcagaatggttcctcacgagggtgtcgatcgatacacctctagtgtcgacactgaatccggactgcaccttgtgaggtgcgaatcccgatgcagcccgagtctgcgtacactcctcctgtcccttatccgaggaagcgtcgttctaaggaggagattcatgctgctaagtgcacaaccatcatggaaaagatcctctcttctcttcctaaggatgcttctgagacatcctcttctccactcaacaggtatgtcaagcgccttgttgacaatggcattagctctgatgaacctaaactgctgacacgggacatcagtaccatcatgttgcataaggtcaataaagagaaggcacatcgagtggacattgcttagtacatctccacaagcaggtttagccgctcattgtgtgatatgggatcatgtatcaacctcatgcctaagtatgttgctgagagactaggcatgactaactaaagggagactagaaacagtctcctcttcgcggaattttccaaacaaatccttgaagtaatacttgaggatgttcgtgttaaggttggtaactccctaatccctgctgattttgtggtcctggactacgagcaggaacccaaggatcctcttatccttggaagagcattccaagctacagttggtgctaggattgatgtgaagagaggtaggatctctctcaaagtttgttatttggagatggagtttgacatggatggttcaacgctcactaagcctatcagtagtattgcctctagcacagacacacctcctctaactgctcaaaatcccaaaccagagccacacaaaacgctcccatcagctcagatcgccaatgagaattgtagagcatcggtgtcgatcgacaccatccctcctgtcgatcgacaccctcgggattcatagacagaggattctgcacattctcttcaacccacaccacttgaggccttctttgataagttctcttctatcttttctccttctttaccttagattaattctttagattcttcgaagtctgcttcataagttaacaagcctagagttcttcgaaagcttgtttctcctcttgatattgaaggaaacgatgatagtgtcgatcgacacaatcatgagtgtcgatcgaaactacagttgtccagaccggattagtttacacaccgccttggaaggcgcggaggcagcatcaatccttcaccaatccacccacatcctgaactccgcaaagtcaagctattgactcaaaccaagcgcttagtggaaggcaacccactggtttgatttttctgtttttctttttttttattttctttcatttttgatttatttttccctccttcttcggatttgaatgccactggggactgtgtcatttaagtctggggaggttcttactaattatgcttttatttttgattcttattattttttatttttgagtttattgagtcattttcttatcgttaaaaaaaataaaaaaagttttctttagtttagttaggaatcatgatctatatttctcttgattattgtctggttgatgaatgttggtggttcgactcaatccgactattggaaaatctagattgctaaccaatagacttgaggatatcctagtttcctacacaaccactaaggtttgagctaatctcactgctcttctttttacctcttcaaacggttcatattcatagatcttgaataaatggtcatatatgatattgagatccatgtgataaagaatgtgttcctctccccttataaaaataaaaagaaaatgagagattgataggattttcatatagtgtataggggtaggaatgttccctatgaccccattattatacattatttagaatgatcaattacaaaggttggaaaaatgctgagggtgtcgatccagtatgcgagttcccctatgtttactctcttaaaagaataaatctgggggagaaaaagaacaccaaagaaaaaaatataaagaatggtcgatttatcatggtatagtacaagaatgagtctagaaggatcttgaatgttagcttgtttgatgagacccagctatgaaagcctggtggatatagttgtggaacttaggtatgaaatttagaatgttgagtaagcttgcagagaagtacatgttggttaggatttgattagaattgttaggcatgtggatttagtttggatgatcatggcaataggctagagaatgttgggagttcctttgttttcaaaacctcttccacgggtttggcttttgtgttttgcttgagggcaagcaaaaactaagtctgggggagttgatatatccctagtttcactgattttatctaagttttaggtataggattttgagtctttatgttgtttcttgagtctttttagtgtcttttcaggtattctatgcagtgggacaacaatggagataatgagatattttggagcaaaagctgaggaaaaggaagctaaggacaattttcagttccagattaagaggagtgtcgatcgacacactcctggtgtcgatcgacaccagtttcagcccagcaaagtccatgacgctttcaagtttacagaaaaggaaatttgccccagaagacttccctatttgcattattagtccatggacgttttataagttttttatattgtttttagacctaaattctcttttatcaagttttttgcaaaaccctattttgagagacataagccattcatccatttttcttcagagattcattgagttttcaatatagtgaagagatcctttcattcccttatcttatttgctgcgtttatgctttctatatcaaatatattgtttgcttcaatcaatatgtctgagtaatctgcttgttaggaatagggtttctcattaaggattcatatggtttaatagattgcccccttgctaggttatctatagaattctttatcttttattatgtttaatgctagatctatagtaattaagtagatcttgaatccagacaatagatatgcccaccataggtatctgtagtgtgatatattatttgatgagcctggtttataggtatgtaatgagaatcagcctatctactaaggtgaacaatcgaactcgttaagaatgcatatttaggttaataatttctcggcttctccagttattcttagctatagatatagggagtttcgcggaatgcccccggttattccataattagggtttgagtttaagaatggttcgataacaacccacctttcattagatctactagccaatagtctcgtgagaataccttgttcctaactctttatttcatcgtttacaaccaatcaatcagctgtctttctactttgttctcttgtattttcttccattccctgctagtttaattttgacatttaactcattgtgtgaacaaaagaactttgtggaaatcgatccttaaatactgcaattgatctcttatttgagagagtagttcttagggtaatttgaaccttatcaggtgtcgatccagtaagcgagttcccttttgtttactatctaaaaagaataaatttggggaaagaaagaacaccaaagaaaaaatatgtataaagagaatggtcgatttatcatggtatagtacaagaatgggtctataaggatcttgaatgttagcttgtttgatgagacccagcgatgaaagcctggtggatatagttgtggaacttaggtaaggaatctagaatgttgtgtaagcttgcggagaagtacatgtgggttaggatttgattagacttgttaggcatatggacttagtttggatgatcatgccaataagctagagaatgttgggagttcctttgttttcaaacctcttccacgggttcggcttttgtgttttgcgtgagggcaagcaaaagctaagtctggaggagttgatatatccctatttttacttttttaactatgttttaggtataggttttagagtctaattgttatttctagagtcttctctagtcctttacaggttttacatgtttgggatgcatttggagattatggagtattctggagattaaagaacaacttaagttgctgaagaaatccggagacgaaaatgcacgtaggtgtcgaacgacaccacccctggtgtcgagcgacaccaatacctgacggcaattttgagacgcaacttattgaagttttgaagatttccaaattcggtccagaacttttccttatttttatagaaggcccatcacgttttaggtcatatatatatagtttttaaggtcattgtttagacctaagttatgttttgttttgagatacacttttggagagaagaatccaatccctgtagagaggattctgaactccttttactcttcttcttcttattcaatgcaaactattcagactttgatgtgtgttactttaatcatgtgtgattaatcactttgttgggtttagggagtctcaatagggatttagatggattagtagatcgaaaaccccttacgattattcttagagttcttcatcttgattgttcttactgttagttttagattgatcacctagaacttgatattagataataggtatactcgccataggtacttgttagtatttaagaaagaacaggtaggctcatagaagggctatggtttagatatttaagtgaactaatcaaactttataataatgcatgctttagcataggatttcccggcttctgcggtgatcttagctctaggcatagagagtttcgcggaacgccaccggttattctaaaatcatagtttgagttcgagaacggtgcgataacaatcctaatattagctagatctacaatttatatattttccgagacaattccttagacccgatgcttcaatcccctgaatctacaactcaatttatttgctttacggtcttttactatattctatattggtctagcttaattgaaaacatcataagtctattgtgtgaacatcgagagctcagtggaatttgacccttaagtactaacggatgatctcttatttgagggagtaggcttaaggcaatttgagctatatcaaaatgcttgatgagttgcatggttcatgcattttctctaaaatagatttgaaatgtggttatcatcaaattaggatgaaagaaggagacgagtggaaaacaacatttaaaacaaaacatgggctgtacgaatagttagttatgctattcgggttgacaaatgcacctaatacattcatgcgcttaatgaaccacatccttagagcattcataggtcatttcgttgtagtttattttgatgacattttggtttatagcaagagcatggctgaacatattgatcatctagaatcgtcatgaaagtccctagggaagagaagctttttgcgaatcttaagaagtgcacttttgcatggataatcttgtttttctaggttttgttgtaagtgcagatggcgttaaagtagacgaagagaaagtgaaggcaatcaaggagtgacgtagccctaaaaccgttggagaagtttggagctttcacggccttgccggtttctataggcgctttgtcaaggattttagcaccttagccgcacccctcaccgaagtaatcaagaaagatgttgggttcaaatgggaagaaactcaagagaaagcttttcaagcacttaaagagaagcttactaatgcccctattttgatcttacccgattttcttaaacctttgaaatcgaatgtaatgcctctagtataggtattggagttgttttgatacattataacaagcccatagcctactttagtgaaaagctcggtggtgccacattaactatccgacttatgacaaagaactttacgctttggtcagcgatgtagtgacccccataagggcatcgggcacggccaaaggaccaaatgagaaacttttgcccgaatgcaaagccaattgaccgcgtgtgtccaaacggtgccaaaacatcaaagggcaagaatgggtacgaatgggcaaagatgggaaaagaagggcgtgccacggtgaagtttgccccaccggccgcggaaccgacatgagtaggacacctcactcgcggtgccttgcggctcaagttaccaaccttggagccgaagtcagctgagtcttggagacgaagtcagctgagtcttggagccgaagttgatgggtggtggagtgacactcgttgccacctgtcaccacgctgtcgttcgagacacctgtcgcctgtgggcgcggcagctgtccggacttgtggcagcgggcggtaatgcatggccaaccttgggcggattataaatagagctctctccgcccagtttcatttttgaaggcaagagagagagactaaaaggctgtccgattaaaaactcgaccgaaactaagaaaaacttgcccgaatcgataaaaccttgcacatggtcgaggaaacattgtttcagactagagatattttacgttgcttctgcaaaattacttgtttcagactagagatattttacgttgcttctgcaataggatattttacgttgcttctgcaaaattacttgttattatgtaaattttaacaaggatccgatataaagatatatttttgggtaactctttgccaagtataagctatatactatgcataaaatgttttcttaaaggcagccgagtgtttaatgatataagacctagtccgggtcgctcaacactataatatcacgagggttggcaagcctaagtggtgttcctagtgggtggaaggtcgattataatttggttaaagaaccggattcatctggaacctctactaagttgtgatcgatcaacttcactgtagcgtaactgtgtcacccgtggcttgtctagccatagggcaattcgggggcgttacaatttttgttatcagagcatggttatgcgatgctcgtggacacttgggttttcgatgattttatcgagtaaatttaagtcgcagaatgcaacattagattccggttgttcgtcttttagatggctaagtgggggataggtttacctcgttttgcagatgttgtctagcaaaggaagcaacacagtcagttcgttgcacggtcttaatgtgcccaaccccgaaaactttcgtccgccgagcagtacggacgatgacagtttgtctgtggccatgaatgatcaaattatggccgaagatagtaaatctactaagtccgatatgtcaattgaatctgatccgtctgaatgttcggagaatgatgatgatcatgatgacccgttatctagtgaagaagcgaaccatgttgagtggatgatcaccgatgatggcaatttatttcgggctatcaataaaccaattttcaccgattttatctatgttttaggtataagattttgagtctttatgttatttctcgagtctttttagtctcttttcaagtattctatgcaatgggacaacaatggagataaggagacattttggagcaaaagctaaggaaaaggaagctaaggacgattttggttcagaaatcagcgaggagtgtcgatcgaatcactctttgtgtcgatcgacaccagtttcggcccagcaaaaaccctag

SEQ ID NO: 159657 - DNA, 2535 bp, Arabidopsis thaliana landsberg
tggcatgagccttaggaacgagccacgtggtgtagagattaccctgacctttggttcaggtacatattgctaattttaaatatataaatattcataaaagctacttttgattctacaccttaaaaccccagactcactcacatacattataaagataatttagtatctatgaatctatccaacaaacatgaatctacgtttaacaaccgacaattctcaaaattctcacacataaaaaaattagtacatgaagtacatgttaattgagttagttttcacttttcaccattcgctattgtttccacacaaaaaatagtattgtttgattgtttatattgttcacgttatcgtggtaattaattgcatgcatgcatgcgttaatggttacgtgaaggcatatgccgcaaggagcagaggcggtgcacgccgcaaaccctaaattcctagtcatcctctcaggcattgacttcgatacaaacctctctttcctccgtgaccgttccgtgaacgtcagcttcacggacaaacttgtcttcgagctccattggtacagtttctccgacggccgagattcgtggagaaaacacaactctaatgatttctgcgtcaaaattatcgaaaaggttacacacaacggaggattcttgcttggaagaggctttcctttgatcttgagtgagtttgggacggaccagagaggcggtgacatgagcggaaaccggtatatgaattgtttggtggcttgggcggccgagaatgatttggattgggcggtttgggccttaaccggagattattatttgagaaccggtaaaacggatttagatgagtcttatggccttttgcaagccaattggaagacatcagaaactctacttacttgcaaaaactctccggaatccaacatgcctttaaaggtcagatcagttttttttcttcttaatcacttaaaagaaaaaaaaactcaaactttaagactcgtaattgattatatatccaggacctggattgcgacccaacaagaaccttctcttccatccatcaacaggactctgcgtcactaataatccatcagacaatataccaacacttcgattaggaccatgccctaaatccgacccatggacctttaatcccagtgaaggcattctttggatcaacaaaatgtgcgtcgaagctccaaatgttgttggacaaaaggtgaagctcggagttggtaccaagtgttctaagttgggacaaatctcagctacaaagatgcatttgtcgttcaagacaagtaatggtttgttgctatgtcttgacgtagacgaacgtgacaacagcgtcgtagctaaccgttgcaagtttttgaccatggatgcttcttgtgatccagcgagccaatggttcaaagttctttgaattctatgtctttattatggagaacatgtatttgacatttgtaatcaagactaccactgagcatattcaagaaatcattttttttaaaaggctaaaagactttaacagtaatgggctgagaatataaagagattgaggcccatgttggtcttcacttgattatcttatatttcgccacgtgtcagtcaacttagccactgagaatttgctgattatctgagtcatgagccagttgactagttggaaattaaaccactgcgaaaaatatgataagccttaggtttcaaccaagcaccaccgccggtgttttatcggcgtcagtgagccgcgccggttttatcaagcggtgcggttcgactaaaccgggaagggttggccggtttgttacaatggcgacggcggcgagtcctcttgaaatctgcgttaaagcttctatcaccactcccaacaagctcggagactgttagttttctctccgtaaactttgaaatgttgatgattagctgcaatttgatccctctttcactcaatttcgaattggagatagataatttgtgttagctccattggtgcagatagatacttagacttaagaatttgaggatttcgtgtcaaacttaattggtgtttagattgtttcttaatttcgaaaactgaaactattcaaaacatacttttaaggtttaataagctaacacgattgcttctatgtttgtggcgagtactggttttgaagtatattttttctcagtgagttgattatatgcataattttgttgataggccctttttgccaaaaggtgttactgacaatgcaggagaagaatgttccttatgacatgaaaatggtggatttgagtaacaaaccagaatggtgaattcttggattctttccataacgtgcctgaagtagacatgattcttgattaatggcagtgatttccttagttttttcaatgggttgtgttcttgtttattgtttattaggttcttgaagattagtccagaaggtaaagtcccagttgtgaagtttgatgagaaatgggttccggattcagatgttataacacaggctttagaagagaagtatcatgagcctcctcttgctaccccacctgaaaaggcttcagt

SEQ ID NO: 159658 - DNA, 1840 bp, Arabidopsis thaliana landsberg
tgccagctctaatctaatattatgtgaaacaaaaggcacaatgttttctagaacccagcccgtaccatctcgctagtagtccttgagccacacgtccacatgaccactaggtaactccctggttgctctctctactaatgatatgtttgataaccatttatctgcccaaaatcgtatattccaaccatcccctagcaaccaactgctcccatgaaatattacttcccgcaggtctgtcactacactccgccaagttgatgagcttgcactctttttcaacatccaggtccagtcttgtagatcacctaccttatatttgcttcttaatatctttgtgaaagtaagagcaagacggctactttaggtaatgtttgagtgaactttccttttgatattatttcacttgagttctaggttacatcacaagttcccttttatagctaaacaatgctagggtttcaatcattgtgaactgacagatgtctcaatcttgttatgctacgcaggtcatcaagcaatcaaatctgttctctgtgatgattggagccgtacaacaagcgctcctcttctctgtcattattctggctttgttctcttgcacaagtggacttagccgttgagaagatgaagaagacttgttgggcttctcagacttgatgggcttctcatttaagttgacattgggcttgttaggtgagtggcccaatatccctttctctttgtttactgcaacgacatcgtcttgactccttgactcttcagctgcatctgagttcttcttcgatcttgtttcagattcaggagctgaaggcggagcagtagagctcttgctaatactttgctcacaaacacgtatgatcatgtaacaatctccatcctacctttgtcacaagcgatgtgttcaaatcctttccagaccaccctctgtccgtggacgacaaaccctatcccaagcaaccaaatgttgttttctcttttctggtgtacttccccataaaaagcctcttgaaactttatccaaaccatcgccaatcgattttggtaaagatattgtgctcatggtatgaatcaatatagatgccaacactgatttggtcaatgttagtcttcttgcaaaactcaaagagcagcctttccatcccggtagctttgatgacacttttttgaacaaaatagtattagcgcggagaagatgagaattctttaaggatacttttgggatggttgtatggaaacttgggctgtatggaaaaaatggcagaaagcacttggtcgaccaatgtttgccatgggagtttggttgagcttgaaatagaggtgcggttatgtgtttggcgaattggaaaaatgtcgggaaagagtaaagtttaccagagaattgggacaagaagtaagccgtgcacataactcacttcgggagagtataggtacgggtgtgagagttgagcgaatggtaacgtggagaccaccgcgggacgagtagttaaagctagatatcgacttgtcctttcacaagaatccagttttgactacagcggggggactcatacgggatgcaacaggtagttggtgtggaggatttgctctcaatatcggtgtttgttcagctcctttcgcggaactgtggggagtttactatggactttacctaacttgggagagacatatcacaagattagaggtcgaggttgattcggagttggtggttggattcttaagcaaggggattagtgattctcatcccttgtctttcgtggtacatatgtgtcccgactttttatttaggaactagatagtctgaaacttcacatgtatatagggaggcaaaccgcctagcgga

SEQ ID NO: 159659 - DNA, 1573 bp, Arabidopsis thaliana landsberg
ttaatttgcatatttaggcatctaggatcatcttgcattcgcattgcatgttttggtatgttttcaggtgcagaaagagctaaaaaggactctactcgatccattcactcgatccaggcagctacagaagaggcatcaattcactcgacctctctactcgatccaggcagctacaaaggaggctgcagtttactcgaccctcttactcgatcaaggcagcctctgatgaagaagcagattgatctactcgcccatcctactcgatcctctactcgacccatttactcgaccaagggtgaccaaattacaagacttgttgagctatcaaagcgtcttcggatcctcctcattccccactcaaccatacatctgagcatatggatagtagaggaagaagcatttactcgaccaattgatcactcggagcatagacacaaaggcacagactttgcagcaccctctttactcgatccccaagatcaagtattcgcccaaaccgtctcaagtctctcgtcttctagtgaatctagcgttttaacattttactataaatagatcactttggggtttgtccaaaggatctagcttttatctttaggttttctttgtgttcttgaatcttcaaaacttaattactcttaatctatttcgtttttgcatttagttgtttaagtaaagttgtttagcttgtttagatctacattttggtatgatttcagtaatttctgggtttgtgttcttgagaatgttgcttgagtagtgattaggattcttgaggatggattagattagggtaatctctaggttagttaggtggttaagattagtttagaacccttgtggatttgcttcgcccctatgcagttttcgctggctgatgtggagattcgatcatagacgtccagcgtccaaaagacgttcaaatggatgtctgatcatcaaattccagagatttgtagactcgaccaagagattggcttgtctgcttattggctttggtagattgtttcttaaacccttctttactatgtttcatcaacgacagttaagattaggaagtggtagagttatggggatctctgtcccaagtgtggattgacccggtttttgaatctatcgtctagggtatctacctttcacatgttagccacatgctgaaccctagagttgcccttatcaatgaatccacttttatttacctgttatttgtatcccctgttgataacattttagttcttaatattgtcacatgttagttctactcgacccaatgatcgagtagggctcttaagttctcgtttttacctgtttgaatcctgacctaggattgttactagaaacccaccatcattataatctggcttgacttagttgcttctgtacacatcttgattgctagcaataacagtggactggattgacaccccctatagctgcaatgacatgttagtgtttaagaggaattgaactgaacctcacattcagcacataagtaagcgtaaaaacctacttatcacaaactattctgccgtgaaatcttcgtcctctttgatagctagtgcagtttccatct

SEQ ID NO: 159660 - DNA, 2328 bp, Arabidopsis thaliana landsberg
atggcgaggggagaatcggagggagagagctcaggaagtgaacgagagagttcgagctcgagttccggaaacgaatcggagccaacaaaggggacgatctcgaaatatgagaagcagaggttgtcaaggatcgctgagaacaaagcgagattggatgcactcggcatctctaaagccgccaaggctcttctgtcaccatctccagtttcgaaaaaacgtagagttaagcggaattccggtgaagaagacgatgattatacacccgtaatcgccgacggtgatggtgatgaggacgatgacgaagtagaagaaatagacgaagacgaggagtttctgtgtaaaagaaagaacaagtcctctgcatccaagagaaaagtctcatctaggaagattttgaatacatcagtttcccttggtgaggatgatgatgacttagacaaggcaatagcgctttctctacagggctctgttgcaggaagcgataaagaggctgcaactatgaagaagaaaagaccggaattgatgagcaagacgcagatgacacaggatgaattggtcatgtacttctgtcagtttgatgaaggtggaaaagggttcattactctgagagatgtggcgaaaatggcaactgtgcatgacttcacatggacagaagaggaattacaagacatgattcgttgctttgacatggacaaggacggaaagctaagcttggatgagttcaggaagattgtgtcgcgatgtcgcatgttgaaagattcttgatttaatctgtaagttaggctgtgattttgggtgactacttgttttctttttgtttttttgtcgtcacctttgcattacttaaaaacattcaacttacatcagtccaggatattacataagtcatcttcttagaccttgctatttttgctagcttatcagctacattgttaagagtacgaggaattttacagaactgagaagaaatataagtcttagcaaggttcttgatatcctgaatatatgatgctagatcattgtttgtggtggttccttttggcagactctcattggactccaatgcggcgatattgtgatataagtttgatgcatcaccacagaacagtacatttgtatagcctaggcgtccaacttgaaagagtgctgatctgagtgcctctgcttcagcttcttctggtgtgctggttggtggtatggatgccattcctttaagaataatgttttcctgtttatcatagagtacccaacctattcctgcacagtcagtcattgaaagccatgaagcatctacacagcagcaatactcctattttttttggatttgttatcttcttccatgccacccatggaattttatgtctatccttagtgctagaccaccaaaatcttctcatagcactagtaattcgattaagtaaccgggatggcaacaagaaacaagacatgctgtaggagggaatggcagttaccaccgctttaaggaggacctctctacctgcaggtgaaaggaatgcattgtaccaattatccattttttgatttattcgctgagcaagataagaaaacgcattagttctgtttcgcccaataaactcaggaagtcccaagtatcttccaaaaccacccactttgtggattccgagaatgtgtccaagttttttttgctcctcttcactaactcctttaccataagtgatagcggacttttgaaagttgatggactgacctgaagcttgttcatactgttggagaatagtgagtagagatgaacattcctcttcagatgttctacataacagcaaagaatcatctgcaaataatagatgagaaatgggaggtccatttctgcttgctttaaaaccatgaagctttcctgtttttatagaggtttgtataagagctgagggtgactacttgtttaatgatgactcttgttttctctaaaaaaaaaaaaaaaaaatattgaaaagaaagaaccctaatttttaaatttaggaatttttattttaattgaccagtgaatatgttcgaaatcattaccatccattgaaacttcaattttcgtgtcttcttcttcctttgaggggtgggtttaaagcgcattttcttcttcgcataacaaaagttttatttctccttggatccacttccacgtctttttttctccggatcttcagctctgaggattattaaagcttttaagcgctcattggagttcgaatgatcaaacgtgcgtcttgtctgcctgaaaaatcttctcttggcttcgatctgaaatgtgactgaaagtattgcttttaagcaaactttgattcttcaatccct

SEQ ID NO: 159661 - DNA, 777 bp, Arabidopsis thaliana landsberg
  unsure (1)..(777): unsure at all n locations
tacatatttgagtgtagcatcgatnnnnnnnnnnnnnnnnnnnnnnnnnnnnnnnnnnnngtttgaaaaggcttggaagagcttaactgatcattggttgatacaactttaaaaagtagtctagcctgcattgagttttctggacatgtttggttccttaagttttcttgtctttgtgttcatattttcaggagcatcaagtggtataggagtagagacagcgcgtgttctttcactgcgtggtgtgcatgtggttatgacggtcaggaacactgactctggtgctaaagttaaggaagatattgtcaagcaagtccctggagctaaactcgatgtcatggagttagatctcagctcaatgcaatctgtcaggaaatttgcgtctgagtacaaatctactggtcttccactcaacctcttgatgtaagctattgaatactgtatatagcggttttgatttattgatggttaatgttttgaattgtcttaattttgtaagcaacaatgccgggattatggcatgtccttttatgctctctaaggacaacatcgagctgcaattcgcaaccaatcatttaggtgagtaggagaagtaaaccaacattatgtggctttgttctaaagttatatacttaagttaacatcatcattagtttttagtcagtgacatggaatttgtgatccactttatttcaggtcattttctaaagactaaacttctgctagatacaatgaagagcacatcacgtgaaagcaaacgagaaggaagaattgtta

SEQ ID NO: 159662 - DNA, 1254 bp, Arabidopsis thaliana landsberg
tcaaaccctaaaggccaagctgttctctttgctggagacttgtcatatgcagacgaccacccgaattatgaccagagaaagtgggatacttggggaagatttatggagccttgtgctgcttaccagcccttcatctttgctgccgggaatcatgaaattgattttgttccaaacattgtaagattcacataataactctttataatctgtctttttgttatttggtttagtagtttatttaaccaacttacatcttactagggtgagcctcacgcattcaagccctacactcaccgttaccctaacgcctacaaagcttcacaaagcacttctcctctttggtactcagtgagacgtgcttctgctcacatcatcgtcctctcttcttactcggcctacggtaattaattaacaaacacatgaaaaatcaaatatatttgaatgccattgagttttcttatataacaagttatctcatttcaggaaaatacacgcctcaatacatttggcttgagcaagagctaaagaatgtgaacagagaagagactccatggttgattgtcattgttcactctccgtggtacaacagtaataactaccattacatggaaggtgagagcatgagagttatgtttgagtcgtggctcgttaacagcaaggttgatttggttttgtctggtcatgtccatgcctatgagagatctgaacgtatctccaatattaagtacaacatcaccaatggcttgagctctcctgtgaaagatcctaatgctcctatttacatcactatcggagatggaggaaacattgaaggaattgcaaacaggtaaagagagtaaacaattttttcaataatattttgttgttttggtgatgtgaaactaacatttgtatgtcttggttgatgtagtttcgtggatccacaaccgagttactcagcatatagagaggcgagttttggccatgcggttttagagattatgaataggactcacgcgcagtacacatggcataggaaccaagacaacgagcctgttgccgctgattcaattatgttgcataacagatatttctttccagtagaggaattagaatctggcaacactagggcctaaacttctttagtcgttggtttcatttagaactttatttttttttgttttctttttagattacgtattttgttttctgattggatttttgctgttcttttatttatttacttttagactttaatatagtttgtgtttgatt

SEQ ID NO: 159663 - DNA, 1121 bp, Arabidopsis thaliana landsberg
taaatcttattcgtccatcttcattctaatgtccatgttaaccttattgagccacttacatcttacaggaaactctgcgtgtcaaagatgaagaattacataatttagccagggaacttcgttctcgtgactcaatgataaaggaaatagcagataagctatctgagactgctgaagcagctgtagctgcagcatctgctgctcatacaatggatgaacaaaggaaaatcgtttgtgtggaatttgagcgcttgactacagactcacagagacagcaagaagccacaaaattaaaggtaatgaggccatgtcatatatagatacttttgcatccttgtgtatgttttgttgtttatttgatctttatctcctatgtagctcaaggaattggaagagaagacctttactttgagtaaggaaaaagatcaattggttaaggaaagagacgctgctctccaagaggcacatatgtggcggtctgagcttgggaaagccagagagcgtgttgtcatacttgaaggagctgttgtgagggccgaagagaaagtgagggttgcagaagcaagcggtgaagcaaaatcaaaagaggcttctcagagagaagcaactgcttggacagagaagcaagagcttttagcatatgtgaatatgttacaaactcagcttcaaaggtgagcctatctgaatctatctcccagggaaactcatgacttttgaagggtcataaatctctttatttttgaataaacaggcagcaactagagacaaagcaagtgtgtgaggagaagactgagtctactaacggcgaagcttctcttccaatgacaaaggaaacagaaaagaatgtggataaagcatgtctgagcatttcaagaacagcctctataccgggagagaatgtagtccatatgagtgaagagcaggtagtaaacgctcagcctccggtgggagaaaacgaatggaatgatattcaggcaacagaggcaagagtttctgatgtaagagaaatatctgcagagactgaacgggacagaagattcagcttggatatcccggtagtgtctcctgaacctaacgttccacgcaatgatccgccttccgaatcatttcctccccagcct

SEQ ID NO: 159664 - DNA, 1192 bp, Arabidopsis thaliana landsberg
gattccttttttgttgttgcgttcctttgcgtgttacaaaaatctgtcaactgctgcattaatggagagaataccaagtagatggccccggccagagtggcatgcaccatggaagaattacagggtaaaatccgtggctcagcattgttgctgcatcatacggattttggtcttttgttggtctccaaagaactctggtttgaggagttacttaacttacgattaattattcttttcacaggtcattcaggggcacttgggttgggtcagatctgttgcgtttgacccgagtaatgaatggttttgtactggttcagctgatcgtaccatcaaggtagcagagatgattgcttattcaatatgaattgtattttttcgaatatgttttcttgttatacttataagtcatgatacaagacttcccttctatggctagttactggagcttagtttagtgcattgccaaaaatccactactttggcgattgtagaagcagttccgactttggtatgtttgctgaatttattacttgtgttttattcactagatatgggatgtagcaactggagttctgaagctaacacttactgggcatatcgagcaagtacgaggttagcctttcaaatctgttctcgtttattaatatttgttagacttttcaataaataacactctcgggacaagttacaagtttgggctcttttgttttgaattttgttacaggccttgctgtaagcaatcgacatacctatatgttctctgctggtgatgacaagcaagtcaaatgctgggaccttgagcagaataaggttacaactctattctcttcattatctggatttctcatatctaatgctcttggaatttttgatttgataggttatccgatcttatcatggtcacttgagtggtgtctattgcttagctctgcacccaactttggatgttttattaaccggggggcgagactctgtctgcagggtaaggcaaaaatatttatatccatatttatatatcttctcgtttgaattcttgcactttgctggatttgtagtttaaaagtccatgtttacttatttgcaggtgtgggatattcgtaccaagatgcaaatttttgcactctcaggacatgacaacaccgtttgttctgtatttactcgtccaacagtaagtctcttttaatatggactt

SEQ ID NO: 159665 - DNA, 983 bp, Arabidopsis thaliana landsberg
  unsure (1)..(983): unsure at all n locations
actcaaaagagattctcacgatcgagcaagagagagatggatggtcgattacctgacaaaggcattctcaagagcgaggctctaaaacaggttttaatttactagtcccttaatcatttaagaacgatcaataaatttacaaatatatgtgtttgcttacacgactgcataatgtgttgttacatatgacagtacatcatggaaacaacagcgtatccaagagaacacgaattgcttaaagaacttcgagaagctacaatccagagatatggaaatttgtaagtcttaatccatatttgattttgtaaccagataattataattaagaaatatgatttatgtaaaaatttataaacgcagaagcgagatgggagttccggttgatgaaagtctatttttatcgatgcttgtaaagatcatcaacgcgaaaaacactatcgagatcggtgtgttcaccggttactcacttttcaccgtagctcttgctttgcctgaagatggccgtgtaatgattcttcttcttgctatcataccaaataaatagggataacttttgttagtatagttattatttgtttttgtgtatgcagattactgcgatagacattgatcaagcaggttacaatttgggactagagtttatgaagaaagcaggtgttgatcacaagatcaatttcattcaatctgatgctgttagaggcttagaccaattattgaacggggtacgtaagtagtagtacgactcacacaattaattactaaagcaaatggtccctttttaaggaatagttatattttaggaccaccaaatttgtatatattttttatatataactaatgaaagattgattgaaacgtctttaatacagtttttaaaacaaaatcgttttcagatttttacagtattttttgatgtacatatgaaaatacagtntttttatttggtcataatttcattaactgctactacctaatcataattt

SEQ ID NO: 159666 - DNA, 811 bp, Arabidopsis thaliana landsberg
atggacactaagaagaaatctaaggaacatggcctataccgtatagtcaatgctatcggttatgcatttggagcgggagctgttggaggttctgtatatcatttcgtgagaggggcatacaattccccaataggtgctcgatatgttggaggaacacaagcggctagcatgaatgctcctcgcttgggaggcacttttgctgtatttggaggattgctctcaacatttgactatgcattggtgcgcatcaggaagaaggaagatccatggaactccatcgtagcgggtgctgctacaggtggagttctgtctatccgaaaaggggttgttgcagcttcaacatcagcggttatgtttggtttttttttggctgtactcaaccctccgttcgggagcaagtaagctttttgggttgtctttgatgagaatgtcatttagactttcatgataattgccttttcgttatcaattcttcaaaattactgtttcatggaaagtttaacagatttcgtggttgagaatttctgatcatttttgtataaacgtcatcaagaactaattattgctatccaagtgttcctttttgaatagtttcttttaagtagatgaaatctcaggggaaaaacatttgggaaggggaagatgagggaatgagtcaaagatattattgagctcgacagtcaaaagttaaattattccctgattttgatcattcccaaaaaaactccccagttaagtcccaactagagcacacaccaaaacaagaaccaaatccatttcttgtcaataagattcaccaaaaaacgactca

SEQ ID NO: 159667 - DNA, 598 bp, Arabidopsis thaliana landsberg
attcatatttggacctcccatcgcgttagccataggtgccaagttcgttccactacgcaaacggggaaaactacccggtacgattagtaatatacatacatatcacttctcagacaaaaacgtacattttgatggaatagaaaaagtgttattgaaggatactattgattgtgatgttaaaaaagggagagtgataagcgaagagtacgaacttgagtatggaagagattgtctagagatgagtgtagaagccgtcaaatcggaggaacgagctctcatcatcgacgatttagttgccactggtgggacactctctgcttccattaacctcttgggtaaataatatctttctactttcattagctagaaaatgaatgctacatgctaaacaagatgatttatatatttacgcttaagaagttgtatattatatctgagtataattattgaactaaaagtgagtctcttctatgcactttagagcgtgccggggccgaagttgtaaagtgtgcatgcgttgtacctctgcataagtttaaggtactatatgacaaacttagttcgtttgcataagttgaaggtcttttaaattcccccc

SEQ ID NO: 159668 - DNA, 938 bp, Arabidopsis thaliana landsberg
aaccaccgagtgatgtacctcgggtgcttgacaggtatccagaatgtttggttcttaagctggaagggactatgagcgcatgggtttcttatttggttggtatacgcccccctcggagggagattgggggtattttaacacggtaccctgagattttgggaatgcgggtagctcggataattaagcctctcgtggagtatctcgaggctcttggtattccgagactggctgtagctaggttgattgagaagcggcctcacatacttgggtttgaattggatgatacggtgaaaccaaacgtgcaaatcctgcaagatttcaatgtcagagaaacatctcttccttctataatggcgcagtatcctgaaatcatcggaatcaaccttaaacctaagcttgacacacagaggaagctactttgttcagccattcatctaaatccagaggatctcggctctttgatcgagagaatgccgcagtttgttagtctcagcgagtctcctatgttaaagcacattgatttccttaccaaatgtgaattttctatcgatcaaatgagggaaatggtaatcgggtgtcctcaggttctggctttaaacctcggaataatgaaactcagctttgagtacttccaaaaggaaatgagaagacctcttcaagaccttgtggatttccccgcattctttacgtatgggcttgagtccacggtaaagccgagacacaagaagataatcaagaagggaatcaaatgttcattggcttggatgctaaactgttcagatgagaagttcgaacagagaatgagctacgacacaatagatatagaagaggtagaaactgatccatcttcttttgacatgaatacattgatgcaacctgaaagagaggaggattccgagtacgaggaagaagaagatgatgacgacgaggagtttgca

SEQ ID NO: 159669 - DNA, 245 bp, Arabidopsis thaliana landsberg
cggaactcttgcgttacaaaatctgaagttgtgtccaattttggtttgattgcaggttgtatcaccacaaaggagcttgggactgtgatgagatcacttgggcagaacccgacagaagccgagctccaggacatgatcaacgaagtggatgcagacgggaacgggacaatagatttcccagagttcctgaacctaatggcacgtaagatgaaagacactgattcagaggaagagcttaaggaagc

SEQ ID NO: 159670 - DNA, 1639 bp, Arabidopsis thaliana landsberg
tcgcatgttccttacctgcagaggaatatggggtctaggtcttggttacttgtatcattgtagggcaatgtaggaaatcagtcgggcctcgggttcagttgctttgtcttatggtgctcattccaacctttgcatcaatcaattggtaaatatatatctcacaaactatgttgcagtatctgagtttttgagtctgagagagaagatttaatactattttacaggtgaggaatggaactgcagcccaaaaggaaaagtatttgccaaaggtacggtttcatcttgagcttttgtatcatggtctgagcttacggatattgtcactgctatgcaaatggtttatcagccaatatcaccggtgttggaaatctcaccttatagaaagaccgttttttattttcttcatctgtgaactgttgcatgtttctcctgatctttttctcttaaaatgtcgttagagttttagctaactattgattcactgctatgaagcttatcagtggagagcatgttggtgctcttgcaatgagtgaacctaatggtaagatatatatttgtcggatcaagagtttgagattgtgagaaggaaacacatcaatacatacatatagccgatgctttgttctgatgtatactgatttgactttttatttcgttacagctggttcagatgttgttggcatgaaatgcaaggctgagaaggtagatggtggttatatactaaatggcaacaagatgtggtgcactaatggtccatctgctgaaacactggtaatatagtttagctcatatgttaacttctgaaactgattttctataattttaacagttttctaccatttgttgtttttttggtttgatcaggttgtttacgcgaaaactgatacaaaagcaggttccaaaggaatcacggctttcatcatagagaaaggaatgaccgggtatgtgaattctcaatcttgttgaaactgactttctatgatctttagtaaagaactaatggaacaaattcagagagtgagttccttaaaaccatttattgttgtggttgctttgcagattcagtactgctcagaaattggacaaactaggaatgcggggaagcgatacgtaatccccattctctcaagataaaaatatctgtgtaaattaaatccctttttcactgtctctttctctctaacatctgtctctcctgagcaggtgtgagcttgtttttgagaattgcttcgttccagaggaaaatattctagacaaggaaggaaaaggttttgattgctgaaactctcttaatctctagtttgatagataatttgcattgcatggtctggcttttctagttttatgaggatctaatatctgagatcaaaatggtaatgttgtgctacatacacgccttgtatatttcttgagtcgaggctactatccccatctctatacttgtctgatgtacatagtgtttgtacgtgcaggagtgtatgttctgatgtcaggtctggatttggagagacttgttttagcagctgggcccttagggatcatgcaggcatgcctcgacaatgtacttccctatattcgccagagagaacaatttggtcgtccagttggggaatttcagtttatacacgttgagcttgat

SEQ ID NO: 159671 - DNA, 2220 bp, Arabidopsis thaliana landsberg
cctactagtgttgacaattccaaagtgcatcagcattcacttctacgatctccaagaacgtggagacgttcttactaaagaagggcgcaattggaacatgtgcaacacgaatatcaaaatcaatgaaaaacaactttatgaatgtcgtctgtgcaatatctttttccatttggaatgtgtcgggctcattccagacgtataccacacttctcatccaaacaccctctcaagtttctccaatacggagcaccagagtatgctcacgagaaatgccttctttgcgagaagaagttcaaaaagttatctaacaactatgatcgagtttaccactgcgatgtttgtaatgtcaccatttgcgaggattactgtatggcgaaaccaccgcaagtttctgttgtgagtccaacgacccatgagcatcaactccaccttgttccaagactagtcaattttatttgcaacgcttgtgggacggctggtgatcgaagtccttatttttgtcttcaatgcaatttcatgatccatcgagcttgtattgatttacccctcgtgataaatatcaatcgtcataatcatcgcatctcttacactagtcttcttggacacgggaattggacatgtggagtttgtcataagaaagtagatgggttttatggggcttattcttgctcgaaatgtcctagctatgctgttcatgcaagatgcgcgacgagaaaggatgtatgggacaaagttgaactagaaggaacaccggaagaggaggaaattgcgccattcgaggtggtcgatgagaatctgatcaagcacttcatccatggccataatttaagactcaacaaggatggtaaccacgaaagcaaattttgtgaagcatgtgccttcaaaatcaataacgatccgttttatggttgtgagcaatgcgactttattctacatgaaacatgtgctagtctgcctagaaagataaggcatgtatccaacactaaacctttaattctatcgacagatacatatttgagagattctccacgccaaagaagacattggtctgcttgcttgcataatttccggggttttagacacgaaacttataataggttttttagtcaattatcctaaaacaccaatcatatcgttgtagtattttaggttgtcaatccaaatgagtgtgatgctaacaatcaagatgtgatcagaagtcacaaagttaagccatgcaataacaggttttggtgtgttttagcagtcctaagtgaacatgcagaaaacagaaaatcaaacggaaacaataaaacactcgaccaacacagcttgttgccaagcacttggtgtggtcgagtgacaggtcgagtaaccgacagaaaatgtaacagggatactcgactgcacagtctattgccagacaactgggtggtcgagtatcagatcgagtaacagtaaagaattgcagaaactaagcaacatgtaacaagatgcagtaaacaatagcagagtaaacaagaaatcaattagatgagaaattcccgaggatggggtaattgagtagtttcgtttcctcagtttacatgtgattgagatgctcaataaattattcctaaacaacaagttcaataaccaaatttaagtgccaccgcaacagagaccctcaagttaaacaagtcccagactcaatcaccattgacgagagctaacctaacaggcaatacgaatgaacaagttaaagccaaaacgctccctgtaaccaataccttggtacatagccacaaatctcttgaattagtggttcagacatttcatcgaataccttttgggtgcggaaatgtttgggctcaaattccagttgatcagaaaggaatatgcattaagaacgactaatccagaagggatctataaatcaaactcaaccacctagcatactgaaaattctaaactactctaacccatcctcataaacctagtcactaccaagacatcattgtagaaagcataaacgatgataagaatgaaaacatgatagcaacagagtaatagcaagatgataacaggatgaacaacttagtaaacgaaatgaaaagcaaatactgaatagattaagagaaatccggattacaaaaatgtcaagaacacagtgtctgcggaaaaaaacttagttttcaaaaatataaagtacaagctacttatagcgaaatgttccaaaaccctaatcgaaaaaacgacaca

SEQ ID NO: 159672 - DNA, 881 bp, Arabidopsis thaliana landsberg
ccaaaacaacagttcaatggaggataccaacagctgaatccaccagggttcactcaacaaccacaacaagccccaacagcacaagatcctgaaattaagcaacttattcaataaatcattcaaggacaagctactggtgccatggcttttgacaagaagatagctcaattacacaacaagatcgattgttcttacaacgatctgaatgtcaagtttgaagttctgaattcaaaaagcaagtatgtggagagtcaatttgcatcaacctctgctccgaagcatccttaacaacttccagggaaagcagtccagaatcctaaggactatgctactgccaatgctatcaccattcaccatgaagatgaatctcaaccaagtcatcagactcccaatactgaggacagtatgattcaagaagggggggattcaactcaaattgttgcacctgccacccagcaattcatctggactatagagcacacacctttgttgaatactcaccatccttgaaaaaagttcaaaattgaaaaactcaagaaggaccagaatcaagagttgatcagcattgcctctacccaagaaacatacaagaagaaagtcatccaagaaaagcttgatgatcccggtttattcactctgccatgctctctaggaccattgacattcaataggcgcctttgtgatttgggagcatgtgttagccttatgcctctctctacagctaaaaggctagggatcatggaatacaagttctacaacttagctttactcttagctgacggttctgttgcacatcctcatggtctaatagaaaatgtgcctggcagaattggaaatgttgagatacctacagattttatggtattggacgtatatgaaga

SEQ ID NO: 159673 - DNA, 1779 bp, Arabidopsis thaliana landsberg
agcatgtgtatgctgtgaaggcgtcagaaatggctgaatatgcccgtaaactgattgctggaaacccattgcttgctgagaggatcacagtaagacctgtagtccagtttcgtttgtaatttttttcatttatatccatttttctgatgttcttcaacttgacacaattgtatttgtaggtcatcaagggaaaaattgaggatattgagttgcctgagaaggccgatgttttgatctctgaaccaatgggtacgtgtttcagagacggattcttcttttcacgtgctcttcatgaaaatcagaatctttcagaaggcaaattttggtctgtgagaaaataaatggagaaacaccattgctgattcaaagttatgtatgaaagaatatctcttatatctgatatacctgtgtctgtaggcaccctattggtcaatgagaggatgctggaaacatatgttattgctagggatcgttttctgtctccaaacggaaaaatgtttccgacggttggaaggtaaagctgatcttcgatagttttacttttctatctcataaatgtcttctttctcatgtaactttgtcactgtaggatccacatggcacctttcgccgatgaattcttatttgttgaaatggcaaataaggtacatattgcacatcttatcaggaagatatgtttgagattgcttgtaacataaaataaaatggttgaattaagtatgggatggttaggctttcagtaacttaggcttttctacctctctatgcaggctttgttttggcaacaacagaactattatggagttgatttgacacctctatatgtatcagcccaccagggttatttttcccaggtatatgcatttacaaccagtgaatcactgatatttctttgcttgtctcatcctttacaatttttcatatttactgattttgtagcccgtggttgatgcatttgatccgagattattggtggctccctcgatgtttcatgtgatagatttcactaagatgacggtaaagctatttcctacattagattcggttccacggtgtttccttaaaattgaggacacttttctgtcatgctatttctatgtgcagtcgtccctgtttagtgaatggcatgatccaaattcaataactgtcaaatttttttcacaggaagaacaattttatgagattgatatcccgttgaagttcactgcgtctgtgtgtaccagaattcatggacttgcgtgctggtttgatgttctctttgacgggaggtatcaagccgtaacaatttatatgttttcatcctgtgctagctaaagattaatattcctttttgaccatcaaagcctcaaaggtatatcatacaaacctgatgctttgtatccaacagcacggtgcaaagatggtttacaactgctcccggtgcaccaacaacccattggtaccaaataagatgtgttctctcgcagcctattcacgtcatggcagggcaagagatcactggtagacttcatttgattgcccacagtgctcagagttacactataaatctaacactctcaggtcaattttgctttctgacatctctccttttgaatcatatcatctactttggacttattttctgattggctttttaaacacagctaaaatgtggggtcccggtgccaatcaaggtggaatcctccagacatcatcgtgcaaactcgatctgaaggaaccctattatagaatgtctcagccacaggtttaccctacacaggaaccaccagtcagtagcaa

SEQ ID NO: 159674 - DNA, 3676 bp, Arabidopsis thaliana landsberg
atgggtgacctacccggaagtgattgtcggaaccatgcgagtgaggacaaagcatggggaaagatcatgtggtgatttgtagggccggtaacaagtctttaaaacctcccggacgtggcgcaccgactgtcggacaggagtgttataagtttttttttgtgggtgtatatttacggatgtcaagtggttaaaccaaatcaaaccaatctatatccatacaaatttagtttctaatggataatgagtcaatctaattcatttagcaaatggtttggagaaaacgattagtcatttaaattattgaattaatgaattaaataagtttattcaattaataatttaataaaaaacaaattctataagctaaataatatcattaataactattataatcatcaatataaaacatagagcaaaaatgcttaaatgacattcaggtttagagggagcgagaagcccttgtacatttttgatggaatttatcatactataagccacatccccttgtaaggtcaaaccatcaccaccaccattgatccacccctgatgccaaggacatcccaatagccatgggatacatgcaaattcacatcatagctaattggaaagggaaagctaaatggaaaagagaacatgcccttggaaatttctccaaagagcgacaatatatgagaaagccggtttacatgggatccttaaaaacttaaagaggaagcaaaaaaaaaataacctaacatgagatgtaccatagatcccatatgaaaggtttgatcacaatgctagagaattcctattaatgcaatcagaatcaagcaaaaactcatatttaaaatttatatggctacttttaaacaaatttcatagaatgttttttatatatgaataatgcagatgttgtaagaaaaagctaaaatttttctatagttcctatatgaaaggcatgaccacgacactaatgcatatgttgaaaataaaaagctagcaagaactcctatttaaatttatatggctatctataaacaaaattcaaagattttttttcattgtaagtattaaaaatgtattatattactcaacttatatatgaataatgcatatgttgattttggtaacttaatcaataaaaatataagaaatttgattttcttatgtgtagtcaaaatattaatgacatttctctaaattacctttattaatttttggtaaccttattaaatttagtattcaaatctaaggaagtattttaatgtattttgatatttctcacctataaatgtgatattatgcgctttcatggtagcgcgagaagttgaagaaaaggagaaagttgtataataactgttgagataacatattttctataccaatctttggatacgagcttatggaaagtggcaatgttatgaatgtacagtctgaattatctggcataagtaagaaattttgacttttttattttattttattaaaaacttatttggttataatgttttggtttttgttcggcagttgatgggtccaagagctatatgtacgagcagttatggaaactctgtgaaggacctttgtgtgatattccaaaacttggagaaaaggtttattactttcctcaaggccatatagagcttgtgagttctctccttttttttttttttttttttttttctctctctctctctctcttctttctctcttccctctcttctctctctctctctctctctctctctctctctctctctctcttctttctctctccctctcttctctccctcttctctctctctctctcttctttctccctatctctctctccctctctctcgtgtatcaaaaccttttgacgacttttttcaggttgaggcatctacaagagaagagttgaatgagttaaaaccaatttgtgatcttccttctaagcttcaatgtcgtgttattgctattcatcttaaggtatatctctattatgtttttgcgaatacgcataatttctatggttgatttaattatataaaaaagtaattggttaattgtttgatgtttgattttaggtggaaaacaatagtgatgagacttatgttgagattactttgatgccagatacaactgtaagtaaaaatttagtatttctgttttatttttaagttaattctattttactactattatatcgcattgattttctgattttgttaaatttttagcaagttgtaatccctattgagaatgaaaatcaatttaggccaatagttaattcctttacaaaggttttaacggcttcagatacaagcgctcatggtgaattccctgttccatgtaaacatgccattgaatgtctccctccgctggtatttaattttatagttttttaaacgaatttgaattttaagctttcattagacattacatattaaattttggtttaggatatgtcacagcctctaccgacacaagaacttattgctatagatcttcatagtaatcaatggagattcaaacacagctatagaggtaataattccttttattcatataattcaaacacagctattaaggtaataaatcctagagaagtaattaataagcttcttattccttgcaggtaccccgcagagacatttgttaacaactggttggaatgcattcacaacatcaaaaaaattggttgtaggggatgttattgtattcactaggtataatattggttctttttatatatctttgtgttcttgagttttgggctttaaactatttacttatgttttcaggggagagactggagagttacgagttggtatcagacgagcaagacgtcaacaagggaatataccttcatcaatagtatcaatagaaagtatgagacatggggtgattgcttccgcaaagcatgcttttgataaccaatgtatgttcattgtggtttacaaaccaaggtaattcaaagaaccatttgaactcacattttagattatattgatatatcaatagattagtcccttcaacatgtaggtttatattttgtgtctttataagtatcaggtcaagtaaatttattgtcagttacgacaaattcttagacgctgtgaacaataagttcaatgtcggttcaagatttacaatgcggttagagggtgatgatttctctgaaagaaggtaacattagatgaaattttttttctgcttaaatatatttataatgtctaatattatctatgataacacatattgttcaattgattaagatgttttgggacaattattggagttagtgatttctctcctcattggaaatgttcagagtggcgcagcttagaagtaaaatttcattcacactttataacattattttaggaatacgtttttgagtgcaataaataacatatcactaattaactttaattttgcaggtgcagtgggatgaatttacatcatttccgggacctaaaaaagtgtcaccctgggacatcgaacatttaatgcctgcagtaaatgttccgcgatcatttttgctcaagaacaagcgtttacgagaagttaatgaaatcggtataaaaagagactcttataatcttttatttaaagaattaatcttctatttaatgaatttggtattcttgaataccttctcaataatcctattttatatacaggttcttcatcatcacatctcttacct

SEQ ID NO: 159675 - DNA, 1043 bp, Arabidopsis thaliana landsberg
ttctgttcatgcctgtctcaacaaattcatatctcctttcaagacttgtgacttctgtcccatactacaatgtaagcaaaaaaaacgctctgttcttggctttatgtaacaagttgatatgtgtggttctgatccagttatatgtgtgtgtgagtgcagttgtacaacccaccaagcagatttctttaattctaccaatctcaagtttgaaggagatgcgtctgcgtggaagaggagcgagcgcaatgatgatattacacaagttatagagatagtgacatctccgaataatccagatgggaagctgaaaagagcggttcttgatggtcctaatgtgaaatacattcatgattatgcttactactggccttatttttcacctattacacgtcaagctgatgaagatttgagcttgttcagtctctccaagactacaggtcatgctggctcaagattcgggtgactattaactttgactctcctagtaaactctatgcaaaggtttggattggtcacaacaactcatataaatgtttttttgttgttgcagctgggcattagtaaaagagaaagctgtttatgaaaaaatgaaagtgtatataagtctaagtagtatgggagtttcaagagacacacagcttcgtgctttgcagttgctcaaagtagtagttggtgatggaggcaatgagatattcaattttggttatgggactgtgaagaaaagatgggagacactgaacaagatcttctccatgtccacgcgtttctcgctccagacaatcaaacctgagtactgcaactatttcaagaaagttagagagtttactccttgtaagtttctcttctaactaatgcaagaaagtgagacttttgttttggtttggtacttataagtatgtgtgttggttttcatttgaaagcttatgcatgggtgaagtgtgagagaccagaagacacacactgctatgagattttcagagcggcgaagataacaggacgcaatggcaatgtgtttggatcagaagaaaggtttgtcggctagt

SEQ ID NO: 159676 - DNA, 689 bp, Arabidopsis thaliana landsberg
tctggagaagataggataagtagcttacctgatcatttgctaagtcagatactctctaatcttcctacagagaatgctgttactactagcattttgtccaccagatggaaagatctctggctttcaacccctgtcttggatatagacattgatgctttcgatgatgccactacattcatcagtttcgccactcggtttcttgatttctctaaagattcatgcttacacaagctcaagatttcttttcagatggaagctgttgatatgtggacaatcataccgtggatcgaagacgctgttaagcgtagaatccaacatcttgaagttgacagtcgtattgatcatatgattgatacgctgcctctaaccgtttacttaagtgagagtttggtttcattgagacttcatcttgtgatgctgcatcgtttcgtgtttgtgtcattacctaatcttaaggtgatgcatttagaagagaatatctattcttatgctgagactatggagaagtttatctcatcatgcccggttcttgaagatttaactgttgttagaaatgtagatgaagccactgagaaggttttaagggtgagctctcagtcgctaaacagtctcaaaaacgttattgatagttccgagtgttggtataatgatgatagtgacgattggaagagttgtcattgatgctcctc

SEQ ID NO: 159677 - DNA, 491 bp, Arabidopsis thaliana landsberg
cgaatcacacacaaactcagtgaagttcgccgtcgtcggagctcatggatcgaccaccgtcgtttacacactatcaaaatcctaatccgaaattcttccaccacgcttctctttttcaaaatcgtaccaattttactccatcgctccggcggtgattggcgagctctccggtatactcccttcttctgttgtcggaatttccttagattctctctcgaaaaatctagctttagatcactcttccgatgaggacaagcggttagtcattactaatttcaattgatttcggttaggtttaaatggtattgaaataaattagaattgatttgcggttcggtttacatagagaagaagtaacaaacaaaatattcacgcgacgaggattttggagacaaatgcgtcgattgaaaaaggcgtgttttggaaaggggtacacccacagaattgaacaacacgcgctcaacgctcactttgtgcgagtgggtgtgaaa

SEQ ID NO: 159678 - DNA, 1114 bp, Arabidopsis thaliana landsberg; identical to SEQ ID NO: 18147

SEQ ID NO: 159679 - DNA, 669 bp, Arabidopsis thaliana landsberg
atgccagaagcaagagatcgaaccgagaggcctgtggattactcgactatatttgccaaccgacggagacatggtattttacttgacgagccagattcacggcttagtttgattgaatctccggtgaatccagatattgggtctattggtggaacgggcgggccttgtgagaggcaatttcactacatggaggcctggtaatggcagaggtggtcacactccatttagattgccacagggaagagagaatatgcccatagtgaccgctaggcgtggaagaggtggtggtttgttgccttcttggtatccaagaacacctctacgcgacataactcatattgtgcgggtaaattgacaagctcttttgtgttttcctgttgattcttctttgtataatcagttttggtctggcatgggttttgctttgcagcttggttaaatgtttgggatctctcttgtttgtggtgtagcacatggaaaatggtttctctgagtctaagtttccccattggtttttgtaatccttcttttgagctgaattaggaatctgctactgataggtttggtttgttaaagcttttctgtttattattgatcatagcaggcttgcttagcctatctgtataagttttatcacatagatttgttgccttaaggcttgctttacct

SEQ ID NO: 159680 - DNA, 1651 bp, Arabidopsis thaliana landsberg
gagatttatttatgtggcacacaatgcatgaagtcggttttttcgaaaacaacttgtgtcacacaatgcacgagttcttgaggttgatcatgatggtcaacgaacactctttgattaattttggggaaatgttaagaatttattgttcttctttgacttttaaggactaaaataagttaagttagaagccaactactttacgaaacaggtttaaatgctgttatggttgttcctttggacaattattttattggtttattatatgcagtctactggtttgtgtctagctatatttgatgccacgttgtagaatcatggatttgatcttatcttatgttgtaggataaacgccgagttcatgtgattgaaagagatttatcggagcctgatcgtattgttggggagttgttacagcctgggggttacctcaagttactggagttgggaattgaaggtaaggaagattttgttgagaatccgtaggggaactgttctcacctctattgtgctctgtagttgtttactagttaatgacattaagagggctatctacagattgtgtggaagaaatagatgctcagcgtgtgtatggttatgcactttttaaaaatgggaaacgcattcgcttagcttatcctttggagaagtttcacgaagatgtatctggaaggagctttcacaatggacgttttattcaaagaatgcgggagaaagctgcttcacttcccaagtacgtttttctcctttataattgcctgggccttttatcgttttgcttgctttacctagacttactagaaattacatgatgttgacctcagttccagtaacagtattagtttatgctaaagtaaatgaagatgcataatacattgtgtgttaacttgtctataacttctttaaattgttctcggttgggtgagtcagtggattttttttatatgaggcaatttgtgtactgctaatggctgtttctacttatatctatactcaacagtgttcagctagagcaaggaacagttctttctcttctagaagagaatgggactatcaaaggtgtgagatataagaataaagcaggagaggaacaaaccgcatttgcagctttgactatagtttgtgatggttgtttctcaaacctgcgtcgctctttgtgcaatcctcaggtaacatgctgtttaatattgatctctgtttctcatatcagtgctgatattacagaagcaaaaaaaaaactgcattagcttcacaagtaattaggatatatttttcctatcttcacccaggtcgaggtgccttcttgttttgtcgggttggtcctagagaactgcaatctcccatatgcaaaccatggacatgtcgtcttagcagatccatcaccaattttgatgtatccaattagtagcacagaggtgcggtgcctagttgatgttcccggccagaaagtgccgtccattgcaaatggtgaaatgaaaaactatttgaagactgttgtggctcctcaggtatggtcgccttttttcacactgtgcacttctcttcatggcgtttttcctttacatttttgataaatttgtgtgtttctcttcttgtctagatgcctcatgaggtctatgactctttcattgctgcggttgataaaggaaatatt

SEQ ID NO: 159681 - DNA, 878 bp, Arabidopsis thaliana landsberg
  unsure (1)..(878): unsure at all n locations
tatttttttatatctcattctgtgtgttcctaagtattgaggtatctntgcacttccctggtttttttcattcttcaggtaattcttgtgaatcgttttgtatttgtttactgaattggtaacttgtntgctgaactatgaactttcagaccctatctgcttgtgacttgcgtgatcctgaaatatctggtcgaatagcaactaggatgaaggagtttcatggtcttgaaatgcctggtgcgaaaaaggctttgctttgggacagattacggtacatttcttagttttctaccagattgtactttgcttttctaataaatcattgaaattttgttcttttttgtaatctgtttctccactttgtttttctgtaacttcagaaattggctcactgcatgcaagagactggcttcaccagaagaagctaagtcttttcgtctcggtgttatggagatggaaattaatttgcttgagaaatctctctttgacaatgatgaaaatattggattttgccacaatgatttacagtatgggaacataatgatggatgaagagaccaaagcaataaccatcattgtaaggtttcatgaatttgtttagtcagctctccttttttcgtataccgttactagaaaaaatggatcctaactctgattttattattttgtcttataaaaaatacgattatgaatattcatgctataatcctgtggcttatgacattgccaaccacttctgtgagatggctgccgattaccacactgaaacacctcacatcatggattatagtaaataccctggtaagtgtctatttcaaagtcatctttctttatcttttgaagtgatagaagatcaatcatatttcttaatatgtgact

SEQ ID NO: 159682 - DNA, 1753 bp, Arabidopsis thaliana landsberg
gcatacaaaactcagtttagcaacaggtttgggccgtgagaagcttccctgtaggtcaaagaaactgttacaatgtcaacctcacggcaaacaacaaatatttgatcagaggaacctttgtgtatgggaattatgatggcctgaatcagttcccaagttttgatcttcatatcggtcctaacaaatggtcgtctgttaaaatactaggagtaacaaatacttctatgcatgagataatccatgtcgtaccacaagatagtcttgaagtttgtcttgttaagactggaccgacgacaccattcatttcgtcgctagaggttcgtccattgaacaatgaaagttatctcacgcaaagtggatcattgatgttgttcgccagagtatactttccatccagttcatcatctttcattaggtaatatttgtaggcaacgaaaagttttatacttcttgtcctttgtgtgtgttataagttaactaaaagatcatctctttaggtatgatgaggacatacatgaccgtgtttggaattcattcacagatgatgaaaccgtctggataagtacagacctcccgatcgatacaagtaactcctatgacatgcctcaatccgtgatgaagacagctgctgtccctaaaaatgctagtgagccatggctcttatggtggactcttgatgagaacaccgcacaatcatatgtatatatgcatttcgccgaagtccagaatcttacagcaaatgaaaccagagaattcaacattacttacaatggtggtctacgttggttcagctatttgaggcctcctaatctcagcatttcaacgatctttaatccaagggcagtgagttcttcaaatgggatatttaatttcacattcgcaatgacgggtaactcaactctgcctccccttctcaacgccctcgagatttatacagtcgtagacattctacagctagagacaaacaaagatgaaggcaagtgtggtctttctttaaaagaaatagtactgtctttttaaaacttttctttttggtttttgtgaatagttttcaatgtgatgatcagtttctgctatgatgaacatcaaagaaacatatggtttaatcaaaaagataagctggcaaggagatccgtgtgctcctcagctttatcggtgggaaggtttaaattgtagttatccggactccgagggatcaagaatcatatccttgtatgttacgtattctttatcacaaggttctctagttttggttctttcacaaaattctagcaagtatggatacttttcttgtttcacaaactttaggaacttgaatgggagcgagttgacaggttctataacatctgatatatgcaagctaacactgttgagagaactgtaagaatccgaaactgtcacgcactaataaacttaaagtatatgatatggtttattgtgtttaacaatttgtttttttcctttaatgcgcagagatttatcaaacaatgatttatcaggagatattccattttttttttctgatatgacgaatttgacactcatgtgagcttctgaatgactaatatgtttatctttgttcttggtcgctctgctctttgtgtgctgttctcaaagattcatatttgtcatttgcagaaacatgagtggaaacaagaatctaaatcgcttagttccagagactcttcagaagaggatagataacaaatctttacgtaatgtaagattttcagggatcagtgtcaacgaaagt

SEQ ID NO: 159683 - DNA, 2579 bp, Arabidopsis thaliana landsberg
cgttatccttcgatacgtgaacgcaagaagtaaagaaaccactggagatgttctctgttacgtcgatacgctgctgaatcttgagatcccgacggaggagaaagaaggagggaagaagaggaaactgagtgactcggagatcgtgagtctgtgttcggagtttcttaacgcagctacggatccaacggcgacggcgatgcagtggatcatggcgatcatggtgaagtatccagagatacagaggaaagtatacgaggaaatgaagagtgtgttcgccggagaagaagaagaaagagaagagatcaaagaagaggatttggggaagttgagttacctcaaagctgtgatcttggagtgtttaagaagacaccctcctggtcattacttgtcttaccataaggtcacacacgacaccgttttgggtggattccttgttccacaccaaggtaaatattattctttaacatatatagcccatatgattcttatagcttagtaaattcaacaaatcatccgtaccattaagttatggcccccactaagtccaatcctttttgtatttgattttgtgtcggattaggtactataaactttatggtaggagaaatgggccgggacccaaaaatatgggaagatcctctaacgttcaagccagaaagatttctagagggtggagaagcatgtgatttcgatatgacgggaactcgggagattaaaatgatgccgtttggagcgggacgacggatgtgtcccggttacgcgctttcgttgcttcaccttgaatattatgtggccaatttggtttggaaattcgagtggaaatgtgtggaaggtgaagaagttgatctatccgagaagcaacagttcatcacaatggtcatgaaaaaccctttcaaagcaaatatttatccaaggagaaagtgatatttacttttgttatatacataatcaaaaggcccattgggccaatttgtcgtatgtatattaaaaactttgtctcatatgtgttaaaacaagttgggcctttaatgggtttcaatataaatatgtcaacacttttagttttcgtttccatctttcatggcggagaagtagaacaattgcaaacagaaagaaaccctaaaattttcgaaaatggaggaatcgaagcagcagcagttgcaacaacaacaactcctacttcaaatgcagcaacaacaacaaatgcaacagcgtcaacaacagctctttctgatgcagcatttgcagaaacagcaccaacaacaggcggcgatgtcgatgtttccgccgaacgctgacgctcatctccggccaccggggttgattccgaaccgacccggtaacccgtttcttcagaacgctaaccctaaccctaatttgattcaacaagccaataagtttcagcaacagcagcagcaacagatgatgatgatgatgatgcaacaacaacagcagaaattgatgcgtccgtcgaatcaattggagatacaatttgcttaccaagacgcttggcgtgtttgccatcctgatttcaaacgacctttcgcttctctcgaagacgcttgtgaaaggttcgtctaattctgtttttcccccaattgttttctcatagaattgaattgattttatggattgttcttagaattctgggtatagtgattacttgaaatagttctttgactgaattgatctctctcgtagtcattagtttatagattctgtagaggaatatccaaataaaggccaatgctttatttgtatcatcttttcatcgtaaaggccaatgctttattggagttcttcaacttttttctcgggattgcagaaaaaagttttctattttgaattccatgtgacattgtgtatgttgttgatccatatatgaaatgtttataaaatgtggaatttcactatttctttgtgagatttacaattttctctgtgatttcactatttttttttgcagattgttaccttatcatgttgtagcagattacgaagcagaagaagatgatagtatctttgattcaaacacaacaagccagacgctaccccgctgtcagcaatgggacaacaacattgcagccaaagttgcagaatttacggcgacatttgaggaacaagtccaagctttcgacaggataattcaaaagagaagcgatggagacagagttgaggaaaggctgatgatggaacaagttttgctcaatgacgagagaaacgcatgtatccagctggatagggagatgaaagctcaggatgcgaggttaagaatggcggctttggctcaagcagcaggacaagcaagggcagaagagtctcaacagtctcatgccgagatgatggctcgtaacccgttgagagctaatgcgattgggaatcatggagaacaggggcgtaacatgaaccctaatgagatgatgttgctgatgaatggatgggggaacaataacaacaacaataatagccagaaggaagagaaggaaccattagaagatttcttgaatgatgaagaaaatgaaaatggtgaacatgagaagtggcgaagaagtggggattttgatttgaatattcggtaa

SEQ ID NO: 159684 - DNA, 723 bp, Arabidopsis thaliana landsberg
atgccacctgagagttctttaaacgctgaaatgtccaagaagatatcattttttggtttgaagggtttgaagttgtgggtatgggtatgtttggtagttggagtattcatagttatgattctctgcatcttgtctctatggatcacattccgtcggaaatctagaaggtcttcaagcaagtttcctttcaaccaaataccacatgtgtccaaagatatcagagtcgacagggctgggtttcagaatcctcaccccgaaagtttatatatagaaatgaatgataaatccactggaaaaacgatgatgtctcacttgggaagaaccaagtctagtgataatgacactttgagtcaatgtagctctgtgcatcatcatgagagagcttgtagttctcactctggtgaagatggaagctttggagctgcttggagacaaaattccctatcacagggcgggctagtaacagcatctcctttggttggtttgccagaaatatctcatcttggttggggacactggtttactcttagggatcttcagctagccaccaaccgttttgctgctgaaaatgtaatcggtgagggtggttatggagtagtttataagggtagactcatcaacggtaatgatgttgctgtaaagaagcttcttatcaccctgtcagttttttttttttgggtttatcaaaagttgagattgtgcttgcttcctttttacttgttt

SEQ ID NO: 159685 - DNA, 1638 bp, Arabidopsis thaliana landsberg
ttgttttgcatacttaggcatctaggatcatcttgcattcgcattgcatgttttggtgtgttttcaggtgcaaaaggaggcatcactctactcgacctcactactcgatccaggatgctacaaaggaggctgcagtttactcgaccctcctactcgatcaaggcaacctcagatgaagcagtagattcaactactcgcccctcctactcgatccactactcgatccatttactcgaccaagggtgaccatctctacaagacttgttgagctatcaaagcgtcttcggatcctcctcattccccactcaaccagacatctgagcatacggataggagaggatgaagcatctactcgaccaattgatcactcggagcatagacacaaaggcgtagactttgcagcaccctctttacacgatccccaaggtcgagtattcgcccaaaccgcctcaagtctcttgtcttctggtgaatctagggtttcaacattttactataaatagatcattttggggtttgtccaaaagatctagactttatctttcagtttttctttatgtttctgaatcttgaaactttaattactcttaatctatttcgtttttgcatttgattgtttaagtaaagttgtttagcttgtttagatctacattttggtatgattttagtaatttctggatttgtgttcttgagaatgttgcttgagtagggattagggttcttgaggatggattagaaaagggtaatctctaggttagttaggtggttagtgtttaggtttatactcttctggattcgcttgccccctatggggtttttgctggctaatgtggagattcgatcatagacgtccagcgtccaaaagacgttcaaatggatgtctgatctacgaattccagagatttgtagactcgaccaagagatttgcttgtctgcttattggttttggtagatcgtttcttaaaccctgctctgctatgtttcataaacgagagttgagattaggaagtggtagagttatgggggtctctatcatgagagtggattgacccggtttttgaatctatcgtcaagggtacctccctttcgcctattagccatttgatgaaccctagagttgcccttatcaatgaatccatctttaggacttctattaaatttatttgtatcccctgttgattgcacttttatttacctgttatttgtatctcctatttgtatcccctattgattgtattttagttcttaattttgtcacctgttggttctactcgacccaatgatcgagtagggctcttaaagttctcatttttacttgtttgaatcctgacctaggattgttactagaaacccaccatcatcataatctggcttgacttagttgcttctatacacatcttgattgctagcaatacagtggactggattgacaccccctatagctgcatcgacatgtttgtgttttaggggaattgaactgaatcacacattcaacataagcaggcctaaaaaacatgcttatcagactggctatcgcttccacccactttgacacatagtgcactgctaccagtatgtacttgtttccataagaagatggaaatggacccatgaaatcaattccccacacatcaaaaa

SEQ ID NO: 159686 - DNA, 904 bp, Arabidopsis thaliana landsberg
  unsure (1)..(904): unsure at all n locations
aatttttatttttttatgggggccactgcaatattcatgaaatttctaaaaaaacactatttttgtttcccattggttttataatagtggtgttcgtagatgaagatgacatggcaaaatataccgcgaagacgcttaatgatccacgaacgttgaataaaactgtgtatgttagacctaccgacaacatcctcacacaaatggaactagttcagatatgggagaaactaaccggaaaagagttggagaagacctatgtttcaggaaacgactttcttgctgacattgaaggtaaatctaatcatcagctagtaaccaaattaaacaaacctagcttttggattatagatttctatcacatctcttaaataaagcattggattaatgtaagttgagtttagtattaaaaccgaaatgtaaaagttggtcatgccaagtatttattttctatatatcacatctcataaattaaagtagacgtttttgtcttttagattctagtaaattatgagaaagagttagattttagaccaagtatttattttctattaaatgtgaaaatgtttataatgtacatgcagataaggagatatcacaccaagcgggactaggacacttttatcacatatactacgaaggttgtctcacagatcacgaagttggagacgacgaagaagctactaagctctatccggatgtgaagtacaaacgcatggatgaatattnnnnnnnnnnnnnnnnnnnnnnnnnnnnnnnnnnnnnnnnntgttccttatttcttatgttttaccatggtcttttgttttgtttgcttgaagatgtattccgaatttattttaaattttaaatgtttcagttgtggatatgttagattatatatatatatatatatatcataagagat

SEQ ID NO: 159687 - DNA, 4897 bp, Arabidopsis thaliana landsberg
cgaagacctactgaatgataatgactcgtcgaacagctttagcttatcggtgataggtatattaactaataactaatatagtatctgataattatcttatacactattagcagttattcaatcctttttactttttaccgtaggtgatgagacactggcccacttttattcggataaagatggctcactcattattgaatttattgattagaacttcaaccattgggttttgtgtgaatatgtgaaagaaggaaacagtttcaagtggtggacttggtgatttgtttcctgtcaagtccaaaagagtttcggcgagatcttaacggacctgaatagatcttgttcccatttcagaacagtttttggatccaaaatcaaaggtaagatcgatcgggaaatcgcgtttaaagttggtgaatagtcacagttttcagagcatagtttttctaaagtatctcaaaaacattgtaatttcaggtaaaggttttcaggatcaatttcccgttgaatcagagagaatcaagtgtggtgtgaggtgtcattgcaataatcataatgtcaagaatccatatccgctgacagagatagaatcgagattatattcaagaagttatgagtgtttctttctgggtaagtaactgcagaagctgtccaaatctgtgctaagtataaatccagaacagtgtgtgactactggttttgtgatgcgtttcccagatgtaccagaaggaattagatcacaataaagatgtctatggaaagatcttgcttcaaggaattcagagtagctaagagcttgtccatcggatttaagctccatccgtatttgaccttggaagtttgcccagaatcatctcaagttgcagaacctaagtatcagttctgatgcatcatcttcagaagaacgtgggaaattaatgtgaagtctgatcgagatgaaacttagtggagttattcatgatactactggctacatattcaacggtgggattacgtttctaacggttagtcagtaacatatgcgtatgttttcgagacagatttatatagagtaaatcgtaaccgagttttattgtttgatggcgcaaatgaactcggcttgagctgaagctttgtaggagctttcatgactcatggattcaggttctaattgaggtagaatcaagttagagcttatgatcatatggttacagtaaagattgtctaaggggaaagagaaggagaattgagtttttttcattttcactaggccaaggtgagggtggtatttgcgaaacatattatcattttcttttgttatgcttcttgacgcatgatatgtaggcttagatctgattgtgtaggataagattacatgatgatatgattttatgattgttgagtatgatgtttgataatgtgatgttatggataatataataagtatgtgtatgttaagtatgattaggagtatgtatgtatgatgaatgtaagactggggagaatcgagctatgggccgtggtctccctagtgatgtggacagtgatggaccgccgggttaacagctggtcaagaacggctgacgagcccggaatgggagtgtctgagccacgagggacagcctccactcattaggttctagttatcacgaggatgactgacctaacgatacacatttatatgctattatggataagatgcttgttatgaatgtgctattagaaattaaagcatgttaggttgattgtttgtgtctaagtttatatgttatgatgatgattgtataactttagaaagtgttctatgtttcattggcagatttgattcccctcactaagtattctttactcacccttttttccctttttcctcaggttagtaagcgtgaggagttatgtgcaatattttgttcgtgtgtgaagtttaaagaaaacattttagcaagatcagatgaataacatgccgttttggcctatatggcgggataggtgttacaaggtgcaatacccggatttggtggcagacaccgtcgtggtcaaaaagaagaatggaaaagacagggtgtggatcgacttcacataccttaataaagcttgcccgaatgacagtttcccgcttccgcatatagattgtctcgtggagtctaccgctgggaacgagttactaactttcatggacgccttctcgagttataatcaaataatgatgaatcgcgaagatcaagagaagacgtcatttatcacagataggggtatctattgttataaggtaatgtcttttggtttaaaaaatgtaggagctacctatcaacgattggtcaacaaaatgttccacgaacatcttgggaagaagatggaagtttacatatatgatatgttggtcaagttgttgaagaaagaagaccacgtcaagcatttagaagaatgctttgagattcttaatcaataccaaatgaagctgaacccggcaaagtgcacgtttagagtcccatccggggaattccttggttatattgtgacaaaaaaaaggaattgaagccaatctgaatcaaattaatggctttctcaacatgccgtctctaagaaactttaaagaagtacagcgattaaccggccgaattgcagtgttgaaccgttttatttcaagatcaacggttaaatccttacccatttatcaaattttagagggaaacaaagggtttctttgggatgagaagtgtgaagaagcattcggacagcttaagacgtacctaaccatgccacccgtattgtctaaacacgaagcaaatgaaaagctctttttgtacgtttcggagtcaaatcatttagttagcggagttttgatccgggaggactgggagaacaaaaaccgatttactacataagcaagtccatgacggatctagagaccaggtatacaatgatggaaaaactcgcactcttagtggtaacatccagtcggaaactgtatccgtatttccagtctcatccaatcgaagtgttaacgaatcagccacttcgaacaattcttcatagtccaaatcaatccggaagactggcgaagtgggttgttgagttaagtgagtatgatatagagtacaagagccaagttgccatgaaggctcaagttttagacgatttcttgactgaattaccagtgcttggcgccctagagcaaccggagaatcaaacttggaatctacatgtagacgagtcttcatcaaaacaagaatccagagtgcgaataaagttggaatccccaacatcataaagtcttgaacaagcattccgattttatttaacgctactaacaacgaggcagaatatgaagctttaatcgcaggacttaggctagcacaaggaattggagccgaagtagtagtcgcttattgtgattcgcaactagttgttaaccagttcaatgttcaatggagattatgaagccaaagattcaagaatggaagcatatctcaatgtagttaaagatctgactaaaagcttcaaaaagttcgaactcattcgcatacctcgtggagaaaatatgactacggatgcacttgctgctttagcatcaacatcggatcctaaggttaaaagagtcatcccggtggaatgtatttcagagtaagcattaaagagaaaaaaagaagccctcgtcatttcaaagctgctatacgtgatcgtggtgaacccgagatagagttgccacctgtcaaatgaagaaagtcaaatggttcaaccatacccgggcccggcgtgtcaaaagaaaatagtagcgaggagcccatcaatccgacagaagatgcagttccagaaacaattataagaaccgagccactaatcgaggaagatatccttgagccaaatgagcatcccgaaccagaactatgaatattccacgagatcgaccaaattctggctaaagattggagggctgattggagggagccaataaagcagtacattgtgacagtagagctcccaaaaaatagatgacaggctaggaaaatgagaatcgttagcgcaaaattttgtctatggaaggattctttgtatagacgaggtgtcagcgatccctaattactttgcattttttggccccacgtcgagatcgttatgagcgaagtgcccgaaggtttgtgtggcagtcactcttcaggtagggctatggctttcaagattaagaggatgggatactactggcctactatgatcacaggctgcgttaagtattcccagcaatgcaaacattgccaactccacgcgcctctcatccatcaaccttcagagttattctctttgattcctgccctatacccgttcatgaggtggtcgatggatatcattggaccattgcacaggtcaacccgaggtgtacagtatctcttggtcctaactgattactttttgaagtggttgaagccgaagcatatgtaaacatcaaagattcggcagtaaaaaccttcatttggaagaatatcatatgtaggcacggcgtcccatacgagatagttacggacaacggaccacaattcatctcacacgagttcaaagctttctgctcggattgggggatcaaagttagttattctactccatgttatccacaagggaacggtcaggctgaagccgcgaacaatacaattttaagcaatcttaagaaacgtctaagtcatttgaaaggaggatggtatgatgaacttcatctggttttatgggcatatcccacaactcctaggcgctcgaccggagaaaccccgttttcattggtgtacggaatggaggcagttgtcccagccgagctcaatgtaccaggacttcgtcgaacagaagctcctttaaacgaagaagagaattctgcgatgctagacgatttgctagataccatcaacgagaggcgagatcaggccttaatccg

SEQ ID NO: 159688 - DNA, 2903 bp, Arabidopsis thaliana landsberg
tactgattttatctatggtctaggataaggattttgtgtctttatgttatctctcgagtctttttagtgtttattcaggtattctgtcaagtgggacaacaatggagatgaggagacattttggtgcaagagctaagaaaaataaaactaaagacgatttcagattccagattcagagggagtgtccaccgacaccatttttggcccagaaaagtccatgacgctttcaagttaaccgaagtggaaatttgccccaaaagacttccctatttgcattactagtccctggacgttttatagggtttatatatagctttaaagctcattgtttagacctaagttgcttttatcaagttccttgcaattcctattttcataaagacattaactattcatcccttgttctttagagattcatttagttctcaatacagtgaagagatcccttcattctccaatcttatttgctgtgtttatgctttcttactcaaatatgttgcttgtttcattctccatgtctgagtagtttgcctgttagggttagagtttctcattaaagattcatatggtttagtagatcgccccctgctaggttatctgtagaattcttcatctttaatttttcttaatgctagttttagagtaactaactagaatttgaatccggacaatagatatacccggcataggtatttgtagttggatctattatttgatgagtcttgcttataggtgtgtaataagaatcagcctatctactaaggtgaacaattgaactcgtttagaatgcatgtctaggtataagatctctcggcttctctggttattcttagttatagacatagggagtttcgtggaacgccaccggttattccaaaattagagtttgcttttaagaatggtttgataacaacctagctatcattagatctactaatcatatatttcctgagaataccctaagcctaactctttattttatcgtttcacaaccaatcattctactgtccttttactttgtttacttttttatttcattattcctcttctaacttaatcttgacattcaattcattgtgtgaacaaaagaactttcaggaaatttgcacaaaagaactttgtggaaattcgacccttaaatactacaaccgatctcttatttgagagagtaggtttaaggcaatttgaaccatatcaaatttagcgccgttgccaaagtttttgggaatcaccattgagtttagtttagagatttcgtctagtttttacttttcttttgttactcacgaatttcttggtttcttcttttctgtgtttcaggtgtatgcctatgcaaacaagaagcacacaacagaaggagctgattaacttgtctgttcttgacttaggaaaacttgagcgcacaaaccgaaaaactcagagattagcaatggctgacagaatcatcagacttgatgaggaaggagttttaagagatgaaaatgggaaagcctacaatgaggctggtcagagattggatgatcattgactatcattgacttcctctcagccacggccgcgcaccaccaccgccggcgcttctcccccaccgtcggattccccctctgcagctgcccacggtcccatcttttgacctttggccaaaattggataatgagtggattgcttctcaacgagtttgggaggaggatatcaaccgggaattcactaaaggtgactttgtcaattgtcatttttctccagattgggatgattatgatacattgttttacaatgcttggaagaatgtggataacctacctatacggtttgcggattttgatttgatgcgtcgcttgaagatagagaaatctgttttaggattgctagagtatataggtttgggaacaatttgtactaggtagtatgacttgtatcctgagctagtgtggcagtttatggcttctgttagggtttcctatgtaaatgatagggtgcgcgatgctcaggaaggagcccttattttcttcattcgtggtatcagataaattttaccgctcagggatttgtgtgacatctatggttttgagaatgatacttctcatgtttcgcttcctggacagtttgcagatgctcaaatattttggagcgaatttggcaatggaatttatgattccaaggatgttgtacattcaaggatttgttagcatgttctgaggtatttggctagactgattagcaacacatttttgtgtaagatggagcattggaagatgaggctttctaagttcttgctactttatcatgttgttcgtgacttctttcctgacactttgaggatggaggaagtggaccgcaatgtcaactttggggctgttttcgcgcatcacttggtctctcttaagaccaaaccctttacatgcacatggaagaagactgagcagattggtagtctcctcactcctatctttgagcattttcacattagtgttgagggggagaagattgtgaccaagagagccaccatggatgaggcttatttgaagagtactcactggcttaagggcagtttggtttggtgtttcagagattgcacagggagccatatgattcagttaccctgtcgtgcacttacaaatatcacatgagagccagaggagcttggctttcatcctgaaccttcactactgcaagctgcaccacgcactaggaaatagagaggtacaaccacatgatccgcgcctacaccgatagaggatgcgtttgttgatccttctaggggtcttcaatttgggtcctcttcttcagccttaccttatcagctgcttactcctgctcttatcccgatggagccagcgaactttcaacagtacgtagttgacatcttcaagagcatttggaacacaatagctacagtttcttga

SEQ ID NO: 159689 - DNA, 861 bp, Arabidopsis thaliana landsberg
gtcgactctagaggatccccctcaattcctcagacttagcatcatcgtagaaattgttcaagaaggctatcttgatgcttctccaagtcttgagggaacctgctttaagttgtttcagccaagaatctgcttccccagcaagtgaataagggaagagcttgcacagtaggtagtcctctgagactccattaaacttgatgctcaaaacaagatcctcgaatcgctcgatatgatccattggctgctcatgagataagccatggaaaaggatgctggccaactaaagcaaagtagctcaggcttcagctcatagtcgttcctctagaatggtgggggtacaatcgctgatcgattagcatagaacaagtctagcctgttgaaatccccaagagtacgacgtggttccgctgctggaggaatagctgcaggaatctggtgttggtgtcgatcgacacctctgttgtgtcattcgacatcgattgcatccgcgttctgctcccgaaggtgtcgatcgacacccagttggtgtcgcttgacaccgagccctgctgcatctctagcagctaattgtgcattatggcgcgcttgatcctcattggcgtcctcaggtatgatgagtccatgatcatccaatctctgaccagcctcattgtaggcttgcccatcctcatctctcaaaactccttctacatcagctcagatgactctgtcagccattgttaatctctgagtttttcggttggtgcgtccaagatttcccaagttcaaaacagacaagttgatgagctccttatgttgtgtgctccttgtttgcctaggcatacacctgaaacacaaaaaagaagaaaacaagaaacgcgt

SEQ ID NO: 159690 - DNA, 650 bp, Arabidopsis thaliana landsberg
tgtttaagtatataaccattaattgttttggtcttgatttcacttttcaggatgcttttgtgggtggtacagacacatcctccacgcttgtggaatgggaaatgacagagcttctacgacacccaacgtgtctaaaaaaacttcaagaggaagtccgtacgatttgtaagggaaaatcaagtgtgtctgaagatgacattcaaggaatggaatacttaaaagctgtggtcaaagaggcactcaggctacatccaccagttccattgatggttcctcatcaatcaacacaagatgttaggttaagagataaccatatacctgccggtacgcaggttatagtcaatctttgggccgtcgggagagaggctgcgacgtggggaccagatgcgaatgagtttagaccggagaggcatttagagtcgccttctgatttccggggtcaggattttgagctgattccttttggagcagggagaaggatgtgtccaggaatatcatttgctgtggtgctgaatgaggtagtcttggctaacttagtgcatgggtttgattggcaatctatagacgatgagaccgatgttgctgaatcaatcggtagtgtgattcgccgcatgcaccctctttacgtcattccatcatctactacttga

SEQ ID NO: 159691 - DNA, 302 bp, Arabidopsis thaliana landsberg
gatatttacggattccactttttacgggtttacgtttttggcgggaaaatcacaggtttatgtttttggcggaaaaattataggtttacgtttttggcaggaaaattacgggtttacgtttttggcaggaaaattacaggtttacatttttgacaggaaaatctcgggtttacgtttttggcgggaaaatcatggatttacatttttagcgggaaaattacgaatttacgcttttggcggaaaaatcacgggttaacgtttttggcggcaaaatcacgggtttatcttttttggtggaaaaa

SEQ ID NO: 159692 - DNA, 1118 bp, Arabidopsis thaliana landsberg
  unsure (1)..(1118): unsure at all n locations
ttctcttcttgaagatatttttccatttattttctcgaatcttcttcttcttcctagattccagcgacttaacaacaacaacaacatattctcttctgggtattagattcgaatttctctttttgtgatcagaaatggatcgagctccggtgaccacaggaccgttggatatgcnnnnnnnnnnnnnnnnnnatcgatatgacttcgttaaggatattggttctggtaatttcggtgttgctcgtcttatgagagataaactcactaaagagcttgttgctgtcaagtacatcgagagaggagacaaggtttcatttttaaaaatctcttctttttctatttttggaagctgatgatattttatttagtccagtgatcgtttatttttagtgtttggtttagttttcactttcttgatttagtggtttagtagttaaagttagcgtttttagattttgatgattatgcttttgagtgcttttaatgtgatttaaagatttgagcttcctaatgttcaacacttgaataatgatttaaaagttttgatttatgtgaaattttggatattgatatgattttttagttggttttgagtgttctgcttttgtagattaggacagttgtgaatgacttgtaactatgggagttgcagattgatgaaaatgttcaaagggagatcattaaccacaggtcactaaggcatcctaatattgtcagatttaaagaggtaatgtaaaacacttttcttcagttcttgtctttttgcaatttgttaagccagtgattcttttaaactctgtttcttgtacttgaggataggtcattttgacgccgactcatttggctatcataatggaatatgcttctggcggtgaactttacgagcggatttgcaatgcaggacggtttagtgaagatgaggtttgtctttgattatcttatcgggtttacaggtcccggtttccttatggtttgatctcttcttgtaaacaggctcggttcttctttcagcagcttctatctggagtcagttattgtcatgcgatggtatgtagagaatatttgtttcatggagcctatggacttgttgtattctttgttttttcaaacttgttgtt

SEQ ID NO: 159693 - DNA, 722 bp, Arabidopsis thaliana landsberg
atggcaagcattgcttttgtgtttaaggttctatgtgtatctttcttgttcatatttgttgcaagtcgtcccaccatccgaccaaaaatgtttaatgtccaacgtcatggttctaaatcggacggaaaaactgataacgctaatgtatgtatacgagaatttttctaattttgtttttaccactaattagttatgagatgaaaatctatgcacattagcacaactataaacatatatgacaaatatacaaaccaaaaagataaatatatgtttttattttattttattttaacatatatatatatatcattcttaacacatacaaaatcaggtattcacaagtatatggagtcgtgcatccaaaagaaaaaatggaagtagtaaaatctatgtaccaaaaggaacattttacctcggtggtgtagagtttgtgggtccatgcaaaaatcctattgaattcgtcattgatggaactttattggctcctgcaaatcctagtgatattaagcaagacacatggatcaactttaggtacatcaacaatctttctatctccggttccggtacacttgacggccaaggaaaacaatcttggtcactcaatgactgccacaaaaatcccaattgtcctaaactagctatggtaacatatcttaaactttttcacttatttacatttaaagttgattacaaaacgtacatgtgatatttatacacaaatt

SEQ ID NO: 159694 - DNA, 1022 bp, Arabidopsis thaliana landsberg
  unsure (1)..(1022): unsure at all n locations
tttttaaancattgcttttctgttggatagcaccaacagaagctcagctgctgaatctccatttccagcgcaaacgaaaaatggaactcttgaacctccctcggagtctaaaccttccaaggaaattaatggaggaccaaaacgtaagttttttatttacattttcataccactatatcttatgcttttttaccttaacaataattcctgtttgatttttttttttgcagaaaaatcatcatggaaattaaaactcacacttggtactctatatatatcggtcaagccatcggatactactctttatataaaaaaaaaacacctagattttaattctgtttatttacaggagtctctgctgccttaactttgatgatcattattgtggtcgtgataatagtgaaaacaaagagtggttggaatgaccagaacgttgaagcagttgcaatgttgaaaagatatagttataaaagagtcaagaagatgacaaactcatttgagcatgttctcgggaaaggaggatttggaactgtctacaaaggaaagttacccgatagtggtcgggatgttgcggtgaagatcttgaagaagtcagaggggaatggagaagagttcatcaatgaagtagctagcatgagtagaacatctcatgtcaatattgtttctctgcttggattctgttatgaaaagaacaagagagctataatctacgagttcatgccgaatggatcgctcgacaaatatatatctgagaatatgtcaaccaagatggattgggaaagattatatgatcttgcgctaggcatctcccgcggcctagagtatttgcacaaccgttgtgtcacgaggattgtgcatttcgacataaagccacagaacatattgatggacgatcgtctttgccctaaaatttcagattttggtcttgctaaactatgcaagaataaggaagaaagcataccttcaatgctagatgcgagagggacagcaggatacattgcacctgaagtattttctaagaa

SEQ ID NO: 159695 - DNA, 862 bp, Arabidopsis thaliana landsberg
agtatttgaaaaaaacgggtccaacgttttgcttgagagcaaaggcaatgctattgttgggttccatgaacgggtagggtcttgtgttaatagtatcgggaaatattatgctccattttctccttaccctccccctactgagaaactagagggacaaggtgtagatggagcagactcttgggacgatggtgctttcctaaatgtgaagaaggtttgtataggacaaggccagtttggtattgtctccgttaagtttgagtacgagaacgacgctagtgaggtggttgtgggagatgaacatggaaaggctacattacttggatatgaagaggtgatgattactcctttacatgttttctctatttctttttttttgtcaacaacttatatattattagaacgagaaaggctcctaaagctaaatcggagaaacattgtttacatacaaaataaaatgcaggagaatacgggcgtcttgtatatctctactataaaattcttgagttttttttttgttaatatcaaaaccaactaaagttacatatttttacacttctcaacgtgagagtactcctaacaaagatctcttatacactccatagttcgaactggattatccgagtgaatacataacatcggtggaggcttgccaagataaggttatgggagctgaacctggagtattaacgatgcttaggttcaagacaaacattcgcatctctccatcctttggacttaaagctggtttcaacttcgtcctagagaaggaaggtcacaagatcaatgggttccatggaaaatctagtagcatgcttcatcagattgggatccatgtcattcccatcactgagtgaccatccat

SEQ ID NO: 159696 - DNA, 339 bp, Arabidopsis thaliana landsberg
gggaattgcgaaaacttaggagatcaacttctcagatttcaacgaatataaggggttgaaaaacgataaatctatagtgtttttgaaaagtaatagtttggatatggataggatcagataagaaggaaggaatcgaataattcttcaaaaagttttttcagattctcaagaaaaagaaggggaagatgacttaggtgacttttcaagggtcatataaagcttatctagttaaagcttaaccggacgaaaaccattgtcagagacatcagaagaatttgacgaaacagtcgagagacttttagagaatgtgtttttgatgtaagaggtggttcagttggt

SEQ ID NO: 159697 - DNA, 1344 bp, Arabidopsis thaliana landsberg; identical to SEQ ID NO: 10978

SEQ ID NO: 159698 - DNA, 1380 bp, Arabidopsis thaliana landsberg
taggcatttatcgcatatgtcctttttagggataatcacacaaaaatacttgaatatcttcgtgatatctggactaaagatcggagagctgaatggtcaatatggatggtgtactctaaggttgaaatgccccatcattttataaatagtggaatgacagatatcttaaaccagagcgcgcacaaaagggcctcaggcgtgttgaatgaagtgagtttagcgttctctctctatttatcaaattttgtgaaaacacaagcctgactcatccaatttttgctttgatgtagccggcccaaattgcagctacacgtgctgaacttcaccgtcggagtattgcacagatgcgggtttgttcttctctttttgatttagttccctttcttggttttatcaactcttagtttatttggtcaatacatttgttggtgcagattaacaaccgttcaatacaagacatgcatatacttggagatcctatgcgggttcctattgttatcattgaacgtgtcttgaatgcaccaagacgcactttaagtgataattcgtatttgagacatatggatctgcttgattctagcttgcttaatgggcacaaggatgaagcagaaaaaacaaaagtcactaactcccagcaaagtgcccgtgaactaaaaatcgtcgtatttgttcatggttttcaggcaagtatcactgaactataatagcaattttcttaacttgctttccttttgatctgtttttcgcttgcttgatcgaaatttgctcatattggttaccataggggcatcacttggacttaaggcttgtccggaatcagtggcttctgatagatccaaagatagagtttctcatgtctgaggcaaatgaggagaaaacacatggtgatttcagggaaatgggacaaaggctcgctcaagaagttgtttctttccttaagaggaaaaaggatagatatgcaagacaagggcatttgaaaagcatcaaattgagttttgttggtcattctattggcaatgtcatcatcagaacagcaatgccggtaatattctttgaactctggtaaatattgaatgactcttaggtatgtttcagtgtttttgacatctcttttgttctttcagatagtttaatggaaccatacaggaagtatctacacacatatctatcgctttcgggtccgcacttggggtatctgtacagtacaaactccttgtttaattccgggctttggctactgaagaagttaaagagtacacaagttatccatcagcttacactcacagatgatcctgatctccggcatactttcttttacaaactctgcaaggttagagaaaaatacctaaccttatattcagattcaccacgattccccaa

SEQ ID NO: 159699 - DNA, 1263 bp, Arabidopsis thaliana landsberg
  unsure (1)..(1263): unsure at all n locations
agctttttgacagaggcgtccttcccaagatcaggatgcttcttgataccgcttccaatgggaacttcctcaccctgggaacttcctcaccaaggacgttgaagagggatgggagctggtagagaacttggctcaatgggaagataactacaatgaagattacgatagaatcatccgcaccagctcttattctaatgagaagcaccgcagggatatgaaagcnnnnnnnnnnnnnnnnnnnnnnnnnnnnnnnnnnnnnnnnnnnnacgttcattttctcggtgatgatgagacgttccaagtccaggacggggagactctgcagtcagaagaagtcagctatgtgcaaaaccaaggaagttacaataaaggtttcaacaacttcaagcagaactatcctaatctatcttatagaagtaccaatattgcaaacccaagggaccaagtctacccttcacaacagcagaatcaacccaaaccctttgttccatacaaccagggtcaggagtatgttcctaagcagcagtatcggggcagctatcaaaagcaacttccagcaccagggtttgcacagcagctacaacaaccagtttcaacaactccagattctaatttgaagaacatgctacaatagattttgcaaggacaagcagcatgagcaatggatttgtccaaaaagatgacagaaattcataacaaggttgactgcagttacaatgatatcaatatcaaggttgaagcattgacatctaagataagatacatagaaggccaaattgggtcgacatcggcacccaaatttacaggaccttccagaaaatcaatgcaaaattcaaaggagtatgctcatgctatcacgcttagaaccggtaaagaattacccacaaaagaaagtccgaaccaaaacagtgaggacagtgtggagcgagatggggaggatttctgttagaatgaagattatggtgaaaaagcaatagaagagcctatactcgaccaacctactcgacaactagctcctacagcatctcctcttgttgaagaaccaggtgctgctaaaaccaaagataacattttcgttcccccaccttagaagcccccactcccatttcctagtcgattcaagaaggtcatgatacaaaagtacaaagctctcctggaaaaagagttgaaaaatcttgaagtcacgaaacctcttgttgacaatcttgcgcttatactagaccctaaccaatatgtgaaggatatcatcatagaaaggatgaa

SEQ ID NO: 159700 - DNA, 1230 bp, Arabidopsis thaliana landsberg; identical to SEQ ID NO: 2024

SEQ ID NO: 159701 - DNA, 246 bp, Arabidopsis thaliana landsberg
ctttaaagcgtagagaataggttgaagtcatgattggtgaatattgtgagagagaaggatacaaaggatctggatttgtaccaacgtacgaagataagagatggtgactggatgttgggtggtgatgttccatgggacatgttctcttcttcttgtaagagactccgaatcatgaagggatccgacgctcctgctctagactcttccttatgatccagagaagctgagaatcttttgtctaaaaag

SEQ ID NO: 159702 - DNA, 349 bp, Arabidopsis thaliana landsberg
gaaaaaatctcaatttcaatcctctcgatttctctatcatcatcacacatggcttcgcgagctagccttcttcttcagacacaactcaaaggcacgcccttggaatctctctccttaccaaaatcaatcttgcgagtgttatgttcttctctaaacacgattcttgtgtgactcatatctctgagagcatcccgctgacagaatctatgctggtctccgtgaagaaaagaatatattcgaatggggcgttaccattatcagaccttctgatactctataagaaacaacccttttccttctttgctttctttagatcctgagctactttttcttttctgattcttgattc

SEQ ID NO: 159703 - DNA, 347 bp, Arabidopsis thaliana landsberg
ctttgtcaaacatatcttggcagtacattgttttctgaaatatgttggtggtttgttttggttttgaggttctgcaattactggacctattgggaaagagtgtgcggatctctggccaaggattgctagtgctgctaacgccattgtctgaagatcatttatcacttttgctggttatgtatctgtcttcaacgaaacgcgaaatagttggtgttttgagtgttttaagtagagacgacaatcttttgtgagcttcagacatatttccagtttctaagagattttgcttagatttttccagtttctgattttgtgaaaatcaattgctcagaggtgactattaatag

SEQ ID NO: 159704 - DNA, 527 bp, Arabidopsis thaliana landsberg; identical to SEQ ID NO: 54761

SEQ ID NO: 159705 - DNA, 491 bp, Arabidopsis thaliana landsberg; identical to SEQ ID NO: 25838

SEQ ID NO: 159706 - DNA, 1948 bp, Arabidopsis thaliana landsberg
ttattttgcacacttagccatttaggatcatcttgcatacacattgcatgttttggtgtgttttcaggtgcagaaggagcttaaaaggactttactcgaccctctactctatccaaccaggagggaagcagtagagcattctactcgatccattcactcgatccaggcagccatagaggaggcagcaattcactcgaccctcttgctcgatcaaggcagaaattagatgaagcagaagattgatctactcgcccctccaactcgatcctctactcgacccatttactcgaccaagggtgaccaactctacaagacttgttgatctatcaaagcgacttcggatcctcctcattcccctctcaaccagacatctaagcgtacagataggagaggaaaaagcatctactcgaccaattgatcactcggagcatagacacaacggcgcagactttgcagcaccctccttacttgatccccaagatcgaaaactcgcccaaaccgcctcaagtctcttgtcttctagtgaatctagggttttcaacatttcactataaatagattactttgggatttgtctaaaggatctagcttttatcctttagtttttctttgtgtttatgaatcttgaaaacttaaattagtcttaatctatttcgtttttgcatttagttctttaagtaaagttgtttagcttgtttagatctacattttggtatgatttcagtaatttctaggtttgtgttctagagaatgttgcttgagtagtgattagggttcttgaggatggattacaataggataatctataggttagtcaggtggttaagattaggttagatcccttcaggattcgttggcccctatgcggttttcactgatgtgggaattcgaccctaggtatccagcgtccaaaagacgttcaaatggatgcgttatctacgaattccaagagatttatagattctaacccaagagattggatgtttagactgcttattgactttgatagattgtttcttaaaccctgccttgctatgtttcattaacgagagttgagattaggaagtggtatggttatgagggtctctgtcacgagagtggattgacctggttttgaatctatcgtctaaggtattttcctttcgcatgttagccacctgataaaccctagagttgtccttatcaatgaatccatccttaggacttctattcttcttagatttatttgtattcacccccttattgcacttttattcacttgttatctgtgcaacttgttgattgcattttagttctatttgtcacttgttggttctactcgatccaatgatcgagtagggttcttaaagttctgatttttgttgtttgaatcctgatttaggattgttactagaaatcccccatcactataacctgacttgacttagttgcttctgtatacatcttgattgctagcaataacagtggactagattgacaccccctatagctgcatcgacatgttagtgtttaaggggaattcaactgaacctcacttcagtacataagtaggcgtaaaaatctacttattaatttagcgccgttgccaattcattgttgcattgttacattcaagatatcacaaaaacttaagatcaagttcttttacatttatcaagttactacctcatattttcgtctacttgtttttgtggtataggtactaatctttgtgcatgcaaactcggtccaaaggttctgcacacctaataccttcaaagacagaattgacaaaatagctcgtgagttacaagaaaccaaagaaaaggcagcatgtgattagaaaaagaccagctgctatggatcaacagaacagaccagctgatattcaagacccgcctaatgttgaacaaccaaaaaacattggtgttggtgatgctccaagacaagggatagtgccaccaccagt

SEQ ID NO: 159707 - DNA, 782 bp, Arabidopsis thaliana landsberg
atccctgattctctgcaaattttcacgaaaggttcgatctttggtctttgggtcgtgatattttgagcttatttagctaaagcaaagacgaacgggcaatggggaattgcttagccaagaaatacggattggtgatgaaaccacaacaaaatggtgaaagatcagttgagatcgagaacagaagaaggagcacccaccaagatccgtctaaaatatccaccggaacgaatcaaccaccaccttggcggaatccagcgaaacacagtggtgctgcagctatactcgagaagccgtacgaagacgtgaaactgttctacactttgagcaaagaattgggtcgaggccagtttggagtaacgtatctgtgcacagagaagtcgacggggaagagattcgcttgcaaatcgattcttaagaggaagctaattagtaagcaagataaagaagatgtgaagagagagattcagataatgcagtatttgtctggacaacctaacattgttgagatcgaaggtgcttatgaagatagacaatctatacatttggttatggagttgtgtgctggtggtgagttgtttgataggattatagctcaaggtcattactctgagagagctgctgctggtatcattaggtctattgtcaatgttgttcagatttgtcattttatgggtgtggttcatcgagatctcaagcctgagaatttcttgctttcgagtaaagaggagaatgctatgcttaaagctactgatttcggtttgtccgtcttcatcgaagaaggt

SEQ ID NO: 159708 - DNA, 462 bp, Arabidopsis thaliana landsberg
ttcaagtgttccaacgatggcgaaatccccggtagaggtgaaactgatcccgatcgaagctactccggagaacttcgcagagtatggtcaagtcatcgaagcctctcgtgacggtgcaggtttcggtcccaacgacgctcaactggatctctccagaggaatcccacggtactctttatccagtttactaaaatttcgttaatacctaagattattgattaaaacacatgcttcttctaatcatattcgttgttgattaatgtctaaattcctcatctttgatgctaatttatcaatcaagctatgtgatttgtattggttcctagatagtcgtgttgatcagttcctaataacaaaagacttatagattttgtaggaacgtacttatttactacaaaattcaacaaaacgaaagaccaattcaaactagactcttcttactacttcaagtaattaactgac

SEQ ID NO: 159709 - DNA, 1056 bp, Arabidopsis thaliana landsberg
agaaaaagatcaaagcggtcatcatccacggacattgaaaagactgataataacattaaccaacccattatactagcgtccaatgactttcatcaaggtaataactcattaaactttttttattgtcaaaaagtattatacatcaaataatcttatggttttctaactatgtaatcatctggttgcagagaataagtctgtacagaatccaccattggttgagacaaagaaactggatacgtcattgtcgatgaatctacgtcctccaccatctgagcgacataagtcgtttgatgatgatgattcaacaatgagaaaacctattgttgcaaagaaagctgctgttgttgttccttcaaatgtgaacacatatacggtttcagatcttcaagtagctaccaacagtttcagcgtagataatcttctcggtgaaggaacatttggaagagtatacagagctcagtttgaagatggaaaggtatttaattttatataatcctcctctacttgtaagagcacaatgtcataatattctgctactgagatattttctttgatctactaggtacttgctgggaagaaaatcgactcatctgcgcttcccacggaaactgctgatgattttaccgaaattgtatccaaaatagcgcatttggatcacgaaaatgtcacaaagcttgatggttactgttctgaacacgggcaacacttggtggtctatgagttccatagaaacggctcattgcatgactttttacatcttgcagaagaggaaagcaaaccggtgatatggaatccccgtgtcaagatcgctcttggcactgcacgtgcattggagtaagtctttaaacatctcaatcacattattgctcaatataatagcatgcagcagagtctcatggaaagtattgttgttgttgcaggtacttgcatgaagtttgctcaccatctatagttcacaagaacattaaatcagcaaatattttacttgactcagagctgaatccacacctctcagactcaggtctcgctagcttcctttccactgcatacgag

SEQ ID NO: 159710 - DNA, 355 bp, Arabidopsis thaliana landsberg; identical to SEQ ID NO: 72187

SEQ ID NO: 159711 - DNA, 495 bp, Arabidopsis thaliana landsberg
tttaagaaccgaataactttaaacaaagtgaaacatttttctcaatatggtaatttatgcagtggaataagaggagacgatggggtaacaagtgcctgcgaagtacttctattccaccacgaagacatgggaatacctagagaaatcgcaaagcttggagtgaaacgaggaatgtggggagcagtgaagaagatggaacccggtttacgtgcttaccaaacgcatagactctcagatggaggaaccaagctttctcggtctgctttcatggctcaaatcaacaccaagatcacacaagaccatctcatctccctcagcaacggtgcatcgcctgtcactgaaactcccgttacattaaaccaaggaaaccgagctgcaaatctgaagaaactgttgattatcggtggagctgttgcggttgtctgcagtttaagcggaggtgcttttgttcctcctgcgtttcttttaggttttgggaaaaggtttgttaatggt

SEQ ID NO: 159712 - DNA, 228 bp, Arabidopsis thaliana landsberg
atccaaaaaaatgggatcttcaccaccgaagaagacgactctgcaacggtacttgtcacagcttcaacaacatcctttaagaacaaaggttgaaacttttcttctcctattgttgatttgaagcgattgatgtagttttctggggtggtttcgttttcttgagattaggtttagtttcattgattgagagacgatgacgttgtttttcgattgaaagttttgtttttt

SEQ ID NO: 159713 - DNA, 863 bp, Arabidopsis thaliana landsberg
tggttcatcaaatcatatgaaaaaagttttggccttcactggaatattgagcaataaatctaatgagaatcctggtactatgcatgacaatctgcgcacttacacatttggttaatctttacctacctgcattgattctcgcttgactatctacgggtttgcagacttcttcaactggaacagagtcaaattgcgttactgcgatggtgcctctttcaccggcgatagtcaggatgaggttagtcaccaatagtagattgtgcttttcagtcttcatgtttttcacttctctgtaacttgggatttaattgcttctaatttctttgaactagagctcacaactttactatagaggacaacgaatctggcattcagctatggaagaactactctctaaaggcatgcaaaaagcagaacaggttttgcttttcatttgaaccatcagccctatcatgttactggattttgctcttgttaatgtaagtaaaatgatctatctcaggctctactttctggatgttcagctgggggattagcttccatcctacactgcgatcagttcaaggaactatttccgggcactacgacagtgaaatgcttaagtgatgctggaatgtttatggatgcgtaattctcttcaacttatatcttccttcctctgagatcttttagttaactgtgcatcacatagcaaattcaaaacttaaagcctttttacttgaaaatgtagagtggatgtctctgggggccactcgctccggaaaatgttccaaggtgttgttacagtacaggtaatctgacaatcagagaatttcttgcattctaataatctatactcttgttgtaaaaataattattgtttt

SEQ ID NO: 159714 - DNA, 2008 bp, Arabidopsis thaliana landsberg
ggaagtgaaaagcagcgcggggaaagaggacactggctggttcgaaaccgtcaccggacagaaacaatgggctaatggggacgagtggacagacggtgaaggctccttcgttttctattctcgtagtgtttatcaagtaaatttctgaaatcatacttgaggagaattcggtggcagataagctcttatttatagagggctaccttttgtcttggaaccaaaaattcgataattatgacgtgtccaaatggtttaaaccattttgggaatcgagtgatataaccctatttttactgcttttagctatgatttaggtataggttttagaatctatttgttatttttagagtcttttctagttctttacatgtttggaatgcatttggagattatggagcattctatggagcaaaacagacaacttaagttgcagaagcagttttgcagactaaaatccgcgtaggtgtcgaacgacaccacccctggtgtcgagcgacaccaatacctgacggcaatttgaaggcgcaatttatttgaaggcgcaacttattgaagttttgaagatttctatattcggcccagaactttcccttatttctaaagaaggctcatcacgtttttaggtcatatatatagttttaaaggtcattgtttagacctaagtttggagaggctattccccttatctcttttatttttgggagccaaaagcctgtggagactccctttagagacctattgactattgatttcctattctgattatgatttgtgtttctttgatcatctctgagtaatccacttgttaggtttagggttcctcattagggattcatatggtttagtagatccccccccctccccttgataggttatctgtagaatgcttcatctttaattattcttaatgctagttctagagtaattaacaatgtattttactcattctaggcatgtatttatcattatttaacttagtgatcactcattgttttatatcattttgcatcacatttaacttattttgcacacttatgtatttaggatcatcttgcatacatattgcatgttttggtgtgttttcatgtgtagaaggagcttacaaggatttctacttgaccctctactctatcaaaccaggagagaagcagcagagcattctactcgaccagttcacttgatccaggcagccatagaggaggcagcagactctactcgaccctcctactcgatcctctactcaacccctttactcgatcaagggcggcctactctacaagacttgttgatcatttaaagcatctttggatccgcctcattccccactcaaccagacatctgagcatacaaataggagaggaacaagcatctactcgaccaattgatcactcggagcatggaggcaaaggcgcagactttacagcaccctgtatactcgatccccaagatcgagcactcgtccaaaccacctcaactctcttattttctagtctacggttttaaacattttagtataaatagatcaccttgggatttgtccaaaggatgtagcttttatctcttagtttttctttgtgttcttgaatcttaaaacctaatttactcttaatctatttcgttctttgagcaaagttgtttatcttgtttgcatctacattttggtatgatttcagtaatttctgggtttgtgttcttcattatgttgcttgagtagtgattagggttattgaggatggattacaataggataatctataggttagtcaggtggttaagattaggttagatcccttcaggattcgttggcccctatgcggttttcactgatgtgggaattcgaccctaggtatccagcgtccaaaagacgttcaaatggatgcgttatctacgaattccaagagatttatagattctaacccaagagattggatgtttagactgcttattgactttgatagattgtttctccaaccccgccttgctatgtttcattaacgagaaatgagat

SEQ ID NO: 159715 - DNA, 4459 bp, Arabidopsis thaliana landsberg
ggatttcatgaaagtctttatgaatgacttttctatatatgggtcttcatttgaagcatgcttggagaagctttgcaaagttctagctagatgtgaaaagaagaatttggttcttaaattgggagaagtgtcatttcatggttcaggaaggtaaagttcttggtcacaaagtttcaggtgatggtattgaggttgataaagccaagatagaggttatgacaagtttcaaggcactagatagcgtgaaatctgtgaggagttttcttggacatgctggattttacaggaggttcgtcaaggatttcagtaagattgtcagaccactaacagctttgctttgtaaggatgtgaactctgagtgtcatgctgtttttatatcagattaagaatgccttagtgagtgctccaatagttcaacctccagactggaatttaccttttgagatcatgtgtgatgcaagtgattatgcagctggagctgttttgggacagaggaaaggcaataaactacatgttatacactatgcaagtagaacacttgatgatgcacagcggaattatgcgacaacagagaaagaattgttagctgtggtttttgcttttgagaagtttcgctcttatctgattggttcaaaggtgattgtgcatacaaatcattcaacactcaagtaccttatgcagaaaaaggatgctaagccaagattactaggattcttcttcaagagagtttgacatcgaagtacgagataagaatgggattgagaatggagttgctgatcatttgtcacggatcaaggttgaagatgacgttcctatcaatgattttctacctgaagaaagtatctacttggttgacacaagtttgcaggaaaattatggcaacgttaattcacgggcatatgagagctgcagagaatcagtgtcgatcgacaccacaccccctgtctatcgacactatcgtgcttcacagacagatggttctgcacctccttcctagcccacatctatttcagttccctatgataggtactcctccatctcttctcttacttatccttctattacttcttcaaaatctttgaagtgtgcttcaccggtaaacgaacatcgagtttctcgggagcttgtttcctctactgattttgcaagtaacagagttagtatcgatcgacaccacaccaatgtcgatcgacaccagatgctgcacatagcagatctgtttacacaccgcattggaaggcgagattgcagcacaggtcccatgttcccccatccaagtcgtgaactccgccaagtcaaggtattgactataaacaagcgtttatgggaagcaacccactggtatggtgtttcgtttttctttttcctttatttgtgtctttttcgcttactccggatttgaatgccactggagacagtgacgtttaattctggggaaggcagttactaactacgtttttcttttcgagtcttattcttactcctctttttcttatttttgagtcgttttattgagtcaaaatttttgtctgaaattttgatctatctttcgagtttattgcatggattgcttaagtactgcatattcaaatcaatccgaataatggaaaatccaaaaagccaatcaataaaattaaggacatccattcccaacataatccacaaaggctggagctaatctcactactcttccttttaccttatcaaaacggttagtgttcataggatttgacgccttgttcgtacctgataagtcgactaatgtgttaaaaagaaaatgttcatctcccgggttttaaataataataataataataaaataaataatgagagattgagaagactttcagatagtgtataagggtagaaatgtttcctatgaccccattattataaaattatttggaacgataaattacaaaggttggaaaaatgccgagggtgtcgatccaatatgcgagttcccctttgtttactctctaaaaagaataactctgggggagagaaagaataccagaaataaaaagaaaatgaatggttgatttgttatggtatagtacaggaatgagtctagtaggttcttaaacattaaattgattgatgagacccagcgatgagagcctaatggatatagttgagtgctttggtatggaatctaggatgttgtgtgggctagcagagaattacatagtggtcaggattcgacttgagctgtttagtgcatggattgggtttgtttgatcaaggtaataagctagagagattgggagtttctgtgttttcaaacctctttcacgggttcggcatttgtgttttgcttgagggcaagcaaaagctaagtctaggagagttgatatacctcgattttcactgtttttagctatgatttgggtatagattttagaatcttttgttatttgtagagtttttctagtcttttttaggtctttacatatgtgggatgcatttggagattatggagcattctggatcaaaacagacaacttaagctgcagaagcaatccagagacaaaaatctacgtatgtgtcgatcaacaccgcccctggtcgtcgagcgacaccaatatctgacggcaattcgattgcgcaacgttattcaatttttgaagattttcaaatttggcccagaactttctcctagttctaaagaagtcttgcacgttttaggtcatatatatatatagatagttttaaaggtcattgtttagacctaactcttattatctcttttattcttgggagcaaaaccctgtggagactccctttatagaagattcttctaaactcttttctcttcttaatttcataatcgatttcttattcaatcatgttttgttcttctatgatcatgcttgagtagttctcttgttcggtttagggattctcattagggatttggatgaattagtagatcaaaaaccctgttaggataatatatttagaattcttcatctttgattattcttaatgctagttctactattctgatatctcctaggaatttccctaaatccgacgtcttaatcatctaaatctacaaccaattttaattgttttcttgtcttttatttttataatattttctgtttagctttattcgaaactattaatctattgtgtgatccgagaactttgtggaattcgatccctaagtgctctaacaacctctttatttgagagagtagtcattagggtaatttgactcatatcagcatccttgatggtgtgaaaggatttgaggcagtcctcatcgaattcaaactcggtctcctagcacaatagtctggttaacggcctggctatcttggagaagtctttaataaatcttctgtagaacccagaatgaccaaggaaacttatgatgtccttcaccgtttttggtggctgcaactgcatcatcacttcaacttttcctttgttaacctctatacccttctctgatatcttgtgacccaacactatgccttccttcaccatgaaatgacacttttcccaattgagaacaagattagtctcttcgcacctggtcaataccctgccaagattcaacaaacatgaggagaaagaggggccatagaccgaaaaatcatccacgaaaacctccaccatctcctcgattaagtatgaaaatatagaggtcatacacctctgaaatgttgcaggagcattgcataaaccaaatgacattctcttataaacaaaagttccataaggacataggaaagtggttttttcttgatcattagggtgaattggtatttgaaagaaaccactatatccatcaagaaagcagtaatatggatgattagctaaacgttcaagcatttggtcaatgaatggtaaaggaaaatgatctttcctagatgtagcatttaacttcctataatcaatgcacattctatgaccagttatagttctagtagggattagttcatccttttcatttttgacaacagtcattccactctttttatggacgcaatgcactggagaaacccaagtaatagggtagatgacaccagcatcaagcagtttcaaaatttcgtttttcactacttctttcaaattgggatttaacctcctctgtggttcaatgctaaaataggatttattttcaagatggatcctatggttgcataaactaggtgaaattcccttaatgtcggataatgaataaccaatcgctctcctatactttctaagctcagataatagcaggttcacttcatcactatttaactcagcattaatgatcatagggtaagtagagtttggaccaaggaatgcgtaccttagaccttttggaagtggtttgagatcaaccttcggtgccttaagttcagaccagtcatttgaagttggaatgatcggctccccagattcgttggtagacaaggtcgagtggctggtcgagtacgtcctcgagagtggaggttga

SEQ ID NO: 159716 - DNA, 538 bp, Arabidopsis thaliana landsberg
  unsure (1)..(538): unsure at all n locations
ttcgccgagacattagggtttgttctggaaactcaactcttgaatatattttatggcgttatgatgcatgacaaaggtagtcagagttcgattcacctatgatctccaggtaaaacattccatctgatactgtaaaaagacatgatctttgttcttttcttatgtatctcaatgatcctgcttgtctgtcgtatagttctgctattttacatctcaaggtaattctttacttgaatttttagagacagaacatcatgaagaaacattgattgttctacagggttatcatgcgttgcaaggacatagggttgctcataagctgtggaatgaagggccgaaactattagctcttgcattgcaaagccgaataagcgaggtagttttggcgntcnttcnttgtcctttttcggctcgatgtctgatcttgctgtggttatcctcagtttttggcntcgncntgtntccgggtagagaatgngcaatcntctgtttgaacattctaagtttcaggggcggccccgggttggtcttggaaggg

SEQ ID NO: 159717 - DNA, 1801 bp, Arabidopsis thaliana landsberg
acacattttgaccatagaaacactaacaaagctattgactgcttcaaagcaatattttgttggttttagcctcttttgagagaaaatgggtatatgtgttgtctaaccactcctaatctatctctaaatcttataattagtcaactggattggaatgtgacacattttgaccataaaaatactaacaaagctatttattgtttctaagcaatggtttgttggttttagattcttttaggagtatgataagcagctttttcaggtctgcttatggtgaatgtgtgtcagattcagttcaattcccctaaaacacaaacatgtcgatgcagtccactgtattgctagcaatcaagatgtgcacagaaacaatctaccaaaactaataagtcaagccaaattataatgatggtgggtttctagtaacaatcctaggtcaggattcaaacaagtaaaaataagaacttaagagccctactcgatcattgggtcgagtagaacctacatgtgacaaaattaagaaacctaaatgcaatcaacaggggatacaaataggggatacaaataacaggtaaataaaaatgcaatcaacagggatgaaaataaatctaattgaagttctaaggatggattcattgataaggacaactctaggatttaccaaatggctaataggcgaaaggtagatacccatgacgatagattcaaaaaccgggtcaatccactctcgtgacagagacccccataactctaccacttcctaatctcaactctcgttgatgaaacatagcagagcagggtttaagaaacaatctaccaaaaccaataggtagacaagccaatcccttggtcgagtctacaaatctctggaattcgtaggtcagacatccatttgaacgtcttttggacgctagacgtctatgatcgaatctccacattagccagcgaaaaccgcataggggccaagcgaatccagaagggtataacctaaacactaaccacctaactaacctagagattaccctaatctaatcaatcctccagaaccctaatcactactcatgcaacattctcaaaaacacaaacccagaaattactaaaatcataccaaaaggtagatctaaacaagctaaacaactttactaaaacaactaaatgcaaaaccgaaatagattaagagtaattaagttttgaagattcaagaacacaaagaaaacctaaagataaagcatatatcctttggacaaatcccaaagtgatctatttatactaaaatgttggaaaccctagatttactagaagacaagtgacttgaggcggtttgggctaataatcgatcttggggatcgagtaaagagggtgctacaaagtctgcgcctttgtgtctatgctccgagtgatcaattagtctaatagatgcttcttcctctcatattcgtatgctcagatgtctagttgagtggggaatgaggaggatccgaagacgctttgatagatcaacatgtttggtagagtgggtcgcccttggtcgaggagaggatcgagtaggaggggcgagtagatcgatctgaagtttcttttgaggctgccttgattgagtaaatgggtcgagtgaattgctgcctcctctgtggctgcctagatcgagtgaactggtcgagtagaatgctctactgcttccatcctggttggatagagtatagggtcgagtagaatccttgtaagctccttctacacctgaaaatacaccaaaacatgcaatatgtatgcaagatgatcctaagtgtgcaaaataagctaaatg

SEQ ID NO: 159718 - DNA, 524 bp, Arabidopsis thaliana landsberg; identical to SEQ ID NO: 13076

SEQ ID NO: 159719 - DNA, 1994 bp, Arabidopsis thaliana landsberg
ctgaaattgttttaggatatggaagcagtcgatccaccgctgcgcattgaagaaaccaccgtatctcatgatgtatctagttgcggttttatatcgaaagaagaatggttaaataaacatccaccatctggatctggatggactgacgaagatgatgataatgacgatgtatttagtagcagttttatatcgaaagaagaattgtctgacgctgtacataacgatccaccatctggatggactgacgaagatgatgatgatcaggttgacccggctttggagaaagagttctatcgccaaattcgcgaatccgacgtaaagatatacatatatatacaggatcttccctgatctcaacttgttcatgtgtgacttttgataataattctcgcatgcagggatttgatgttgacatacgtattccgactagttcactttatgtgtacaaatgtgccaacaatgatgaccttcgtggtgacattgttggcatttgtgctagagtgggactccattggtacaactttcaaaaggttaaaaattctcatcttggtctaaccacactacttgtatttttttactgaattcttctttatcttctttactaccactgatttcagggctcaaaccttgagttgatgcacgtcgataaatataattctagattctgtgcgcttatgacttacaacattactgctgaggctgttgatccagccaacgattcacgtttcactttccagacatgtgttaccagagctacatgtcaaaaagatgaagacctgaggatactgactgaagtctgtagaattaaaccaaagattcaaggtgaatgaatttctgcttttgattagtgggttgttctctttttgttatcataatcttgatgatcctggaaagtgttttaaaaaggtactggagacgaaataaagcgatggaatgacgaagcaattgatgatatctacaaaggcaatctacctgagtggatttcggatgatactttgatgtcatgcagtgagcaagatcacttttatagggtgcaagagtcagacatccgagaacacaactggcttcaactatacactgagattgcgtcttactcgctgtgggaaggagacatgaggctcaagtcttgtgtgccgctgcagattaagaatgtccttgtacgaactcgtgaagattttaaatcaaaggaaaagctcaaggctgggaatgccatcttctacattagttttaggggtgtcaatactcctcatggtccacgtcaagatcacagagccattgtaagaagaaccgtcgatgggattccaggacatgtttgtcttgagtttaagtgtttgctcatggatctgtgagccgctctattttctttatttgatgttgcaatgtaacatactgaagatcttaacccttaaataatgatattgtttttggtttgtttttctgtttcacatgcctctggcttttggtcatacaatgtgtaaacaataatgttggttgttaattttatgcctaacttgtcttttgtctccaagacaaagctcaagcttgctgcacctctggagatcaagaaggtcgttcttgttcaaactcgtgaagccatggagccaaccggggatgcaatcttctacattagcttcagggactgtggtctgaccgaagatgaccgagctgaggtaagaggacccatagatgggcatccgcagcacatgtttcttgaagttaagtgtccggttgcggacttgtcgagcttctctattaactaaactcttctgctctattgactaaatttggtctgaacaactcctcttattacagggatcaatatccacattctacaatcttgctgctgatgcaattatttctccagcttcaaagctattgtatcccagaggcaagtttcaaatttaccttaactgttcttaaaccaccaagttcggagacaagacaagggctccagatgtcaaaccacagaggattgtttgaattacctggacttg

SEQ ID NO: 159720 - DNA, 1134 bp, Arabidopsis thaliana landsberg
acaataatagacagaacaaaataaaaagagaaaatctatactagacagagactctctcagacacaatggtgggggtcaactctacaataaatttttcccccacccatagagccgttgctcgccggtgtccggagctctctccctcacggcgatctcttctcaaaggttttatcatttggagttccttattgtctggtttcctcctgtttcaaacctctttcctccccttaaatccaaaaattatcacgaccaccctactttcgaacttgctctctggtgctagttcttccctcaaccttcccgcaatcctcgtggtttacccgcttcatctgctctccttgaagccaagttcagcatctccctgctcccctttggatcggagctctactttggcgccggcgctagtgaagcacccaaccatggagaatccaacttctgtagaccgcacctcatcaccctttagcaccctctgactctgatttggctggttgtggacgccacgctaacagagtaatggttcctttagattggtctaatagttacctttgtcgagttcagatgttaagtttattttggaccctacccgagaccctcttccccacctattgccttttgccctttagagtgaagaagattggcattatgataccgcctctacggagtgggtattaccaaagctttttcacctctctacctacccattcaccaattatcgagttcagtcatgtgttaatatattgcttggataatttgcaatcctctgtttgtttgggaaagtacggcattatgaccatgtcttcaagaggtggttaccgtctctttctcaacctcgttaacccgtcagcctcctccgtggagcagcttttcaaaagctcggatgcattgtttgcaagagctgcttatgatcacttggtggtcgaggatttcgcgaagcccgccttcatggtcgaatccgacaaagcctcaacagatttttcaatccttgtaatcttttttaaaaagttcacatctctttggaaaactcatgaagctctatctttatttctttgtatcatctttgcttcattgtgtatgaaccttcctctttttgaggtttaatttgaatgaagatcttgtttgacaaaaaaaaaaata

SEQ ID NO: 159721 - DNA, 516 bp, Arabidopsis thaliana landsberg; identical to SEQ ID NO: 5955

SEQ ID NO: 159722 - DNA, 1174 bp, Arabidopsis thaliana landsberg; identical to SEQ ID NO: 7645

SEQ ID NO: 159723 - DNA, 470 bp, Arabidopsis thaliana landsberg; identical to SEQ ID NO: 76733
  unsure (1)..(470): unsure at all n locations

SEQ ID NO: 159724 - DNA, 569 bp, Arabidopsis thaliana landsberg
tcggcgtcgaagaaggacggcgagaagaccctggagggggcgttggaggtgtgagagaacctcgccatctatgcgggctttggggacgggccttgggtgcgccgggacgccagcggcgcggtgctgttcgcctccgacacctacatcaaggcgggcgggccctatgtgatcggcagcgcggcgcacgagcgccccttcgccggcggcaagctgaggctgaacgggtcgctgcgcggctggaacacctcgatcgacgacgtggaccggctgacctcggggccggggacctaccgcttgaaagcatcgcgaatacacgtttctctgtttggtctgaatcggcaactcgaaaagctcttccatggcttcaacaacagagttcttaagctttacagacaatatatgtcaaaagaagcttcgaaacaaccgtagtcctctagagctttacggacatcagttttcacttcatcccactttgagcttcctggttttagggtttggttagagaaatcgataaccgggtccgggagctgaaaagatatagaacgacgaagaagagaatctgaatccat

SEQ ID NO: 159725 - DNA, 1394 bp, Arabidopsis thaliana landsberg
caaaagcgaagaaacttcgtccctgtttctgataaatatcaatcagtggtgaatacgccttttccattttcttcatcatatatggcttatccagaaacattcttgtatatgtgagccgaaaattttctcgctattcaatctcatggcttcttcttcttcttctttttcttcgcctcgcaactggagatacaatgtcttcacgagcttccatggaccagacgtccgtattaaatttctcagtcatttacgtcaacagtttgtctacaatggaattacaatgttcgatgacaacgggatcgaaagaagccaaattatcgctccagctctcaaaaaagccattggagaatcgaggatcgcgatcttattgctctcgaagaactatgcttcttccagttggtgtttggatgagctattggagattttaaagtgcaaagaagatatagggcaaatagtgatgactgtcttctacgaagttgatccttctgatgtccgcaaccaaaccggagattttgggaacactttcaataaaacttgtgctacgaaaacagaggaggaaaggagcaaatggagtgaagctttgacctatgtgggcaacatagccggagaacacttcctaaaatggtttgtgtttaattaatcacagtttattcttcttataatgatgtttatggttgtgaaaacagagaacattatctttatgaccttttttctcatgaattttatgtttctacttgttagggataatgaagccaaaatgatagagaagattgccagagatgtttcagataaactgaatgctacaccttctagggattttgatggcatggtgggacttgaagctcatttgagagaaatggagtctttgctagatttagattatgatggagttaagatggttggaatctctggtcctgcagggattggtaagacaacaattgccagagctttacatagtcgactctctaataggtttcagcttagttgttttgtggacaaccttaggggaagcttccccattgggtttgatgagtatggtttgaagctgcgtttacaagaaaattttctttcaaatgttttgaaccttagtggtattaggataaaccatttaggtgtgataaaagaaaggctatgcaagctgagagtgcttatcattcttgatgatgtgaaccatataaaacaattagaggcgttggcaaatgaaactacgtggtttggtccaagaagtaggattattgtgacaacggaaaacaaagagcttctacggcaacatggtatcgatgatacataccaggtgggttttccatctgatgaacaagcaaacaaaattttatgtagatatgcttttaggcaaagcgatcctcataatggttttaaaaagcttgcattaggagtat

SEQ ID NO: 159726 - DNA, 653 bp, Arabidopsis thaliana landsberg
accttctactgtttctcccatggctggtcttgggtcagctacagctacagctccttcttcttcttctatgcgagcaaatcctagaagtgtccgtcgtagaagaagtcctttgaattctggcttatggatttctattgaactattcctcactgttggtcagatcattgcagctattgtcgttttgtctttgtcaaaacatgagcatcctcgtgctcctttgttcacttggattgttggttatgcgtgtggatgcgttgctacactcccgcttttgtactggagatattatcattcgaatcaggcttctgaacaggattctggtcagcaccgtcctaatcttaatgttgcagcaggaccattcgccttctcgatatccaggacatccgaagcagatggtcgacagaccaataccacctcttctcggggtagtagatatcctgggtttataagtgctgccaggtaaacacacatgttcttagatgatctgtttcaactgaaagtttggattttgaattacgttttctctcaaagcttttcttatttttgagaattgagagtttagatgtctcttatgttctaaacaatttctttgtgttgaaaatatctgcaatctaattgagtcagtatgattttggtcgttgatagtggcttcc

SEQ ID NO: 159727 - DNA, 5054 bp, Arabidopsis thaliana landsberg
ttaagtgctgtcatctaactcatcatcatcgtcctcttcctccacattctcatctcccacatcatccggaacagagtacgacacatcagaatactctccccctgcttgagtgcacactcacataaaagaccattctcaaaagataacagagtgtaagttgaatgagagaggcttacctgccagacgcagctgcatcgttgtgagagatgcaatgaggttctccaaagccgcatccaaggtagggctgtcagtcggtagcacatgcactggtttcacttccatggtgaacttctcagtgtagatgataagtaggaggcctacttatatgctgaagtgaggttcagttcaattccccttaaacactaacatgtcgatgcagctatagggggtgtcaatccagtccactgttactactagcaatcaagataacaactaggtcaagccacattataatgattgtgggtttctagtaacaatcctaggtcaggattaaaacaggtaaaaatgagaacttaagagccctactcgatcattgggtcgagtagaaccaacatgtgacaaatttaagtaactaaaatgcaaacaacaggggatacaaataacaggtaaatgaaagtgcaatcaacagggtatacaaataaatctaatagaagttctaaggatggattctttgatatgggcaactctagggttcatcaggtggctaacaggtgaaaggtagatacccttgacgatagattcaaaaactggatcaatccaccgtcgtgacaaagatccccataactctaccacttcctaatctcaactgccgttgatgaaacatagaagagcagggtttaagtaacaatctaccaaagccaataagtagacaagccaatgtcatagtcgagtctacaaatctctggaattcgtagatcagacatccatttgaacgtcttttggacgctagacgtcaatgatcgaatctcaacattagccaccgaaaatcgcataggggccaagcgaatccagaagggttctaaccgaatcttaaccacctaactaacctagagattaccctaatctactccatcctcaagaaccctaatcattactcaaacaacataactaagaacacaaacccagaaattattgaaatcataccaaaatgtagatctaaacaagctaaacaactttacttaaagaactaaatgcaaaaacgaaatagattaagagtaattaagttttgaagatttaagaacacaaagaaaaactaaaggataaaagctagctcctttggaaaaatcccaaagtgatctatttatactaaaatcttagaaaccctagattcactagaagacaagagacttgaggcggtttgggcgagtgctcgatcttggggatcgagtaaagagggtgctgcaaagtctacgccttagtgtctatgcttcgagtgatcaattggtcgagtagatgcttcttcctttcctatctgtatgctcaactgtctgattgagtggggaatgaggaggatccgaagacgctttgaatgatcaacaagtcttgtagagtaggtcgcccttgatcgagtaaaggggtcaagtagaggatcgagtaggaggggcaagtagatcgatctgttgcttcctctaaggccgccttgatcgagtagaatctgctgcctcctctgtggctgcctggatcgagtgaatggatcgagtagaatgctctgctgcttccctccttgttggatatagtagagtgtcgagtagagcccttttgagctccttctgaccctgaaaacacaccaaaacatgcaatgcgtatgcgagatgatcctaaatgcctaggtgtacaaaataagctaaaatagtgcaaaatgatatgatacaatgagcaaatacaaagctaaatgatgataaatacataccaaaaatgagtaaaatacagtgttatcaatcttctaacaaggaaacactacttaggcttttaagatgtggttgcggtttaagttcttatactcaatcatacacatgacatcaagtcatatttgactccaaaacactaaccaagcttcttcatgcttctcaaacctttgatggtgtagccgtaaaccatatgagtctttgtctttgtatcttctaacaaggatacaatacttgggcttttaagatcgggttgcggttctatttcttatacccaatgctacacatgacatcaagtcatatttaactccaatacactaaccaagtttcttcttgcatctcaaacaaaactttgatggtgtagttgaagtctgtatgagtctttggttttgtatcttctaacaaggaaacactacttagacttttaagatccgtttgcggttctagttcttatactcaatcatacacatgacataaagtcatatttgtctccaaaacactaaccgagcttcttctcgcttctcgaagctttgatggtgtagccgaagttcgtttgagtctttggctttgtatcttttaacaaggaaacactacttacgcttttggtaactggttatgattctaggtcttatactcaatcatacacatgtcatataatcatatctgactctaaaacactaaccaagcttcttattgcttctaaaatcattgatggtgtatccgaagtccgtatgagtctttgtgttaaacccgcctgccttgtaggccaagacggcatgtttttcatcagatcttgccaaaacattttctttaaacttcacacacgaacaaaatattgcacacaactcttcacgcttactaacctgaggataaagggaaatagggggtgagtaaagaatactcagtgaggggaattaactctgcccactgaaacatagaatactttctaaagctatacaaccatcatcataacatataaacttagacacacgcaataaacctaacatgctttaacttctaataccacatttataataatcatcttatatatatatatatataaacatacacatcgttaggtcgagtcatcctcgtgacgactagaacctcatgagtggagactggccctcgtggctcagacactcccattccgggctcgtcagccgttcttgaccagctgttaacccgtcggtccatcactgtccacatcactagggagaccacggcccatagctcgattctccccagtcttacatacaaacatacataatcatcatatatacatacttatacttaacattctcatacataatatatcatagtcagacatcatcaccatacatgtcaatcaataatcatcaaatcatatcatcacatcatcttatcctatgcaatcagatctaagccttcatactatgcgccaagaagcataacaaaagaaaatgctaatatgtttcgcaaataccaccctcaccttagcctagttgaagatgaagaacatctttattctcctttctctccttttagaccaactcactataagagctttaactgcatactcttgagctccaccttgcttctccatcaaccaaaaccttactccatgagtcctaaaggcttctgcaaagcttcagctccaaccgaacccgttttccagtcaaacaataaaatcatgtcatggtttactccatacaaaactgtctcagtaacatactcataagtcgagaactaaccgttaaaaacgtaatcctaccgttaaatatgtagccagtagtatcatgaataattccacgaagtgtcatcccgatcagacctcacatgaatctcccacgttcttcgaagatgttgcatcagaactgatatctaggtttctgcaacttaatatgattctgggcaacctttcaaagtcaaatacggatggagcttaaatccgatggacaagatgtcagctactttgagttccttgaagcaagagctttgcatagacatcttgattgtgatctaattatttctacttcatcgggaaaacgtgataacactgtattttactcattttaggcatgtatttatcatcatttaacttagtgatcactcattgtatcatatgattttgcatcacatttagctcattttgcatacttaggcaattaggatcatcttgcattcatattgaattttttggtgtgtttttaggtgtagaaggagcttacaaggaaatctactcgaccctctactatcaaacaaggagggaagcagcagagccatctactcgaccagtttactcgatcaaggcagccacagaggaggcagcagattctactcgaccccctactcgatcctatactcgaccagtttactggatcaaaggcaacctactctacaagacttgttgatcattcaaagcgtcttctgatcctcctcattccccactcaaccagactactcgaccaatttatcacttggagcatggaggcaaaggcgcagactttacaacaccctctttactctatctcgaagattgagcattcatccaaaccgcctcgagtctcttgtcttctagtgaatctagggttttcaacattttagtataaacaggtcactttgggatttgtccaaaggaccaagcttttatctcttagtttttctttgtgttcttgaatcttaaaaccttaattactcttaatctattttgtttttgcatttagttctttgagcaaagttgtttatcttgtttagatctacattttgatatgatttcagtaatttttgggtttgtgttcctagttatgttgcttgagtagtgattagggttcttgaggatgtattagattagggttcttgaggatgtattagattagggtaatctctaggttagtcaggttgttaagattaggttagatcccttatgaatttgttggcccctatgtggttttcgctagctaatgatctagtgtgggagtctatgctgcctcctctatggcggcctggatcgagtgaatgggtcgagtagaatgctctgctgcttccctcctagttggatagagtagagggtcgagtagaatcgttttaagctccttctgcaccagaaaacacaccaaaacatgcaatgtgtatgcaagatgatcctaaatgcctaagtgtgcaaaataa

SEQ ID NO: 159728 - DNA, 369 bp, Arabidopsis thaliana landsberg
agtattgaatgagtctaaaagtcgagggaatggagagtttcggtcggagcagcctgtgcgtcatagcatcaaggacgtttcatctaccgtcaagtggctgtctttttccctctcttagcttaactcatctcaaccgcaagctatctctttccgccacctcgttttcctccaagattcagtctcctctgtgtaactttcatgctctctctctctctctctctcgctctctctatgctatttgacttgtaatttttccgagttggtgtaggcgagtcagataagggaaatcccctgtcgcgaggggcgggagaaggagtcaaggaagatgcgaggagtaagctgcttcaagtagttttggtctctcctcag

SEQ ID NO: 159729 - DNA, 1062 bp, Arabidopsis thaliana landsberg
ttattttgcacacttaggcatttaggatcatcttgcatacatattgcatgttttggtgtgttttcaggtgcagaaggagcttacaaggaatctactcgaccctctactctatcaaaccaggagggaagcagcaaagcaattcactcgattcctttactcgatccaggcagccacaaaggaggcagcagacacccctcgaccctcctactcgatcctctactcgacctctttactcgatcaagggcgacctactctacaagacttgttgatcgttcaaagcgtcttcggatcttcttcattctccactggaccagacatcttagcatacagataggagaggaagaagcatctactcgaccaattgatcacttggagcatggaggcaaaaggcgcagactttgctccaccctctttactcgatccccaagatcgagcatccatccaaaccgcctcaagtctcttgttttctagtgaatctagggtttttgagactttagtataaataggtcactttgggatttgtccaaaggaccaagtttttatctcttagtttttctttgtgttcttgaatcttaaaaccttaattactcttaatatatttcgtttttgcatttagttctttgagcaaagttgtttatcttgtttagctctacattttgatatgatttgagtaatttttgggtttgtgttcttgattatgttgtctgagtagtgattagggttcttgaggatggtttagattagggtaatctctaggttagtcagtgataacactgtatttactcattttatgcatgtatttatcatcatttagcttagtgatcactcatttatcatatcattttgcatcacatttagcttattttgcacacttaggcatttaggatcatcttgcatacatattgcatgttttggtgtgtttgcaggtgcagaaggagcttacaaggcatctactcgaccccctactctatcaaaactggagggaagcagcagagcaattcactcgacccctttactcgatccacgccacagatcaatctactcgccccttttactcgatcc

SEQ ID NO: 159730 - DNA, 1104 bp, Arabidopsis thaliana landsberg
ttccacatggcttcgtctttgcaaccttcatgtaagcctcaatgttggaagctcccttgcagctcgtctcatgtctcgctcatctctcagagtcgaaactacatgcaaattgtctttctagtctcggctgcttcacttcttcttcccattacaacaagtgtatgtctcaagagtctgaaacttcattgttactcttaagtttgtacaatttgcacattgaccctatattaacgtgtggcacaggtcttggtgacaccgtcaaaggtgaaagacgaaggattgtcgttaaatagctccattcagctgcttggtttctgtgtttttgagtcttgtgtcggaatattttggccttcgataatgaagatgaggtcgcagtatatacctgaagaagcacgaagcaccataatgaatttcttccgtgttccactcaacatctttgtctgcatcgtcttgtacaacgtaagaaaattcatatcttcatcctctttatctggaaaaaagctaataatctggaaaatttgttttatggttctgcaggtggacgcatttccgatcacaatcatgtttggtatgcgctcaatcttcctcttcgtagcctccatataccacggcggcttatggtcatctccgaaaagccaagtatgttccttttcttttctcttacggtcttgcatacatatataatccaaacctctgaagaaagtgcggccttttatattcaaagagagcagcataatagaagccattgtttgtttgtggtgaatggtaatgtcttacttatctctctgttgtttattgcagagccagaagattggagtccgatgaaggagcgaaactcggaagttgatcctcttaccctctgattgtgtccactcctaagctcgtcagattcctaatttcatttcttggtgatttttttttttgagcaatagaaaaagagcaatcagaatgaagaaaggtaatgatttgctcttagctttttacatgtatggttagtgatgctgattgtttgatagggtatgtaactctatatttacctttacgctctgtcaccaatcacgtctaattattttccaaaaattttgtctacagtttgtgaatttc

SEQ ID NO: 159731 - DNA, 1352 bp, Arabidopsis thaliana landsberg; identical to SEQ ID NO: 35172
  unsure (1)..(1352): unsure at all n locations

SEQ ID NO: 159732 - DNA, 1130 bp, Arabidopsis thaliana landsberg
  unsure (1)..(1130): unsure at all n locations
ggataggtatgtgatacttggganccatagagatgcatggacatatggagctgttgatcccaacagtggaacttctgctttacttgacattagtcgacgatttgctcttttgcttaaatctggttggagaccacgtaggaccattctcctttgtagttgggatgcagaagaatttggaatggttagtaaattagtaacttcgaaaagttgaatctatatatgatggcttcactaaattacttgtgttctcttttttgttgtatagattggatcaactgaatggattgaagaaaatgttcttaacttaggtgcaagtgctgttgcttatcttaatgtagattgtgcagtccaaggctctggtttttttgctggtgcaactcctcaattagacggtcttcttgtcgatgtcttgaagctggtaagaatactaataaccggggcattctcaagcgttgttgaaaacttatactcgtaggaaatgtcttagtctctcgtattcatctatgcgtggtcaggtacaggatcctgatgcagtaggcttgacagtggaagagacatttaagtctcaaaataacattgtgagtagactattcaaaagagctcatacattgtctttgtaatgtaaaactatgtaatgttttaatgaactgcagattcagaggctaagtagagtagattctgattttccggttttcttcatccaccgggataccgtctataaacatgtactatggagcaggtcaatgagaacatgattccttaagtcttgcaaaatattctataatgtgatgttctaatgcaagtaataccaataatgtatgaagtttaaacattctttcagattatcctgtctatcacactgcatttgactcctatgattggatgatccacaacgcagatccattgtttcaccgtcatgttgctagtaaagatttcacttctctcttttgatctattattatcttttagttatttgttctgtttttcatggatgttatgaagagaattcactctctcttctttgctttctatatttatcagtggctggaatttggggacttttaggaattctcttggctgatgagccactcataccattcgattacatctcttatgcagaacaattgcag

SEQ ID NO: 159733 - DNA, 5697 bp, Arabidopsis thaliana landsberg
  unsure (1)..(5697): unsure at all n locations
gaaaagccttaagtttgtcaaagtatcaaaaccaaacccgctagactcttaaatcgtttcaaagagaaccccttagaacttgaaccaaaaggagagaaagaatgagaataagggtggagttaggacatctatgggaatgggatcatcctatgagctatcatactatatcattgggtagatgggagtctgtacttgtatgtgttcgttggcttttacctttagcattctactgaaactcaatcttttctctgagagtcccctgttactcgaccaaaccattaaagggaccatttttgtctcttagcctaagcccgaaaccaagtgagttcataaccattgcattgcttgatccactgttcgtgcttaatgaatgttaaagggaattggttgatgagaatgcttgaatagattaaggcaagttgttaggttgcattgtgacgagtatggctaacgtttttaagtaagggtctatcatcttgcaacctagaattagctacctggacattgagcttacccattttataggcatgcttcggttttgaatccccaccttcaaacctctccttcaacataagattttttgtttgcttgacggcaagcaagagataagtttgggggagttgataacactgtattttactcattttaggtgtatgtttattaccatttagctttgcattgcaccattttagcttgttttgcatacttaggcatctaggatcatcttgcattcgcattgcatgttttggtgtgttttcaggtgcaaaaggagcttaaaaggactctacttgatccattcactcgatccaggcagctacagaagaggcatcattctactcgacctcttcactcgatctaggcagctacaaaagaggcatcatttcactcgacccctttactcgatccaagatgctacaaaggaggctgcagtttactcgaccctcctcctcgatcaaggcaacctcagatgaagcagcagattgatctactcgcccgtcctactcgatcctctactcgaccaagggtgaccaactctacaagacttgttgatctatcaaagtgacttcggatcctcctcattccccactcaaccaaacatctgagcatacagataggagaggaagatgcatctactcgaccaattgatcactcggagcatagacacaaaggcgcaaactttgcagcatcctctttactcgatccccaagatcaagtatccgtccaaaccccctcaagtctcttgtcttctagtgaatctagggtttcaacattttactataaatagatcactttgggatttgtccaaaggatctatgctttatcttctcagtttttctttgtgtttatgaatcatgaaaccttcattactcttaatctatttcgtctttgcatttgattgtttaagtatagttgtttagcttgtttaaatctacattttggtatgattttagtaatttctgggtttgtgttcttgagaatgttgcttgagtagtgataagggttcttgaggatggattagattagggtaatctctaggttagttaggtggtaagtgtttaggtttatacccttctggattcgcttggcccctatgcggtttttgcttgctaatgtggagattcgatcatagacgtccagcgtccaaaagacgttcaaatggatgtctgatctacgaattccagagatatgtagactctagcccaagggattggatgtttgattctaggtacccatttcagagctttgcgataagttctccttgatataaccctatttttactgcttttagttatgatttaggtataggtttttgaatctatttcttatttctatagtcttttctagttctttacaggtctttacatgtttgggattcatttggagataatggagcattctggaggaaaactttgtgaagacgttcatgttactactggctacatatgcaacggtgggattacgtttctaacggttagttctcgacttataggtatgtttccgagacagatttatatggagtaaatcatgacgagtttttattgttttattgggaaattgagcttggcttgagctaaatctttgtaagagttttccttaatcatggactcaggtcttcaggtcttggttgaaggagaaccaagttagagcttaagagcatgcagtcgcagttgagatgataagtttgtctaaatgaggaagaaggagaattgtgttgtcattttctactaggccaaggtgagggtggtatttgcgaagcatggtatcattttcttttgttatgcttcttgacgcataatatgtaggcttagatatgattgtataggattagattacatgatgatatgactttatgattgttgagtatgatgtttgataatgtgatgttatgtatgatattataagtatgtttatgttaagtataagtatgtatgtatgatgattatgtatgtttgtatgaaagactggggggaatcgagctatgggtcgtggtctccctaataatgtggacagtgatgggccgacatgttacatgctggtcaagaaaggctgacgagcccgggatgcatgggagtgtctgagccacgagggccagcctccactcatgaggttctatttgtcacgaggatgactggacctaaggatacatatgtatgtgctatcatggatttatggataaattgattattataaatgtgtcattagtagttaaagcatgttangctgatcgcttgtgtctaagtgtatatgttatgatgatgattgtataactttagaaagtgttctatgtttcattggcagatttgattcccctcactaagtattctttactcacccttttttccctttttcctcaggttagtaagcgtgaggagttatgtgcaatattttgttcgtgtgtgaagtttaaagaaaacattttagcaagatcagatgaataacatgccgttttggcctatatggcgggataggtgttacaaggtgcaatacccggatttggtggcagacaccgtcgtggtcaaaaagaagaatggaaaagacagggtgtggatcgacttcacataccttaataaagcttgcccgaatgacagtttcccgcttccgcatatagattgtctcgtggagtctaccgctgggaacgagttactaactttcatggacgccttctcgagttataatcaaataatgatgaatcccgaagaccaggagaagacgtcatttatcacagataggggtatttgttgttacaaggtaatgccttttggttttaaaaatacaggagctacttatcagcgattggtcaataagatgttccacgagcatcttggaaagacaatggaagtttacatagacgatatgttggtcaagtcgctgaagaaagaggatcacgttaagcatttagaagaatgtttcgaaattctcaatcaataccaaatgaagctgaaccctgcgaagtgcactttcggagtcccgtccggagaattcctaggttacattgtgacaaaaagaggaaaggaagccaatccaaaccaaatcaacgcctttctcaacatgccatctccaaaaaacttcaaagaagtacagcgtttaactggtcggattgtagctttgtaccgttttacttcaagatcaacagacaaattctaaaaggaaacaaaagatttctttgggatgagaaatgtgaagaggcatttgagaagctctatttgtaagtatcagtgtcaaaccatgcagttagcggagtcttgatacgagaagatcgcagagtacaaaagccgatttattacataagtaagtcaatgacagatccagaaaccaggtatacaatgatggaaaaattgcacttgcggtggtaacctccgccggaaagctgcgtccatacttccagtctcatccgatcgaggtgttaaccatgcaaccactttgaacaatacttcatagtccaagtcagtccggaaggttggcaaagtgggcggtggagctaagtgagtatgatatagagtaaaaaagccgagttagcatgatggcccaagttttggcagatttcttgactaaaccactagtacttggcgcgctggagcaaccagaaaatcaaacttggaagttgcatattgacggatcttcatcaaaacagggatccagagtggggatcaagttggaatctctcatgtcggaaattcttgagtaatcattccgtttgctatttagtgcttctaacaatgaggcagagtatgaagctctaattgtcggacttatgttggcacaaggagttggagctgaagaagtggttgcttattgaattcgcaactagttgtaaccagttcaatggagattatgaagtcaaagattcaagaatggaagcatatctcgaagtagttaaagatctggctaagaatttcaagaaattcgaactcattcgcataccttgaggagaaaatacaaccgcggacgcgcttgcagcactggtgtcaacgtcagatcctgaggtaaaaagagtcattccggtagaatgcatttcgaccgaaacattaaggaggagaaagagaccctcatcattacaaggtctcgagctgcggcacgtgatcgtggcgaacttgagatagagttaccacctgtcaagcagaggaagtcaaaaaggttaaacgtatccgatcccggtgtacccaaaaaaagcttaagcaaggagcccgttgacctaacaaaggatatagtcccataggcacaaactgagccacaaaccaaggaagatatcctcgacaaagtacacaaagcgacaaacttagatctacaaaataacatttcttgttatccacattgatctacaaaacagagaattagaagacatcactgacagttccgaagaagaagaagaatcacacgaattcggcgaatctgataatggcgttgagtcagaaaatggttgtaatgattcagaaaatgaatcagaataaatgttattattgttaactttcgatatttgtgatggagaatgtccctcgcaatnnnnnnnnnnnnnnnnnnnnttttgcgaggcgagcgatcttaaacctaaacattcattctaaacgagttcaattgttcaccttagtagataggctgattcttattacacacctataaaccagactcatcaaataatagatccaattacatatacttatgatagatccaactaaatcatatataaaatcagtaaaaatagggatatatcaactctcccagacttagcttttacttgccctcaagcaaagcacaaaagccaaacccgtggaagaggttttgaaaacaaaggaactcccaacatgctctaccctattgccatgatcattctatctaagtccttatgcctaccaagtctcatcagattctaaccaacatgtacttctctgcaagcttacacaacattatagattccatacctaagttcctcaactatacccaccaggctttcatcgctgggtctcatcaaactagccgacattcaagatccttctagactcattcatatacctttttttttttgaatagctgttaaattatattcaaaaaggagggtgaaaatccacatgttctacaatttaatgcacactttttatactaggaagaaaccgcaacatgaatttagtcttggctttgtcttgatgccagccaaagctgaaacccgtctccatatttgtgtcttcctccacgtccgattgt

SEQ ID NO: 159734 - DNA, 875 bp, Arabidopsis thaliana landsberg
gatacagatattggaagaatccatcaaaaggttcacatttacagtttgtggattttgcctgaattgtttggcgttatgtcttattctctgtgaattttcaacaataataatatcgtcccttttgtccttacctaaattgtttgcctattctctgtgaatgaatgaatacataactctcaaaccctgaaaagtgaaaactttcaatgctgaaacaaaccaacgtggatgattcaggacttttcaatgccaccgacaaattcaatctttttcctattcattttgtaagttgcaatgctgtcacatttggttttctcattgtttttaactctctcttaaagaaacaacttaattagaatttttatgttcttacaacaagatccaatagacttttggacatgtgttgacacttttctcaagtgggttggtgggatagggacgtatatagctgcatttgacaacaacactactctatttcatcaattatttcgttactcataaattttgtttcagttaacttttctctacaaatgaagttgaatgaaatgaactatactaaaatttggtttaatatagaattagaaattccaatggcaaatttatgcatgattttgagctaatatataaatatacattattttgcccaaaaaaaaagataaatatgcattaaaaaataatatatataaaataataggaagaagaagaatctatctttggtatacctactttggtttcagagcttataaacacaaacacttcactcacacaaaacacttgctcctccatttaccagatctgaacctcttccctttcctcgaaaatccttctaacatcatcatccatggcttcctctgatttcgatggaatccttttgggaa

SEQ ID NO: 159735 - DNA, 663 bp, Arabidopsis thaliana landsberg
  unsure (1)..(663): unsure at all n locations
gcattttttctaaatactcaaatagttgggttgttgtcatttactgccacaaggtaaacttcttttttttttccagccactaggacatgatagagtgattgctcaattatgtgaatatatccaatggctgggtttaatttgagaatcaagacagtntgttggaatgtgaccacaattatggccggtccttttgatgtgaatcaggacttgtaccaatgatgttactcctgcaggtaatcaggttatctgctgcgactcaagaataccctaaatctatagtctgcaatgttcatggcgtcaaccctaaatttctcgaaattgggttgagaaaactagaacagcagaagctccaggagcagcccttcactaaaggcgcatactacattggtaagatggtctggagcaaagggtacaaggagcttcttaaactacttgagaaacaccaaaaggaacttgccgagttagaggttgatttatacggtgatggagaggactctgaagagatcaaagaagcagcccgaaaactcgacttgacggttaatgtttacccaggacgtgatcacgctgcctcgctatctcacaagtaagtctctagttattaacagcaacaagattgattgatttccttgcagtctatcgtattgtataccttaggatttccct

SEQ ID NO: 159736 - DNA, 411 bp, Arabidopsis thaliana landsberg
  unsure (1)..(411): unsure at all n locations
atggcaaggtcaccttgttgcgagaagaacggactcaagaaagggccatggacatctgaagaagaccagaagcttgttgactatatccagaaacatggttatggtaactggagaaccctccccaaaaatgccggtacgtgtcttaattttcatttattattcatgttttagttatgtttttcgaaagtttcaaattgtaatatgtttttttctcttcannnnnnnnnnnnnnnnnnnnnnnnnnnnntaggttaaggtggactaattatctccgaccagatataatgcgaggaaggttctcttttgaggaagaagaaaccattattcagcttcatagcttcttaggaaacaagtaagtttgcttttttttctcctccgacaatatctactatgaaaatagttcaagattct

SEQ ID NO: 159737 - DNA, 1293 bp, Arabidopsis thaliana landsberg
caaagaacatcttctatctttgaaggaattgagtatctcatttgccctaagtctgataaacaatatgtatgggaaggagaagcaaattcaagcagttttaccattcaggaagatactgacccacaatctctcattcctagaggaactcgtattactttgcatcttaaggttcgttatgctttgatatttaatttgtagatcaattctgagtatttgttccttcagaagacatgacatactaaattatctctattatttctttccccaatacagcaagaagccaaaaactttgcagatcctgagcggattcagaagctcgtgaaaaactattcccagtttgtttctttccctatttacacttggcaggaaaaaggatacacaaaagaggtatgatcaccagagttagcagatttgtgaacttaaacatatgtacttttgtgtcagatgcaactaatattcttaccttattaactggctttgtatatttggctctctctcttgcaggttgaggttgaagatgatccaactgaaacaaaaaaagatgaccaagatgaccaaactgaggtatatatacctgcgtctctttacctgttctaagaaataccttgatcagcttctggaaatatcttaatcagcatcagaagatagctagatgtgtaagaaaagttggcttaggattggggactatttttcttgtaacagaaaaagaagaagaccaagaaggttgttgagagatactgggattgggagcttacaaatgagacacaaccgatttgggtaaggacttgtcaatgtatcttgagtgcactctgaatcaatttaacagtgtattttatttattgcagctgcgtaaccctaaggaggtgacaacagcagaatacaatgagttttacagaaaagctttcaatgagtatttggacccattggcttcatcccatttcacgacagaggtactttcaaaggaacacatttattgaattggatatttccattaaacagctgaattagatcgtctttgttagacgatccactgaaatataatgctctttgattctcttgttggcaatgctcagggcgaagtcgagtttaggtctatcctatatgtgccacctgtttcaccatcggggaaggatgacatagtcaatcaaaagacaaagaacataaggctctatgttaaacgagttttcatttcagatgactttgatggggagctggtgagaaaagtttcttttggtgtggttcaaatttctttcaagaaacctctgtctttctaattatattgatatcattttt

SEQ ID NO: 159738 - DNA, 786 bp, Arabidopsis thaliana landsberg
ttctgctatatggctaaggcagcagcatattattcagattattgttactggctttaacacatgaacttaagcttacttttcaatgctttataatttatgattcttcagctggattctatatatgctggggttgtctagtgtgggtgccttctgtctacacttctccaggcatgtaccttgtgaaccaccccgtcgaactcggaactcaggtgcataattttgaatttgtctagaagagagaaatcgtctttgtgtgttaatccaatgagaaacttttaggataccacttttttatacgaaaaaaaacaagtaaggttgagctaaatgtgaaaatcccaatttctaggaattgcacttaactcttgttattgaattacttggtatcttccattacaaaacagacgggagagagtaaagtgtagattgttgatcaaatgctcgttgcatattatgctcatgattgtagttgccagatatcagtttttctagtagtagaagaaagctgttcatgaaaacaccactgatgctacgatcatcgggacatatatgcctatctccgtacctaagacttcactatatccgtctttggttgcagttggcaatatacattctcgttgcaggaattctgtgcatttacataaactatgactgtgatagacaaaggcaagagttcaggaggacaaacgggaaatgtttggtttggggaagagctccgtccaaggtgtgatcataataagccccactagcttagtgaacttagctatattccttttcagacctaaacat

SEQ ID NO: 159739 - DNA, 572 bp, Arabidopsis thaliana landsberg
cctaaacaaaaaaaaacaaacttttcaccatgcctttggtaatcccaatagagctaaaagcaagatagttatattcggtagaaaatactgtccacaatggaactagatttaaatattcaccataaaaaaggcttcgcttgtcatagttgacttaccgtgtcatctctaacaggttgctgactttggtctttcgcgtatcaagcatgagacgtacctcactacaaagacgggaaggggaacggtactagagatagactttaacgaattgattcctctatttttatgattttatttcttcctagggtgaaatcccattgcttttttacctgtgttgcagcctcaatggatggcaccggaagttctccgaaatgaggctgctgatgaaaagtatattccccattttctgcttgggttacctaactactgttctaccgttcatctctgaaaatgttcctcctactctttaaactacaggtctgacgtttacagctttggagtaatactatgggagctggtgactgagaagatcccgtgggaaagtctaaatgctatgcaggtataatttgcgtatt

SEQ ID NO: 159740 - DNA, 527 bp, Arabidopsis thaliana landsberg
cccggaacacggaagaatcttatgagactttcagagattaagaacccttttccagtccgcgagttccctccctttaagtattcaggtcgcaaatgacggatgtaataacactatggagaaccataatctcaagccatcctcatcacaaagtaagagcggtgacccgctgcatgacccagtactgatctcctgctgcagctgctcattctgtgggtatagtacaagggcggttctcgcaattggcggtctctgatcctttgatctgttcattcgcagtacaacaaggagtttcttctcccgctctcatcagagaaagaccttttcgcttgaatctgaaaaagagaggcgcctacattcaattgaagcacgtgatcgcctctgagaaacattacgattggggaagctctgcgaagaaaagcctaaactttgatactatgacacaagatgatgaagcgtttggtcctagtaataaatctgacctcttggttatatcgaagcagctggacaaggagaagagttggtatgat

SEQ ID NO: 159741 - DNA, 3337 bp, Arabidopsis thaliana landsberg
caatatgtttggttttcgtttcacaaattcctcgcaagtacctcgcaattttgcgagggatatatttgcaggttgtagtgaaaccaatagttggtgttaattctcatgaatatgaccacttggttttgaaaaagaatcctaaagacaaggatttgttacatgtttttgatcttgtgatcaaaaggtataaaataagcaagaaggattggagtcagggatggattgaagtggaacaagtacatgaaggtagaattaatcaattaatgagacctgcaattgaaacacttgtgtatcgcaccacaaaaaggaattcaatgtcctttggtgagaaaataggagttgtctataaaaactgtaaaattattagggtcaaagttggaaggatggtggactatttagggattgaaagagttcctgccagttctactagagaaaaaaaaaaattagcgagagatatattggtcgcaaattttgcaacgaagtagtgacattctcttatctgctccaaaaatcctcgcaattccgcgacgaatttgcgagaaaattcctcgcaagttactcacaatgtcctcacaatgtcctcgtaattgtgcgagagatatatttgcagtgaaaccaatagttggtgttaattctcatgaatatgaccacttggtttcacaaaacaatcctaaagaaaaggatctgttacatgtttttgatcttgtgatcaaagggtataaaatgagcaagaaggattggagtcaaggatggattgaagtggaacaagtacatgaaggtagaattgattgtgtaatgaaacctgcatgttgaaacacttgtgtatcgcagcagaaaaaagaaatcaatgtcctttggtgagaaaataagacttgtttatgaaaactgtgaagttcttaggtacaaagttggaaggatggaggaatatttagggatcgaacgagttccttccagttctactagagaagaagaaaaagaagaggaagaaaaaaattttgcgagggatatatttgcaggttgaagtgaaaccaatagttggtgttaattctcatgaatatgaacacttggtttaaaaaaagaatcttaaagacaagaatctgttacatgtttttcatcttgtgattaaagggtatataatgagcaaaaatgactggagacagggatggattgaagtggaacaattacatgaaggtagaattgattatgtaatgaaacttgcaattgaaacacttgtgtatcgcagcagaaaaaggaaatcaatgtcctttggtgagaaaataagacttgtctatgaaaactgtgaagttcttaggtacaaagttggaaggatggaggactatttagggttctaaagagtttctgctagttctactagagaagaagaaaaagaagaggaagaagaaaattttgcgggagatatattcctcgcaaattttgcgacgaattagcacgttctcctattggctcgcaaagtcctcgcaattctgcagcaaatttgcaaggtaccttttccatcccatatgttcctcgcaaatcgcttgttttcttttagtgaaaaggattttaaaagaattttaaagtgttgaaaaagttactgtaaggttaacactttaactgttagtaattgggcctagacctcttattttcgaaaaaacgaaccgttttagtaaaaattcattaaagcccaaaattcactaaaaagcaaaaaaaaaaaaaaaaggaaactgtgaaagtaacaaaaagtaaaaaaacaaaattaagtgaaactgtcgtctctctcactgtgtcttcttccttagaaaaatttgaagaaattctgtttctttagcaaaagaatcaattgaaggtaacaaatttgtgatactaaattttgatatttgggtttgttcgattttatttatttttgtcgtatctcttctatgttatagcaatatcttgggttttcgtttcaaaaattcctcgcaagtaccttgcaattttgcgagggatatatttacaggttgaagtgatacgaatagttggtgttaattctcatgaatatgaccactgggtttcaaaaaagaatcctaaagacaaggatctgttacatgtttttgatattgtgatcaaagggtataaaatgagcaagaaggattggagtcagggatggattaattttgcgggagatatattcccgaccaccacccggaacttaaaccagcggagcagcttgtagtggaggaacctttggccaaaccaagaagacaaatgactcgctcaaagaccaagcttctcaaccaaggtattttggactacccaagcacttggacaagaaccatgatggttgcgatatctttccaagacgattggtaatgggctaagtgttgctttggatgctctttttccctgctaaggctttgtcccattgggttttccttagtaggtttttaacgaggcctaagtaacacttccaaatcccctattatcaatcaggcccaagcccaccaagaggaccacgaatttggaaggccatgggtctatttttgttcaaattttcatttatgatttctcctcttccgagttgtcttggagcttgttccaagactaactcttcctcttctcttcttctatatttaaactcttgtatttcctcatagtaaactcatctatatttttaatctcaaactcttttaagctagatcaaaggtaaatcaaaggccatccgcatcctttgtgtgaccaatcgctccacatcctttggtttgagtgatttcaagatctcttagatgcaaagtctatcccctactcaacctcaagagtgtcgatcttagggaattcatcttaagtggtatcagagcacattctgaatttgagtactccatcctttcatcacttcatcatttcgttccattctattcatcctttcatcacctcatttcattttgtccgttcatcttctcatctgtcttttcatctttgctgtcatcttgctttaattttcataaataattggcttgcgataaaattgcgaaatcaattggaactgaatctaggacgagtctagtattttatgatattgtttctggaatttttaagcataatttgataatttattttgttcgatctagttcgtctgttcttaggaaaacgtttgatattctccttgaactagtgactggtttagtgttgtatgttggcaggaatggtgagatccaaatcacgctcgggagtgagtgctaatgaccaagtcatcatcgatgctatcatgttacaaatggagaaaataattgatgccaaacttaagccgatcaacgaccaactcaaaggaatagagcaccaagttgttactcgtatataa

SEQ ID NO: 159742 - DNA, 3890 bp, Arabidopsis thaliana landsberg
ccttcctgtttcactttggtctctctccaagacagagaagaagctattctgcaaacgtctatttgattttaaaggactcagatgtctactattcagacatagcaagaggtgtatctttagaagactgtaaggtaacaggattgaaatcacatgattatcacgtcttaatgcagcagcttcttccaatagctttgagagggttgttacctaaaggtcctagggtagcaattggacgcttatgcaaatttttcaatcacttatgtcagagagtgattgatatggagcagcttttggaaatggaagttgagattgttgaaaccctttgtctgtttgaaaggttttttcctcccagtttctttgacatcatggtgcacttgacagttcatttagggagagaagctcggttagggggaccagttcatttcagatggatgtacctgtgagacccagtcccggacgtctcggcgtccggcgaccgtgtactcaagttcgcgccttttcccggctgaacctcctaatttttcgcgattcaacatagaattgcctttacgaggcttaattctataatcgctctcttattacacagcggaagtctttctaaccttggtttagttctaaccaactcttgtaccggtttcatcgtctttgtccctcagacttagatcgatcctttactcggtcaagacatgcatattgttcgctaacaatcgcatattcctttatcctattttcacggtcaattccctaacgtctaccttaactaataagttagatcgttacataccttggccaatatgcggatttgactccttagcccatttgtcgccttattccatttgttcaacgattctgatccgatcgtgtattgatggaccaatttgtatcgttacttagccatacaaccaaccaaccccactggtctaactacaacgatagagattggggatcgtacgattccctagtttcacgatggccgaattaagctattggctcattggtccatccgtcctccagacgtacgtcccttcggttccatggtggatgattcagcactcagcttatcgaaccatccatgtttcgatccggtcgtttactacgaccgcccatggtttactaactgtttatccgtctggtctatggtggtcgataaagctttcggcttatcgatccatccttacgatccgaacgatattcttaacacacccaagggtccgtggattcatctatcagatcatcgtaggctagactatgaaatccttcttccgtcggccttaggtttgctcgtgggtccaacgtccgttttgtccatcggttcccaccgtggactttcctgttggttatcagtcgagtcaccctttggtcttaccgatctctgatccgtttcaccatggctgaggagatagatacatgaaggcggccgcgatattgatcctatatggtgaatcacgttccttacccattcttggtgctttctccctttatcggtgagattgcatccatgggcgacccttgggtgtgttcggatgcacttatccttgtgcttcctcgaacacttttcttgatccatctcatccgatgatcggtctgtccgacccgatccgtccgacgatcggtctaccagatccaattcgtctctaagacgaacggtctaccctctccatcctctacactccatcaaaccgttggaccgggaggtagcatgcgcatcagttcggtcgagttatactcgccgagccgcaccccctttccgaccaacaacttcgggatgtgttgggactcttttaagaatgttttgtggtgtatggatgattgtgagatgatgtgagatgccctaaaggccttgggcgtcctcccttatatagggggcgaatggatgcatcctgaagcatcacatccgttccttgcacccttccgtaaggtcacatccgttccttacctccttccaaaaggtcacatccgttccttgcatctattgggcgatgcaaccgttcgttggtacccgctcgaccttacaccttttggccgagacacctcttcacccgtgagctatcacagtacaccagctcgagtgtcagctgaccggaccacccagctgggtcagtactcgatcagctcatcgagctcagtcgagctgtcggtcagctgacctagctgacctagcaagtctagctggtttagctcacctagcttagctaggtagttcatacagcttgtccagcttacctagctggttcagcttgaattttctcgttcttccgactaagtatttttgtccattcattgaccataatatagttttctcctaaaacaacccggcctctttatgaacgtgagaccaccgtggactttcccgttggttatccatcgagtcaacctttggtcttaccgatctcgatcggttccttacccattcttggtgctttctccctttaccggtaagattgcatccatgggcgacccttgagtgtgttcggatgcacttatccttgtgcttcctcgaacatttttctcgatccatcccatccgacgatcagtctatccgcccgttccgtccgacgatcggcctatcccatttgacccgtccaacgatcggtctgtccgatccgatacgtctggccgatccgatccgacgatcagtctaccagatccgattcgtctataagacgaacggtctaccctctccatcctctacactccatcgaaccgttggacagggaggtagcatgcgcattagttcggtccagttatacttgctaagccgcacccctttctgaccaacaacttcaggatgtgttggaatgttttgagaatgttttgtggtgtctggatgttgtatgagatgatgtgagatgccttgggcgtcctcccttatataggaggcgaatggatgcttcccgaagcatcacatccgttccttgcacccttccgaaaggtcacatccgttccttgcatccttccgaaaggtcacatccgttcctttcatcctttggcgatgcaaccattcgttggtacccgctcgaccttacaccttttggccgagacaactcttcatccgtgagctaccacagtccacaagctcgagtgtcagctgaccggaccacccagctgggtcagtactcgatcagttcactgagctaagtcgagctgtcggtcagctcacctagctgagctagctagtcttccagctggtttagctcacttagcttagctagctagttcatccagcttgtccagctcacctagctggttcagcttgaacattctcgttctttcgactaagtattttgattcgtttcttgaccatggtctagttttctcctaaaacaacctggcctctttatgaacgcgggacgcggtcgttacagtacccttttgaaagatatatgaaagtcttcaaagattttgtgagaaacacagcaagacctgaaaagaaaaatgctgaatgttacttagctgaagagtgcatccaattctgtagtaacttttttaagaagacaacaaaagttcaggaaaaggcagatagaaatactgagtatgagaacaactctatccttggagggcgtcctatctctgcaggcacctttattagtcttacagaaatggagagaaaaatagctcatttggctatgatccagaatatggctgtcgtcgaaccttatgtagagtaagtgacaatctatctctctttctattgcttttctatattgcttttcactttctgcttctatgaatgctgattctgaattttgttttctctgtttactagtgagcacctgcagcttctacaaaacactaatgggagatgcagacgtgatgcgtctctgttatggagtatgcacactcaaaattttgcatcttggcttaaagaacaggctagcaatagatataag

SEQ ID NO: 159743 - DNA, 691 bp, Arabidopsis thaliana landsberg; identical to SEQ ID NO: 19616

SEQ ID NO: 159744 - DNA, 638 bp, Arabidopsis thaliana landsberg
  unsure (1)..(638): unsure at all n locations
tccgattcccaatcttaaagacaaagccattagaaagagaaagtgagtgagagagagagagaaactagctccatgttcgaaacagagcatcatactctcttacctcttcttcttcttccatcgcttttggctcttcttctcttcttgaatctcttggagagaagaaattgaagaacccgattttcattttacctccggttaaatccggtttggccattttttggggaacctatcgtttattttaaaccgtacaccgccacaacactcggtgacttcatgcaacaacatgtctccaagtaaacaacaacatcttccaaaaactcaaaaaaataaatcctctgtttttgaaatttgactaatgttgtttatttcacaggtatggtaagatatatagatcgaacttgttnnnnnnnnnnnnnnnnnnnnnnnnnnnnnnnnnnnttaatagattcatattccaaatcgaaggacggctctttgaatgtagttatcctagaagtataggtgggattcttgggaaatggtcgatgcttgttcttgttggtgacatgcatacacatatcccaagtatctcgcttaacttcttaagtcaagcacaaattagaactattctacttaaagatgttgagagacatact

SEQ ID NO: 159745 - DNA, 1207 bp, Arabidopsis thaliana landsberg; identical to SEQ ID NO: 36410

SEQ ID NO: 159746 - DNA, 524 bp, Arabidopsis thaliana landsberg
cctagcttgcatttcctcttccacacacccactcatggcgtctcgaagagttttatcatctcttctccgttcatcttccggtagatctgccgccaaattagtcaaccgaaaccccaggcttccttctccttcacccgcgcgtcacgccgctccatgtagctacctcctcggccgcgtcgccgagtatgcgacctcttcaccggcaagctctgctgcgccatcctctgctcctgctaaggatgaggggaaaaagacctatgattacggtggcaaaggtgcgatcgggcgtgtttgtcaggtcatcggtgccattgtcgatgtgagattcgaggatcaggaaggattgcctccgatcatgacatctcttgaggttcaggatcatcccacaaggctggtgctttaggtgtctcatcatttgggtcaaaatgtcgttaggaccattgctatggatggtactgagggtcttgtccgtgtaaggaaggatctcaacactggtgctccgatcacggtaagtggcttctctg

SEQ ID NO: 159747 - DNA, 564 bp, Arabidopsis thaliana landsberg; identical to SEQ ID NO: 23148

SEQ ID NO: 159748 - DNA, 455 bp, Arabidopsis thaliana landsberg
tcaggaacagataatacgtcaagaaaaagctcgtgcagaggctcaaatgctagcaaaaatcagagctgaagaagaaaagaaagaagttgagagaaaggcagccagagaagtagctgaaaaagaagtagcagatcgcaaagctgctgaacaaaaacttgcggaacagaaggctgtgatagagagtgttacggggagttcagctacatcaaatgctcaagctgggggtgagctatcttttatttagtatctattttcatctatgttgctgtggttgttctttctttgtcatattgaagattgtgatctcatttcttactgtgtttatttttttattaatcgtgcaaggtaattcaatccgagctgcagaaagtgctttgatattggagaaccacagattgaaaaagctcgaagaactagaatcaacgaatcaatcgcttaagtcacgttcaaatgag

SEQ ID NO: 159749 - DNA, 933 bp, Arabidopsis thaliana landsberg
ctctccggagtgatctggatattggaattagatgaaaatgtaaaagattggatgaaggagaaattaccaaaagagcaaaagaagaagagagtagatctcttggaggtacatccagttaggagatttgctcgcatcaaagatcataagctcatcttgtctgattcattagatggccctcagaatcctattactttgaaaggttgctttgttgacgctgtttcaggctctggaccaacaaggaaatggtaagactctcaaaaagcgtattaatcggatccattttcgataatgtttcgagtttcgtattcatactcctttgttttatgttatcttagggctaaaagatttcctatacaagtagaaagcaaaacttctgtcttgtataaaggaaacagagtgttttacattttcttagagacttcttgggagaaggagtcatggtgtaaagctcttcgtcttgctgcttgcgagaatcaggaaaggtttatttggtccaccaaattgaaagaagatttccggaactatctggcttcccttaatgctgcctatccttcttttatgaaaccatcagctgggtttagttttgagtcattggacaaggggcttaaagcagatggtccttcatcaaaggttcgtttgatccggaagaaattttcgaaaaagtgctcaagtaaagtgaattttcccccgtcgattcgtgacgacaagaagacttcatcccgttcttaccaagattcacaatctactggtagctctggaaagagtaccccagcaaggaggatgcaagataacatcccggaggaaactgatgtccaagttatctcacgttcttggagccatagcagtcatgcatcagatgtagattcagaagacaagtcttttgatgaaggaacattggcattgaacgtagtaatttctcgcctgctcctttga

SEQ ID NO: 159750 - DNA, 521 bp, Arabidopsis thaliana landsberg
gattgtgatgtataatataattattttcttaattcgcatctaaccagaaagctagagacattcgatgattatgtggatgatgcagacaatagcacacataatgtaacagctgataagctcaccaagcttgtgtccaccaaacggaagcccaaggtaacaacatatcacagatgtgaaacttagatatgtctttgttactttttacgctagtatttttcataatcttttcaccttatgttttggaagactatttctggagatgatgatttaccgcaaagagatgatattggagaacggcgtagaaagtttgagctcagagttttggctggagctggtgtgaagtcatcagagggagatggcaggaataaaaatggggcatttgcatcagatgatgaggatgataacgatggtgataacaatgacatggttgataatgatggtggatcagaagatgaattttacaaacaagtgaaacagaaacaacaagctaaacgagctgccaaagcagagataaattcaag

SEQ ID NO: 159751 - DNA, 233 bp, Arabidopsis thaliana landsberg
agagcgagtgaggattagccacaatgtatcttcctctcctctatcttctgcttctggcttcttgcttgacacatcaagctttaggccgtggtcgtggccggccatcaccggaaggaagcttggatccttcttctcgcatcaccgtagtcggagttgtctactgtgacacgtgttctatcaacactttctcaagacaaagctatttcttacaggtcagagcttttacatgaact

SEQ ID NO: 159752 - DNA, 577 bp, Arabidopsis thaliana landsberg
catttattaagtaatactcgatgcgatcatgtaacagattgcaagggagattcggctgagagatattggcggtatcattgtggtagatttcatcgacatggcagatgaatgtgagttagaatgtcatttttattcatccaatcacatattcaaatattctcgatgtgcaaatccctttcttgaatgatggatgtcctgtatactcttgttttttatttttgggtttcagcaaataagagactcgtttatgaagaggttaagaaagccgtggagagagataggtcactggtaaaagtatcagagctgtctagacacggacttatggagataacaagaaaaagggtatagtcccaacttgtggatgtttttctctttctgtagagcttctaattaattcttttggcatagcacgccccctcgatttatacttattgtagtgaatctatttttttcacaggttcggccgagtgtaacatttatgatcagtgaaccatgttcttgctgtcacgcaactggtagagtggaggcactggagactaccttttccaaaattgaacaagagatttgtcggcagctt

SEQ ID NO: 159753 - DNA, 443 bp, Arabidopsis thaliana landsberg
catagaagaagccagtcttcacatgctgccactagttcgcatacaagtcagagtagcaacttgagttctaattctgatgctcacaaacccaagaggaagagaaggcctaagaagaagaagctacaggtgagttttctctcgactctttcctggaattctgtttcgtacttttgttgaaagtcttattggtacatttgcatcaatctttcaaactctataactaaagaatctgcattttacaagctgattatatattattcgttttgctgtttcaggcgtgaacaaggtctctcccgccatgtctgagaaaacgaagaagctcgtaacacagttcatcaattccaaaagcttcactcattactacggcctgtctagtcttacatcttctgattggatctaatgcgtatatatatgttgccatgaaagcagagaggtaggtgtct

SEQ ID NO: 159754 - DNA, 555 bp, Arabidopsis thaliana landsberg
cttaaaaaggagttcacaagtgatgctgaatctgctgttgcttcccttagaggattgtcaggtaataaatcctctagccgagcggatctcacacttctcttccgagcagcggctcaggaagccaaagtttccagagcacagaaccgaattttcagggtggtaagttttactttgtgaaactacaatctcctctagccacagcctgaaaaataaacgatgttttactgattttgttcatgtcgccctgcagattctcatatactgtaggtcatctatgagaccaacccatgagtggcccttaaatcagaagctcttcacgttggatgttatgtacctgcacgacaagccaagtcctgataattgtcctcaagatgtctatgactctcttgtcgatgctgtagaacatgtttcagagtatgaaggttacatctttgagagcggtcaagggcttgcacggtctgttttcaagccgatgtcaatgttgttaactcatcctcaacaaagatgtgctcaagatgatcttgacatccccatgtctcttgcaaagaaagtgcc

SEQ ID NO: 159755 - DNA, 2521 bp, Arabidopsis thaliana landsberg
  unsure (1)..(2521): unsure at all n locations
atgcagtcgtcggagaatacttatgcacgatataggtcacagcagggagacccgttgcatgtcaattctcctgtcagtgctgggaatatttcaggggttcaaggttcacgccatccaccatcgcctccaacgccaaccactcagccttctgtcaatgattctgattctcaagctgagcgtctcaacaatctcacactggaggagcttcttgatagtcctggtcgtgctggcttgacaaggctagacccaaagcgtcctccgggaactctctggtaaggttaaattcattgtcctagaacagcttaggttgtagtgccttagaactttgtagtgccttggagcgtaatggaattaggttgtagtgccttaggttgtagtgccttggagcgtaatggaattaggttgtagtgccttaggttgtagtgccttagaagtttcaacaaatagaacagcttggttgtacttagcattgtgatgtcttagaagtataaagacatagaaatccttatgtgtgggctggttggtcttcttgtaggtttgacgatgaccctgcatttgcagcaacagtccgcagcatctttgaaagagatttcaaagaacctcatgccaattggtcacagacatcaaaggctacaatcgatcgatggtatgaaacgtttgtggtaagttttgtgctcttttgatgtttatgcttattttgtttgctttgtctgttttgtttgctttgctttgtctgttttgtagtctgatgtttgatgtttgctttgtctgttttgtagcaagtatataactgggaccgttcaattaacaaaagagtaagggttgagtttgaagcaaagctaaagtctaggatgtctgatcaagtgtcaaggtggaagggaaattggaaggagaagggtgatgaagccaagccaaaatggattgatcctgatgtgtggaaaggtctagtacagttttggcaagatccaaagtcagagaaaaaaagtaacaacagcagaaatgctagatatcatgatccggatggcaaaggcatctataaacaccgttcaggccagacctcttacaaagctcgtgcaaaaaaacgggtagataagtattcttctctccttaccattacttaaactacaatgttatgaatctaacttgtttatctctttgtgtttcagtgtgagaagactggagaaacaactcctgatttcctagagctgctagatgagacacacagaaaagcggatggaactttcatcgatgggaagtcagaggaaatttacaagcaagtgacatctaggattgaagaggaagagtctcatatgtgctcactggacaatccggagagcactggatcaggtgggttgacagttcatgccaaaaacaagatttttactgaggtaaatcttctgtgctttttctttgcagcttgttgtgttgtgtacttgtctgaattttgttgtgtacttgtctgaattatgttgtgtacttggcaacttgttgtgttgtgtacttgtctgaattctgttgtgtacttgtctgaattatgttgtgtacttggcagcttgttgtgttgtgtacttgtctgaattctgttgtgtacttgtctgaattatgttgtgtacttggcagcttaattctgntatgttgtgtacttgtaaacttgtctgattctgttgtgtatggtgtctgaaatgtttatgttgtgcgtctctagtttttggtataaggttctcgtcatcttggcagcttattcattatactttgtgtagtgttctgtttgaattgctttctattgtctgttttctcatgcgctttgtattgtgtacttgtgtctgattagctttgtcattttattggttatgtggttgtgttgtgtacttgatagtcccggttagctttgtcactctattggttctgttgttgtgttgtgtcttaattactttgtgtagttttgtgtctgaattaaaatattgtgtacttgtgtctgatttgccttgtcattctattggttgtctagttgtgtctgaattcttttgtattgttttgaacttgttttctcatagtttttctgttgtgtccttgagagtttttgtgatctttgcaggctgctccacgaaagaaaggaaggatttatggggttggttctctgcagtttgaagcatcctcagcccatagtggtccaacgcttcctagtgatgatcccggttatactttctcagaagctgcgtgccgctgaagcatgcattcaatctcaggctgagaggatcaatagctnnnnnnnnnnnnnnnnnnnnnnnnnnnnnnnngatcctgctttagctgcaattcttcgacgtggttcctcgacacagacaggacaggccaacgcaaatgctccacctgtggctactgctccagaacagcaggtggctaatgaggagacaacagttgctgccctagctaaccttgcaataggatcctctcctccatcaactgtattttgaaaacattgtcttgcttttttgccttgttatctctttctttagaacaa

SEQ ID NO: 159756 - DNA, 142 bp, Arabidopsis thaliana landsberg
atggcggacgaaaaggagatcgtcgatatttatagctcagatgaggaatacgacgaagacgatgatgatgatgatgataccgatggcgagagtagcgacgaagtcgatgaagaagaagatcggaatctgaggtatttgcgtt

SEQ ID NO: 159757 - DNA, 437 bp, Arabidopsis thaliana landsberg
ggatccaaaaagacgaagaaaaggtaaaaaagacaaatcaaagagagacgattcgatcgcatcaatggcagaagaaaagagcttcaagtatgtgatcgtcggaggtggtgtcgccgccgtaagtctctctctgttcttcttcttcatcggatttgttttttttcctcaatctcttcgcttacgaatcatcacactgtactactgctcatttgtatccttatcactctgagaagtagagtagattgtatcgctagatctagtgatttctatgattacgggaagataggaactagattcccaatttattgttgttttgggatgttgtgattcacagggatacgcggcgagagagttcttcacccaaggtgtcaagcctggtgaactagctatcataaccagggaacaagtaagttttcatgacttggaactagatttaa

SEQ ID NO: 159758 - DNA, 1297 bp, Arabidopsis thaliana landsberg
gtagtaacaatggagaagccaaagttcaagactgtccaagaggtggttgcagcaggcgaaggaataccggagagatacctccaaccaccagccgtcgacgacaatggtcaacatcttaacgctgccgtgccggtgatggatattccggccatcgatctgagtcttctcctctctccttctgatgacggtcgagaagagttgagtaaacttcactcggcactctctacatggggagttgttcaggtttgactctcttagtgataagcagagagtcatgaagttctgtataagttcttgtgaaatgagagtatttgatttcttatcgatgcaggtgataaatcatggaattacaaaagcgttgctcgacaagatttacaagctaaccaaggagttctgtgcacttccgtccgaagagaaacaaaagtacgcgagagagattggtagtatccaaggatatggtaacgatatgattctgtgggatgatcaagttcttgattggatcgaccgtttgtatatcactacttaccctgaagatcagagacaacttaagttctggcctgatgtccctgtcggattcaggtaaagcttattatacctttcagtttcaatagcatctacttaggtgattttgacagtcagtttattcagggaaactttacatgaatacacaatgaagcaacatctagtgtttaatcaagtctttaaagcgatggctatatcgttggaattggaagagaattgctttctagacatgtgtggagaaaatgctacgatggatacaagattcaacatgtatcctccatgtccgaggccggacaaggttattggcgttagaccgcacgctgataagtcggctttcactcttctcttgcctgacaaaaatgtcgaagggcttcagttccttaaagatgggaagtggtataaagctccagttgtcgcttcagatacaattctgatcaatgttggagatcagatggaggtaactaatatgcatatcattttgaaatatttgattggtgtagatttgacataaataatctctgttcttgtgtgttttaagataatgagcaatgggatatacaagagcccggttcatagagtggtgactaatacagaaaaagaaaggatatctgtggcaacgttttgcattccaggtgcagacaaagagattcagcctgttgatgggcttgtgtctgaggcaagaccaagattgtataagccagtaaaaaactatgtggacctcttaaacaagtactatatacagggtcgaagaccaattgcagcttcattgatctga

SEQ ID NO: 159759 - DNA, 1177 bp, Arabidopsis thaliana landsberg
gtatcgctaaacgacctttgttcatacatatgaacaaggatccttagtgtgctgactcatcatcgtgtttgttgcagatgactgaacccatcttaaaggcagctaggtatttgattggttcatgaattaaatcatttatgtaatgtcttagagctaatcttgttaggtgggtaatatttgttctacagtgggatatctactctactagctcgttcattcttcataggattttctgtgacatttttggcgctgcttgcacgtctccgagtattggtccaacaagtaaggctccaatcgatgatctaataaattacacactgtgattgatcttagtgtaaacgtagtctgcataatgtgcttgattttctcatcgttttggtttcagatattacttgacgctgtttcagttttcaattcggtgacatctacatcactgaagaaacagtctgtcaagatagcacaggacggggttgaggttggtctaagcttctttggtttagattttttacatagttcaatgaaaatgtcagcaaactctgttttctttattggaattaatacaggttttccgcgagttctatccaaaggaagaagagtgtgtcaccttattggattgtgtatggaagactgataaatatgtcttactcgagacattgcagaactctgagaatagtaaacctatggaaaaaaatgtctcagaagatgttactactagggactctttggtacagtatcaaacatctgtttcttctctcgcgggtaagaaccgtcacagacttactctttggttgttagttttggtccctagttcgaatgctggttatgtccctactacctagatcttgagagaacgactcatttggctcatacatgtctagaatcctgcctttagagtagaaaagggttcaaaggttgcacaatttggattttagatggctttgttggttaaaattgtcttaattgaaagatttaattgtcccatttccagaagatctctctcctttgcttcgagcagacaacagtggtgctactgtgagagaaagttcgactcccattgatgaagcagcttcgtccaagactaacattcggttgcaaccagaggattcagaaaacccagaagatgcgacaactagggactgttcggttcagtatgaaacgtttgtttctcctcttggag

SEQ ID NO: 159760 - DNA, 1131 bp, Arabidopsis thaliana landsberg
acattggaatgttatcaggttgggggcacgacggataacatcgaagagagctgtgctacatttgcctcacgtgcattggatttaccagaaccactgaaaacaacgcatcagattgataactgtacagaaggctggtactgtcctgtaaaagctttttcatgctttgaagtttgttaagttaacatcttttaagtgaccaggttaaattgctttctttctctacagtgtcgtctttgctagaacaaaagagtactgctcggtcttccacacaaaaataagagtgagtttgctttacaatgctgtttgactggaaacaggaacaagctgtgctgattagttaattttttcaatacgttttgttctttattcttattttcaagaataaagaagtgaagaaactatatcgtgctcttgctgcggcacctcttcccattggaattatctcacattatatgcgccccaaaaatatggctccaagactcgtagccgaaggtaaacactacagtaatgtcaagtatcatcatcagtgcagattttgtatattcgatgctatggatcttcttagtgatgtgaatatttcttgaaatgcagattcagttcagggctggcacttgtgtcaacttgaggttttagaatgtaagaagattccttggcccgatgcagctactgagaagaaacacgatattgaagactgtgcatggacttcaaaagagtttgcttatgagtgtacaataaaccttttaacaggcaagactcaccaggtatgttcatcgacccatatcctaatagacatgataatcatatgaatatgttgggatcatccagttgctatgttgaatggcttttcagatccgggcccagcttgcagcttgtggggcaccgttggttggtgactctatgtacatgccagcagcgattgcagaaatggggaatcctgataccaacccgtatgggaaagcaaagaaacattacacaatggaggagaaccaaaaggaaaccgctgttgccgaatggattgatagacatggcaaggaaccgagggtaggaatcggtcttcaagcttgtcaaatctcatgggacgatgatgatggcgagcacttctatgaagctgggactccgtggtggagatga

SEQ ID NO: 159761 - DNA, 285 bp, Arabidopsis thaliana landsberg
atactttctcaccaaggattttgacggaaacgaattccaaacacttcaccagcttttgatcaagcgaacagagaatgtcgtctgtcttgcggttgttggggcggagaatctgtaatccagcggcggagaaagtgcgtttgagcagtagcctaagcggtggtggagattttccaatcttaaatggacataaagcggctcaagacttatccaaagatactctaaaatcccaagacataacgaaagagaaagaaggtatgaataaagctaaaataaaatctgaataac

SEQ ID NO: 159762 - DNA, 407 bp, Arabidopsis thaliana landsberg
agacttcacactttcactttcattcgctttttcttctctattactgcaatcacttgttcacgataatggcggacctctcctctgtcgatgagttcctgaatcagtgcaaacaatccggcgacgcagcttatggcgccttgcgatcggtcttggagcggctcgaggatccgaatactcgatctaaggctcggatcttcttgtctgacatctacaaacgcgtcggatcttctgagacgtctctccaaacctaccattttcatatccaggacatctatctcgatcaatacgaaggtaacatcatcgatccgattctttgttgatcctctttcacgatccttgagaattgttctgtgattatttgtcaaatggatttgattcagctgattatactgatttggtgattccct

SEQ ID NO: 159763 - DNA, 1613 bp, Arabidopsis thaliana landsberg
gtcaaggctttggctctggaacaatcaatctcggcaaattacaagtcatcaaaatcacggattttgaatttatatggagatacagatccacagagaagaagaagaacatttcattttacaaaccaaagggattgttacctaaagacttccattgcttaggtcactactgtcagtctgattctcatcctttgagaggttatgtacttgcggcaagagatttagtggattcattagaacaggtagagaaacctgcattagtggaacctgttgattttactcttgtctggagctcaaatgattcagcagaaaatgaatgtagtagtaagagcgaatgcggttacttctggttaccgcagcctcctgaagggtatagatcgatcggttttgtggttacaaagacttccgtgaaacctgagttgaatgaagttagatgtgttagagctgatcttactgatatatgtgaaccccacaatgtcattgtcactgctgtttcagaatctttaggtgttcctttgtttatatggagaactcggccttcagaccgaggaatgtggggcaaaggtgtctctgcaggtactttcttcggcagaactcggcttgttgctgctagagaagatcttggtatcggtattgcttgtctaaagaatctagatttgagtttacatgcgatgccaaatgttgatcagattcaagctttgattcaacactatggtcctacactagtcttccatcctggtgaaacttacttaccttcttctgtttcgtggttcttcaaaaatggtgcagttctctgcgaaaagggaaatccaatcgaggaacctatcgatgaaaatggttcgaatttgcctcaaggaggaagcaatgacaagcagttttggattgatttgccgtgtgatgatcaacaaagagatttcgtcaagcgaggaaaccttgaaagctcgaaactttacattcatattaagcctgctcttggaggaacgttcacggatcttgtcttctggatcttctgtccatttaacggaccagcaaccttaaaactaggactcgtcgatatctcattgatcagtattggccaacacgtctgcgattgggaacatttcactctccgaatcagcaatttctctggtgagctttactcaatctacttgtctcaacacagtggcggcgagtggatcgaagcatacgaccttgaaatcattcccggaagcaacaaagccgttgtttactcttcaaaacatggtcacgcaagctttcctagggctgggacttacttacagggatcgacaatgcttgggattgggataagaaatgacactgcgcgtagtgaactcttggtagattcgagctcacggtacgagatcattgcagcggagtatctcagcggaaacagtgtgttggcagaaccgccgtggttgcagtacatgagagaatggggaccaaaggttgtgtacgattcaagagaggagatagagagattggtgaatcgatttccgaggacggttagggtttcgcttgccacagtgcttagaaaacttccggtggaattatccggcgacaagcgtcctacaggaccaaaggagaagaacaattggaatggcgatgaaagatgttga

SEQ ID NO: 159764 - DNA, 2165 bp, Arabidopsis thaliana landsberg
atggcgccttcttcgtcgagcggtctcacgttcaagctacatcctctggtgatgcttaacatatccgatcacttcactagggttaaaactcagcttaatcctcccgccgcttcttgcgccaccgggaatggctccaacaacgccgacgcgatgttactgcaaaaccctagggtttatggctgcgtcatcggtctccagagaggtcgtacggttgagatcttcaacagtttcgagctgatattcgatcctgctcttgatactctcgacagatccttcctcgagaagaagcaagaactctgtaagtttacttacactcgctcacttttgttgtcgattgtttgatactcttgctaatttgtgagttttgttattttttagataagaaggtgttccctgacttctacgtattgggatggtattctacgggaagtgacgctaccgaatctgatatgcatatccacaaagctgtgagtagtgtagctttaatgtttaatataaatttaattgaatttaggattctcattgtactgatttgttgaggttttcatctacagctgatggacattaatgaatctcctgtgtatgttcttttaaatcctgctatcaatcatgcacagaaggatcttcctgtgactatctacgaaagcggtaaaaattggttatttgcatcactgattgtcttattgttttatagattataatcttgctaatcctgtctttttgattgttttcaaaatttgaagaatttcatgtcattgatggaattcctcagtcgattttcgtgcataccagctacacaattgaggtatgtgtttaggccacttgatctgtaatctatctatgtgatatgagagtggactttcaataacattgcaatgattgtaaacgcgtgcagacagttgaagctgaaagaatatctgttgatcatgtggcacatcttaagccatctgatggaggctcagctgcgactcagtgtaagctttattatcacttcatatttatcataatctgttctttctttttcatctgcatggaattttaggttgattcctcgattttgtgcagtggctgctcatcttactggaatacatagtgccatcaagatgcttaatagcagaatcagagtgctataccagcatattgacgctatgcagaaaggtatattcttgctcaagtccccactctcggtccctcttcaatttgggaatcaagcttttgtgacctgtcccttgatcttagaatatttctatgtgttttcctacggggaagaaagaattaaaagggtgttagaagatgattttgagcaagagtaatgtggtactaatgacttatgtgattctgcatctaggtgataaaccttgtgagaactcagttctgagacaagtatctagtctgctcagaagtttgcctgccgcagaatcagagaagttcaatgaaaatttcttgatggtaagtagtaccttacctttttctagcaatgttggttaaataaagtggccttcgaatttcttaaattcttaatgtagcttgttgttgtgaatgatatctttataaatatgatgttctcttcttttgcaggagtacaacgacaaattgctgatgtcttacctagcaatgatcacgaattgtaccaggtatgtgctcgacacgctattccatttaactatttgaataaaagaatgatggacatgcatgcaaatcttttgcttgatacaatgcaatgttttacgataccaagacagatgaaatcaccagtacttggttgaggctgacattgagatagtttgttttatttagattaagaactaaatctaggaccttgctcaattatccttgttataattaagatactgagcctgtagtagctaagggaatataagcttctttttaaaaaaaaaatctaatcttgtgctacaccttgaccaatccatatgtcaatttcattccaacgaaatgtcctgaaagaatcctttgtatatttgatctcttactctcctttttccccccaaaatgcagcaacatgaacgaggtggttgacaaattcaacactgcatacgacaaacacagccgaagaggtggtaggactgcgttcatgtaaagattagtttcaatgtaaaaaaaccttttctttcttttggtggtctggtccctaagtgaaaatttag

SEQ ID NO: 159765 - DNA, 1822 bp, Arabidopsis thaliana landsberg
atagagaagctgaagatgctgcaacgaagaataaacagtttggtgtagatgaccttgactccttttttagcgctcggtccagcagtgtaccgaaatcacgtaccactactgaagtaagaagactttgaaatattactaagttccactttacaagttattacaataaagaaatgtgttttgtatgtgtatccttattcttctttctgatgcaagacaactcgcaagcaagcgtccaacgcaccaaaaaagacccctaatggggtttctaatgcaaagaagcctcctgctccagcaaatctggtggatgacttttctgcactttttggaggtaaatattgtaaaaacatttctattccagcaattggttacactggtttagcttactaggaaatgtttccttctctacagaggatcctatatttagacaatttgaggaaatcccaggggaaagcgaagaacgaagaaaggccagatgggatcgtgaacagagaacaaagagtcgtgtggtatgtttggttatgcttgttttctttgaatcttctagtacaatccttgtgcttgaaaatatcgcttcatattcaaaagtttacttaagttccctggagaatctgttgaatcagttgaaacatatttccaacgtcaggtctttccatatttgatttagttgtcctgtttgcacatcaaaattggtgactcataactgactggcatactgcaaccagtttctagtttaagttttacaatgctcatcaatgttttagcttgatcttgattgtataatttggtttgacatgatttttcactattcaatcccttttaacatgtaggctcaagctgtagctgatatgaataaccgtgatcatcaatctcggattgaacaagaacagagaactgtgagtaatgtttttcttgatatctacgttttaatctacactatcataaaacttggttatgaacaatgaactttatgtatttgttagtcttcgtgacgataatactgtttttgacatctacatttcctatcgtggtttacatatagtcagtctccttgttgttgtgtttaaacacaaatgatggtttcttgttaatcttgctttccagaggatttctgagactgttgatactgagataaggcgttgggcaactggaaaagaaggaaacatgcgtgcgctgttatcttccttgcacatcgtgagttttgaataataaaaaattggagtttaatgttcttttacatctgtctatccatgtgatcctcctaagttcactctgagttctggttcggatgacaggtactctggcccggatgtggttgggaggctgtttccataacagatttgatcacttcgtcagcagtcaagaaagtctatagaaaggcaacactgtatgtccatcccgataaagttcagcagaaaggagccacccttgaacaaaagtatatcgccgaaaaggtttttgacattttgaaggtatttcctcaatggatcttcatgagtagctccctttctaaaagcctatgtagacgaaagttgacttgatggtttagttccctccaaatcgatcagtagagtttcatggaaacgatgtttgatttagtaggttggatgttactctgtattagtaatttgaaggcctccggtttagtttcttgtctcttgcatagatccgctaacctgacctcgtaactgatttgccttgtacaggaagcttggaacaagttcaacaaggaggagctctcttaagcccatatactgtgaatatagttgctctctgtacaactataattcgtctgtgagtttcctcgagtcttttcttgttttta

SEQ ID NO: 159766 - DNA, 529 bp, Arabidopsis thaliana landsberg
aacaccaccagataagtaaaggaagaagagacgcaaggagaggaaactagtattgttggtttcaaggttttgttttggtttagggaaaatgaaaaagagagggatgagaataggaaacgcagcgttttggatcagagcttgcgtccatgttcctttatattgtagatcttggtcatactcttctcgacggtcttgcttcatttggacatagaagaagttcaagagaagcatgacgagagaatctccgagtaagactaagaaaagacataaagaaacagagatccaccattttctttgttttagctccaacgatcttcttggactcaagatttggtctggttctggattctgaacgtgttctgattcttctggttgttaaagaaaatatttagtttttattttgttttcgagtacagaaacaatattataaaacttatgataagaatttgaaataattaccatgtcttgttgtctgtttggaagctttggacatctccattagttttctctggtacctctggaagtctga

SEQ ID NO: 159767 - DNA, 252 bp, Arabidopsis thaliana landsberg
tgtgatgcaaacagatgagatgtgatcggaagccactaagtcaagtcaagcaatagcaggttttggagtttttagcagtcctaagtgaacatgcagaaaatagaaattcaaacagaattacacaaaacactcggccacaactggttgaagccagtagcagggactggtccagtaactggtcgagtaacagacagtaattataacaactataatcgaccgcacaatctactgccacacattgggtgtggtcga

SEQ ID NO: 159768 - DNA, 452 bp, Arabidopsis thaliana landsberg
atgagtgaagaaatatttggccctctccttccaatcctcacggtaggaactatttttcattctatgtaagctctgcttcatctcttgaaggcaaattttaactctcttttgttattttcagcttaacaacttgaaagagagctttgacgtgattcgttctcgacataagccacttgcggcatacttgtttacacataacaagaagttgaaagagagattcgcagcgacagtctccgctggaggcatagtagtcaatgacatagctgttcatgtaagaaaggcactagctaaaatacattgcactagtagcattttatcattacacaaaagcgttatcatcatccgatattttgcagcttgcacttcacacattgaaattcaaaggagttggtgaaagtggaatgggtgcttaccatggtaaattctcatttgatgcttttagtcacaagaag

SEQ ID NO: 159769 - DNA, 160 bp, Arabidopsis thaliana landsberg
gattctggggattctgccttctaggtgtctgacacatcgttttcatggactgatttgcaagcaaaactgaatggcgagttgctgagcaacctaggcaactttgttaatcgagttctgagttttatagcaaagcctgataatgcaggttggttatatttct

SEQ ID NO: 159770 - DNA, 177 bp, Arabidopsis thaliana landsberg
cgttttacagaggcgaaggacattaaatgtgtgggtgaggatgatgtcccaaatacatcggaggattacatccataggatagctcgaacccgtcggtcaggagctaaaggaatgggctttacattctttacacatgacaacgttaaccatgcgagagagcttgggaatactccttaa

SEQ ID NO: 159771 - DNA, 1879 bp, Arabidopsis thaliana landsberg
tgtgatgctaacaatcaagatgtgatcagaagtcactaagtcaagccaagcaataacaggttttggtgtgttctatcagttcattatgaacatgccgaaaacagaaattcaagcagaaacaataaaacactcgaccaacacagctctttgcagagcactaggtgaggtcgagtgacaggtcgagtaaatagacagaaaataaaacacagatactcgactgcacagtctgttgccagacaacttggtggtcgagtatgaggtcgagtaacaagaaagaattgcagaaattaagcaacagataacaagatgcagtaaacaacagtagagtaaacaaagaatttaatcagatacagaattccctaggatggggtaatcgagtagtttcgttttctcagtttataggtgattgacatgctcaataaattaacactagacaacaagttcattaaccaaatctaagtgcccccgcaatagagactctcaagttaacctagtcccagactcaatcaccattgacgagagctaacctaccaggcattacgaatcaacaagttaaagccaaaacgctccctgcaaccaataccttggtacttgtccacgaatctttggaattagtggttcagacattacatcgaacaccttttggacgcagaaatgtctgggctcaaattccagttgctctgaaagcaataggtattaagaacaactaatctagaagggatctatcaatcaaactcaaccacctagcatactgagaattctatactattctaacccatcctcagaaacctattcactacccagacatcattgtagaaaacataaacgttgaacaaaataaaaacatgataacaacagtgtaatagcaagatgataacaggatgaataacagtaaacaaaatcaagaacaaatactgaatactgaatactgaatagataaagagaaatccggattacaaaaggttaagaacacagtgtctacggaataaaacttagataaaaacttctggtcgaaaatgtaaagtacatgctacttataacaaaatattctgaaaccctaatactcaaaacgacgcagtattgggacggattaagaactatactttacccaggtaatcgagtgagtggtcgagtgattagctggagtcttcttttcttccttgtgctccagtgtctggttgagtgcggaatggagaagactctgaagctggcaatcgagtatgtagtcgagtgatggtgatggtgatactcaacctcttggtagagtggtatgatcgagtgatggtcaggtggtggaggtgatgatactcgacttggtggtcgagtgaagtgatcgagtgactctcatggtggtactcgactagggggtcgagtggtgtcttgaggtcgtgaagcatctactcggccaaggggtcgagtggtttgacatgatcaggtccgcttcttccaattagctcgtcaacaactccaaatcacctgaaaacaacacaaatatgcaacatgcatgcaaaactatcctaaacatgcaaagtgatgagaaatgataagaaatggtataaaacagtggtgatatgatgcaatagtgataataaatggatgcttaaaacatgtaaaatgcacacttatcaactcccccaagctgtgttggcaaagacgccaaattgataataggtttttagtcaattaaacttaaagcactatcatgtcgttgtagtattttaggttgtcaatccaaatgggtgtgatgctaacaatcaagatgcaatcagagttcacagagtcaagccaagcaataacaggttttggagtttctagcagtcctaagtgaacatgcaggaaactgaaattcaagcagaaacagtaaaacactcgaccaaca

SEQ ID NO: 159772 - DNA, 1246 bp, Arabidopsis thaliana landsberg
tggttttttttccccttctacgtcccttttattgttctggtttacatatagcagatagtctctctataatttgcgtaagtcactgtttctttgtgaatcaatcctttcatgttacccgtgctttggccatttgcaaagatgttaagctttataactgccaactgcggtggatagttttaccgtatgatgactatgcattcatccaggcttgtagcattctatcagtaatcaatcataacttctgaacccttaaacgtgcccctaaagttgtgtcttgcatgcggtaatgccttgctggctgaattacccgtattatgataaatcttggtttgcattgaaatgtactatgttcgtcattattttgatacttattcatattttgtatcttcaaaaggtgtagaacagtatacaacctgtaggcatttgtatcagttaagtgttaagtatattgattttctttggtagtgctgttccgtgaaaattttagtataatatttcactttctatatgtagttatctaccagtcctgttttctctattattatatcttttatttgtttatttggtctagtgtctgatggttcattgattttttctttgtagtattctcacatcagaattcatgcgtatctccatacatgatactggggagatagatgtactgattttatctgcagcaaaaatacggggatccatttcatctaacgggaagaccggtgaagaagtaagtctcatccgatacaattgtatatattttaatgaatatgggcgcttctttttgtactatgtggagctcgattgtttgtgtaaactggatagaagatcctaaattgtgagaagtggtagattatcagaaaaagaactggaacaccagcatgactctgaatactgggcttacacctttgcaggttaagttagaagaagaggatacctctaccttatgtgatcggcttcttcctttagttattggattgctaagaacggtgagtgaccagacctgattatttgtctaacatatgctatcactgaagttgacaatactttcttgttttaatttcttcgtttatgctattcctgttctttattgttggttcatagtgctcattcagggtatagtctgaattcagttctcatgtattgtctttaactgttttcataggcaaagttcccttcaattttgaggatgtatcgtgatacactcacatctgaaatgaaaaatgcaatcaagaaagcagttgctgagctg

SEQ ID NO: 159773 - DNA, 860 bp, Arabidopsis thaliana landsberg
agggtacttaatgaagaaaagtgcaaaaacaaatgggtggagtaggcgatggtttgttctgaatgagaaaactggaaaggtcagcattttgaaacgtatattcttcagttgttgagaacttactgactttactgtttacctttttctagcttggctataccaaaaagcaagaagaaagaaactttcggggcacgataactttggaggtaccattctcttcctatgctttattttctgccaaaggtgaactataattagatatgacatggaaaaaagaattagagaagaatatagttcgtattcaccttgttattttctcccacactgtttccttcttggagagtgacaattacttgtgtattttgaagcttatgcttcaaatatttaatagttctgttattatcgatgagaaatttggatactctatagataacattttttccatgtttttctaattatacttcctccaactttattaatccactcaggaatgcactattgaagaaatccccgaggacgaagtagaaaagtcaaagagctcgaaggacaagaaggcaaatggacctgattcaaaaggaccaggccttgtgtttaaaataacctgcaaggttccctataagactgtactcaaaggtacataaatcaatcattataagaattcaaacttcttaatcttctattcgcacttttatgagttttcctcaaactattatgttgcagctcacaatgcccttgtgcttaaggctgagagtgtagtcgacaagaacgagtggattaataagttgcaaaaggttatccaggctcgtggaggccaagtgggcagtgtttccatgaggcagagtctttcagaaggttcactt

SEQ ID NO: 159774 - DNA, 1538 bp, Arabidopsis thaliana landsberg
gagtgtggttggaaagggtggggagagatatcttatggaggaaatggttctatacaacgtgctaaagcttcagagtttctggtgcgcctatgattaatatgtctatgatgtagtagcattttttggccccatcgtcgcttgaaatgactccttatggtgccttaaattggagttcatttcttatcaagtgtatgtacgtattttacttgtgttttttccttctttctttcaggttcgatcttggatggaagaaaccattcctggtgttaaccattgtattctttcttatgtgattggggttgatagcttgaaggcgacaagcaacggcactgaatcttggcagtcatgtggagatattagattacgtatggatggtctttttaaactgaaggaacatgcggtccagttaacaaaagagtttactgctctatatacaaacggaccagctggtggtggtggaattaggtaatttcttcacgttgatgttcgctccatatatcaatccaatgctaattgtagctttacagtagtaccaaatcctgttgagttgagacatcttatgactagggacaatgtattgaaactagttatttgttatgagattcgggatggtctttttggtttgacaaaactgcttgtaaattatatgcagtaccggacacaagatggaaattgttcttgaaaagcgtttggtaggtcgtctccatcaaaaaatttaaactaatatagccttgcatcaatcaattttacggattctgatgttatatgtttggttatccaggtcagccgtgaatctgtaatgtggaaaactggacttcagcacaccaacacttcagagccagagacctctgaacatcattctccagagaaaatgccaaaggttagctcgagagttcttactaaactaattgtgatgactgatagataatggaaataaacatgacctgaattcaaattccttggtgaatcaatcctagtgtgttcgaacatcaaactaactctgatgactgatagatatgttttactatttgaaagctgaaaaatgtgaaagaactctaacatgtgcatttgtattaacaccttgttattacttccatttgtagttacctaaggaaaatccaaagaaccttacaatgagaggctatcaatctggatttcatcactctcctgctccatctggccaaaagatcccactctactctgttgcacatagccgggctggcgataaaggaaacgacataaacttctcaataatcccgcattattccccagatgtccagcgtctgaaactcataattactcctcaatgggtaaagcatgtgatgtcagttctgttatcaacctcttcgtttctggaattggatgcaaaaccaatggatgaaaatgtgtcagtagagatatatgacgttgaaggcattcatgctatgaatgttgtcgtacggaacatattagatggtggagtcaactgttccaggaggatcgaccgacacggaaagacaatctcagatctcatcttgtgtcaacaagttgtgttgtaa

SEQ ID NO: 159775 - DNA, 606 bp, Arabidopsis thaliana landsberg; identical to SEQ ID NO: 45614

SEQ ID NO: 159776 - DNA, 267 bp, Arabidopsis thaliana landsberg; identical to SEQ ID NO: 57420
  unsure (1)..(267): unsure at all n locations

SEQ ID NO: 159777 - DNA, 385 bp, Arabidopsis thaliana landsberg
ggcacttgtctgtgaagaaaagcaaaatgctattaaatgttaagttgtatccagaggtatcaaacctaaccagagaaaatccaccggttgcttcctttgctcttcgtgttgtctcttctactggtgagagaaaggctctatctcatccaggtagagaagatctcttgactcaatagtttgattatggtttacttttgtttctgttccacaaaagatgaatctttcagaatgctgacactgtttctttaatgattactcgaatgcagaagtaatagataagcggattaagacaaacgaagattttatttggactattgaagttcccttaactgggaaaatcatcatcgacgtcgagtttcttgacttgaaggttttgtctcaagat

SEQ ID NO: 159778 - DNA, 1047 bp, Arabidopsis thaliana landsberg
atggccgtcgagaaatcgaacacgacggtgggaggtgttgaaatactgaagccacgtacggataacagagaatatcggatgattgtccttaagaacttgctccaggtcctgttgatcagcgatcccgataccgataaggtttgagatcgctacgatttggtttctgatattgattcctttgattttggattatcgcttactgattcgtaaagtttgattcttttcttcaagtgtgctgcttcaatgagcgttagtgttggatccttctctgacccacagggattagaaggccttgctcatttccttggtacgttgaattcttcaggattttggaatttgccatggaatgattcaaccagtgtgctatatttcattgattaaagcgagtttcaatatggagtggctttgttataacgttgtactattgttttttggttgttagagcatatgctattttatgcaagtgagaagtatccggaggaagatagttactccaagtatatcacagaggtaatatatattcttacactctcctcgaatatgaactcaagtatactcgaagttgttcttgataccactcgatagaaaattttgaagaatatggaatttttttggtgtagcatggaggcagtacaaatgcttatacagcctctgaagagacaaattaccatttcgatgttaatgctgactgtttcgatgaggctctggacaggtacagttggtgttttcgtactcttgctaactaatcttctctaatcttttaccatttttttgcctgtgtaagattttattttgctgcttttaaatcagatttgctcagttctttatcaaaccactaatgtcagctgatgctactatgagagagattaaggctgttgactcacgttcgctcgcttttgttttccttacgtttttcttgctgcagattgtgagctataaacaggttataacgagttttcttttatccagagaatcaggaaaacttactctcacatggttggcgaatccgacaggtatagctataatcaaaagaacaattatcagagt

SEQ ID NO: 159779 - DNA, 1063 bp, Arabidopsis thaliana landsberg
catgatcatgttattttcgtttgtttattgatcagctaacagagcaaacgttgtcaaagaaagagaaaggtacactctgttataatttgcgcatgaacatatatgaacatttctatgatacattgtgatctagacataagtattttttgcctgatattctcattttggttttatgttttattgcaaaacagaagaggctgttcgaagagcaaatgctttggagaaggatgatttatattccttaaggtaatgaaccttttccttctttatttgtttgtgatgatcgctttttaacagtgattttaggtaattaagtttagttacctagcatgatttacaagaacagtagtcaataatgtacctgggtgttttatgttaaaatcccaccgttaaaatactatatgatgttccagttaccaatttttgactatgtcaatcatctccttgttaagtactcttgagggtgttcttacttgttgaaataatctctttggaggctattttgtgctgtccatgttattgatcatcttttggtgggtctgatacaggaaagtctcgagacaagaatacttaaagaagagagaacaaaagaaactggatgaactaaggtacatgacataaagatttttgcagttttctatcttttatggatctatcttctataattgatttctcccatttttattcttttctccatagggatgagatagaagatgaacaatatcttttcggaggtgaaaagctcacagaaacggagcttcgtgagtttaggtaattgttacatctttcttgtatcaaggcggttgttgccattgccaacatctatttgatgcagcatgcttcttttgatgaggaataaacattttcaattgtatatgaatagtgcatttttaaaaaatttatttttgcaattgaaaagttagatggttgtattcatatttaagaaagtatgtttagttatagttgattgagcttgggttgatctgttatctttgataggtacaagaaagagctttatgacctcgtgaagaaaagaacacaagatgaagataacgtcgaggag

SEQ ID NO: 159780 - DNA, 419 bp, Arabidopsis thaliana landsberg
attgtgagcctcttattgaattttacagtatgtaaaatgtgtatttgctgtagagaatttcccaacgtctgttatcccctgtgtcgtggtaaggccattgattcggtatgaagaatcgctcatgcagcaccaagtcaaggtatgtatatatgtgactttaaataagcaaaaccagatcattgttagccttttgagttttgactgagctgatatgcgtaattcggattcatatacgttttggttttgtttcattttaggatatagttgttggggagacttgctctgagctccggcatcaattggatataaattatcctgtccacaatggtattgtgcacaattggcatgatatggaacatgtatgggatcatgctttctataacgaattgaaagtaagtttcttctcctgcttcttcttg

SEQ ID NO: 159781 - DNA, 312 bp, Arabidopsis thaliana landsberg
aagtgacacatccactgcagagtcaggatctgcgtcgaagatatcggttctccaaaggctataaaggatttctctcatctccgcttgacacctgttcgtgaggaggtaacttttttctctttctttctatcttctagttggggaagtagtagatgtttatcctgaggctctgcaggctaagatagctggtgcaacaagcttggctggtagctgtccgggttatgacgagtatgtacctatggtggacatatgccgtgactccacctggcaggtgaacccttcatccagagagtcgcctcaagagggtagtta

SEQ ID NO: 159782 - DNA, 1655 bp, Arabidopsis thaliana landsberg
aaattcttgttgattctcccatagatgacagtagatcatcgggttaatatgttatgcagaattgaaggctcttattctagttggaggattcggaaccagattgaggccacttaccttgagcatgcctaaaccacttgttgattttggaaacaaacccatgattttgcatcaggtaggttagcttcttcttcttcttttgtatttgctcaagttttcacagtttcttttgttctcattatgatgcattcgcagattgaagctctaaaaggtgctggagtgactgaagttgtattagctatcaatcaccaacaaccagaggtacatacattcattgtccttaataacgatacgataacaattgaaattcttccgtgtcatcctccttctccttgtgtgtttggtattacccaggtcatgttgaactttgtgaaagaatatgagaagaagctagagattaagattacattttcccaagaaactgaaccgcttggaacagcagggcctctcgcgctggctcgggataagctggtcgatgaatcaggccaacccttttttgtactaaacagcgatgttatctgtgaatacccattgcttgagatgatcgagtttcacaagactaaccgtgctgaagcatcaatcatggtgaccgaggtagtcaaacaggagcattttctgcattttgtgaagtttatctttcatctgttaatagcattttctgatattaacaggttgatgatccttctaagtatggtgtggtggttacagaggaaggtacagcgagagttgaaagttttgtcgagaaaccgaaacattttgtggggaacaagatcaacgctgggatatacctcttgagcccatctgttcttgacaggattgagctgagaaggacttcaatcgaaaaagagactttccctaagattgcagcagcgcaagggctctatgctatggtgctaccagggttttggatggacattgggcaaccccgtgactacataacgggtttgagactctacttagactcccttaggaagaaatctcctgccaaattaaccagtgggccacacatagttgggaatgttcttgttgacgaaaccgctacaattggggaaggatgtttgattggaccagacgttgccattggtccaggctgcattgttgagtcaggagtcagactctcccgatgcacggtcatgcgtggagtccgcatcaagaagcatgcgtgtatctcgagcagtatcatcgggtggcactcaacggttggtcaatgggccaggatcgagaacatgacgatcctcggtgaggatgttcatgtgagcgatgagatctatagcaatggaggagttgttttgccacacaaggagatcaaatcaaacatcttgaagccagagatagtgatgtgaaaatgagatattatatgtgcaactttttttttttttttttgtgtcctttcttcaactttgaaatcgctttcgtaattcttaatggcttttgaataatcatttaatcaaaacgctgtatatcttgttagggtcgtttgctgttttgtctctttttttgttttgtaatttataaaaaaaattattctcattttatgtgagatacttttgaatattcattaattataaagctttttttttgtgaagtaacattcaaaa

SEQ ID NO: 159783 - DNA, 2529 bp, Arabidopsis thaliana landsberg
gtccccaccttctgagtccccgctttcaaacctcacctccagcttgttcttaagcaaagactaagtttgggggagttgataagtgtgtattttgcatgttttgagcatccatttgtcatcactttagcatcatatcatcactgcttataccatttcttatcatttgtaatcactttgcatgtttaggatagttttgcatgcatgttgcatatttgtgttgatttcaggtgatttggaactgttgacgagctaattggaagaagcggacatgatcatgtcaaaccactcgactccgaggtcgagtagaagcttcaagacctcaacagaccacttgaccccctggtcgagtagatgaacccatcatatcacatcaccactcgaccccttggtctagtaccaccatcaccttcactcgatctcccactcgattacatggtcgagtcccttcatcatcgcacactcgaccaatcactctaccacaaagtcgagtaccaccatcttccaccactcgacatcatactcgactgccagcttcagagtcttctccattacgcactcaactaaacaatcaagcacaaggaagagaagaagactccaaccaatcactcgaccaactgggtcgagtgccgttcttaaatccgtcccaatactgtgtcgttttgagcattagggtttgggaatattttgctataagtagcttctactttacattttttggaaaaaggtttctttccgcatacactgtgtgttcttgacattttgtaatcacgacttctcttagtctattcagtatttgcttttcattcagtaagttgttcttcctattatcatttcgctattactctgttgctatcatgttttcattcttatcatcgtttatgctttctacaatgatgtgtgagtagtgactaggtttcttaggatgtgttagagtagttagaatcctcagtatactaggtggttgagtttgatttatagatcccttatggattagttgttcttaatgcctattgctttctaatcaactgaaatttgagcccagacatttctgcacccaaaaggtgttagatgaaatgtctgaacccctaattctagagatcgtggttctgtaccaaggtattggttacagggagcgttttggctttaacttgttgattcgtaatgcatgttaggttagctctcgtcaatggtgattgagtctgggactggtttaacttgagggtctctgttgcggtggcacttagatttggttatcgaacttattgtctggggataatttattgagcatgtcaatcacctgtaaactgaagaaacgaaactactcaataaccccatcctcagaaattctttatctaattgatttctttgtttattctgctgttgtttactgcatcttgttacatattgcttagtttttgcatttttcctgttcctcgacctgatactcgaccacccagttttctgacaacagactgtgcagttgagtatccttgttacattttctgtctattagtcgacctatcactcgaccccccccccagggcttggcaacaagctgtgttggttgagtgtttgactgtatctgcgtgaacttctgtagcatgcatgttcacttaggactactagaaactctcagccctgttgttgcttggcgtgactatgtgaactctgacggcctctggattgttagcctcacactcagatcgattgtctacctcaaatactacaacgacatgatactgctttaggtttcattgactaaaaacctattatcacctttgaggtcacaccaccaccaccacctcccatccctacaaatgatcaaatcatgggagacctaagagatgttactcttcaatatgtgagttgtgcagacccaactgaaagtgctgcaagaaaacgcagagtcattcaagaggctgttggacctagtagaactattaaagccaagcaaaagctgaatctccaacctggagtgtcaaatccctccacaaacttacgtagtccaacagttaatatcataccagcaagagtgaaagacaaggtggattttcaccatccaccaaatcagattccttaaaagtattgagctggaactgttgtgggttggggagccccacaataggccagcggctgcgtgagatgcactctaaaatctcaccacaatcatgttccttatggaaaccaagaatactaatgactcgactcacctctttaaactagatgaactactttgcacatcatcttgttccccctcatagtctaggaggcggtgacctagcccttctctggaaacaggaagtggaagtgaagattctatctacctacaataaccttattgacacacatataaaggatgccggaaaatttttctatgttactttcatatatggtgaaccagataaagcaaagcggaaagccatttgggaactgctcaccaatttaggcaaatatagaagtgatccctgataccgcactggcgatttcaatggcatcattgattcctctgaaaagcaaggaggcgttgcc

SEQ ID NO: 159784 - DNA, 2591 bp, Arabidopsis thaliana landsberg
ataaaagaacttaataaaggtttaaatgccgtaaattctgcatgtgaggaggtaagatatttgcaatacttaaaactcaataatttacgcagcccatttgcgtttatctttcttagacattttctccttattgcttgtttatcagatacgtacttcacaaaagctaaaagagattatgaaaattattctctgcctggggaacatattgaaccaaggaactgccaggggtgagtattataattattttcttacccaaatattttttttctgtagcttaagacataacacaataaaatttctctgttcaatgtgggctaagttcaagaatggcgcctttgtttcattacatcataaatacttgttttgtatgaacgcaaatcctttgtggttgataaagaccctttgctctgctttctgcaggcagtgcagtgggattcaagttggacagtttattgaatttaagcgaaaaatgttctgctaacaccaacatgactctcatgcattatctttgcaaggtaaatttcaatcaaaagaagtagaatctatttatactgaaacccctcatctttctttttctcaggtccttgcttccaaggcatcagatctactggacttccataaggatcttgaaaatctcgaatcagcttcaaaggtttgcatttgtacgtactttttatccgttcttagctgtaattggctcatcatttgattgtcctgttgattcagatacatttgaagtcgttggctgaggaaatggtagctataaccaaaggactccaaaaactgaaccaggagcttaccgcatccgaaagtgacggtcctatttctgaagttttccgtaaagtatgttgttgtttttcaatcttatccatcttttatcaatcatgaatttgagattaggtctatcactttgccacattactaaatctgcttccatcattttgtaaaatcaatgacagctagaaatagttcttcagctaagtgtgttttttcctacataacttcttccggacgctaaaatctagttttatgttcttcgacagttattgaaggacttcatatccgttgctgaaactcaagtagctactgtatcgagtctttactcctcagtggtaattgttgtcaacctctgctagattccaagttccttacatttaaaaatgtgtttgctcctgacattaattacacccgtgtgagaatcctatgaaggtggaccacagggaggaaacactgatgcacttggacactattttggcgaggatccgaacgattatccatttgaacaacgtatggcgtaaaatatataaacttcaatcttcttaggaaatacatagaaagaaaaaaaattccctatttgttatttaagttggaattgttttgtagctaacaataattacttgatggattgctgcagttactatgactctctttaactttataaagttgtttaagaaagcacacgaagagaatgttaaacaagctgacttggagaagaagaaagccatgaagcaggtgaaaggagtctctgtctcacaagaaaagtggttcaatatataatagatgacccataaactttaaatatttcactctgtttgatggacggtttttctactgggttccagattgaccttaggagagccaatgacacggaaattatgcttactaaagtaaacattccgctggctgatatgatggtaattaagctcctaaacctactttactggttgatgttttatagttttaatgataattgttcacattattctttgcatcatccaggctgcagtactaggaatggatgagtctgtactagatgttgatcaaatagagaatcttataaggttttgcccaacaaaggaggagatggagcttcttaaggttacctcttgcctttttgagtagcattatctacttcttaaggttgttacttgacacgagtccttattcttggtcgtaattgactggtttgttgtagaactatactggtgacaaggcaaccttgggaaagtgtgagcaggtctgtttttaagtcttatcacactctttttattccccactatgatatagttgtaacaaattgcttagttagctaaagctaaagctccactgaaagagcatttccgggtgattaatgcgtttccttcactcacaccgcagtacttcctagaggtaatgaaggtgccaggagtagaatcaaagctgagagcattttccttcaagattcaatttggcactcaggtctggtggtattattacctataatgttattttctgtctatctggttctttggagaaaatatttttggtttcatcagtaactgtagattcttgatccctttttttataatgatgattactttgcagatagcagaactcaataaaggtttaaatgcggttaattctgcatgtgaggaggtaagatattttcaataattatctctaaagttttaatttgtgcagtccatctttcttagactttttctcttcattaatttcttttgttcatcaggtccgtacttcagaaaagctaaaagagattatggcaaatatcctctgcatggggaacatattgaaccaaggaactgcggagg

SEQ ID NO: 159785 - DNA, 183 bp, Arabidopsis thaliana landsberg
ccctacttaggagtctacatatctgatgaatttctttgttctgcagttaactgctgtgcaactaattgattcccatctatgttgtgatcccgggaactacgtaagttcgctacttctctccttatccacaatgcttcacatggaactcccacatgtcaatgtattgtctaaaatcgatctgat

SEQ ID NO: 159786 - DNA, 183 bp, Arabidopsis thaliana landsberg
tctgtaaaacaccgaggcttatagattcacatatttaatttacatttattgcagtttggacacattcccttatgctggaactaccactacctgtgagtctctctacatgggagttccatgtgttacaatggctggctcagtacatgctcataatgttggtgtcagtcttctcactaaagttgg

SEQ ID NO: 159787 - DNA, 603 bp, Arabidopsis thaliana landsberg
ttcttagtggtaactattggtttcaggtccatgctgttgagagaactccttccatgagcgagttgagtgagattattctcagtcaggtacttgcctgatgtggagtgtagatgtaaaaattgatctttctactggattaaattttgtgatattggaaaaatattggggattaatcattgtgtcaactttgattcacaaagctaaaattcatatacgataacatacactaattttaaaaccggtgatactaactttgcaggaacatcttagaccaagtgacctttcatttgtatttaggttacaggtaagcatcattgtggccaaactatctcttttgcttaaaacctttattacattgtagcttctctatttggatgagtcatttctgtgatatttttctcaggttgctgataattctactttgtatggatgctgcttactagtggaagaaatagtgaacaaaccgtccagattgctttccacggttttggacaaacaacctgcttgctcatcattaagtcgctatgttatgacaactcgcagatgctattgcgtccttaccagactgccgttttttgaattgcattttggtgtattaaatag

SEQ ID NO: 159788 - DNA, 622 bp, Arabidopsis thaliana landsberg
agtatcgatgtccagaggttgttcttggctcaaaatactcaacttctgcagatatgtggtcctttgcttgtatttgtttcgaagctggccaccggagatgtcttgttcgatcctcacagtggtgaaaattatgaccgggatgaggtatgttcatatatattcactttctttgccagtttggtatgaagagctaagttgtatcactattatgtgcagtcttgaactggttgcctttgtttcaggatcacctggcattgatgatggagcttctagggatgatgccacgaaaggtaaagctgataaacatagtcgttgtgttgtgaccatataagattgcatgatatatctctagtatcgaatcctttctaaagttggatcttagttgttttggttgcatatgactgcaaatcttgatggttgaaactcagaaaatagtagagcctaattttgtattgatgagcttcatttgttttcaaccgtagattgcattaggtggtcgatactcacgagatttcttcaaccgacaaggtgagctaaggcacatccggcggttgcggttttggcccatcagcaaagtcttgaaggagaaatatgatttcagcgagcaggacgcaaaagacat

SEQ ID NO: 159789 - DNA, 283 bp, Arabidopsis thaliana landsberg
atctccttgtattaagaatcttattttgaatttttgtgaaagcgttactcgttaaataatcaacaaactcgttgactctgcaaaaccgtcatgcatgtgctaagttccaagtaagtgtctatagctttctgctccaacaacaaaaagaaaaagaaaaacatcatccagtgtttgatccatttcttgaatcttgtaaaagggttatgttcttttgatctctctgtaacaatttcgaaaatggcggatatatacgagcaccaagttcctgagaagcttcgcgtga

SEQ ID NO: 159790 - DNA, 2284 bp, Arabidopsis thaliana landsberg
gaaggaagaagagttcacgttatagaaagagacttaacggagcctgatcgaattgtcggtgaattacttcagcctggtggttacttgaagttaatcgaactcgggcttgaaggttagaccaaatcaactaataaagataataacttttgttggattagtaaatctgacttgtgtgtattgatttggttactacttggttattgtagattgtgtgaaggatatagatgcgcagagagttcttggttatgctctctttaaagatgggaaacacactaaactctcttacccgttggatcagtttgattccgatgttgcgggtcgtagctttcacaatgggagatttgtgcagaggatgcgagagagagcttctttacttcccaagtaaacatttcgttttccttatgagttttgaaagcatacatcttttagtttcttattgatatagaatgtgatttgagttttcgatattcagtgttcgaatggagcaaggaacagtgacatcgttggtggaagaaaacggaataatcaaaggtgttcaatacaaaaccaaagatggccaagagcttaagtcatttgctcctctcactattgtatgtgatggttgtttctccaacttgcgtcgatctctctgcaaacctaaggtgtgtaacatggttattaggattagattttgtcatttgctctgtttctttgggacttaaattgatcaataacactctccgatcaggtgcaggcgccatccaatttcgttggtctggtattggagaattgcgaactcccgtttccgaaccacgggcacgttgttcttggcgatccgtcacccattttattctatcctatcagcagctcggaagtccgttgcttggtagatgtaccaggttcaaaacttccttcagttgcaagtggtgaaatggctcaccatctcaaaacaatggttgcaccgcaggtaccacctcagatccgtgatgctttcatttctgcagtcgaaaaaggtaacataagtacaatgccgaacagaagcatgccagctgatccaattcatacacctggagctttgcttttaggtgatgcgttcaacatgcgccatcctcttactggaggtggtatgaccgttgcattgtctgatatagtcatcctccgtgatctattgaacccgctcgtcgacttaaccaacaaagagtccttatccaaatacatagaatcattaaacacattgcggaaaccggttgcttcgactatcaatacactcgcaggcgctctttacaaagtctttttagcatctccagacgatgcaagaagcgaaatgcgtcgagcttgcttcgattatcttagcctcgaaggggtttgctcatcaggacctgtggctttgctatctggtttgaacccacgacctatgagccttgttcttcatttcttcgcagttgcgattttcggggttggtcgtttgcttgtacctctcccgtccgttaaacggttatggcttggagctagactaatctcggtacgtcgtcatcttttgttagaactaataaaatactttaaaatttgagaaaatattgaatcgttgtttgctacttgtgttgatgaaacagagtgcttcaagcatcatctttccaataatcaaactatagggagatcgacaaatgttcttccctcctacaatccatgccatataccgtgctcctccttaatgatgcatcaagagttacatacattaaatgatctatgcaggcaaatgttgtaacttttaatctaatatcttagttgcttgatgctaatcatgtgggtgtttaggctagatagcttaggaaccagtgtaaacatagctccttaagtatatatgattgtgagcaaagagtcttgtaagtgcatcaatgggaagctgtatattttgtatatcctaacatctttttggaccttgtagaattagttccggtgttgttaactgtctttcagcatggtgatcagtctcatcatatatatgtcctgcgatattagtcacataactgtggaaaaacccgataaaattttcattctacttctacaatatattaatctctcactttcgaacaccatcgtaacctctcttacatatccgtatgttccacaaatttctccttaaacattttcacagtcatatacacaagatttttaatattataaaggtaaatttagattcatgtcggcaagactttgatttgatatattatttttaaaattttaagaacttgacaggtaatgaaaacgattatttaacggattacttttaactttgcagaattga

SEQ ID NO: 159791 - DNA, 209 bp, Arabidopsis thaliana landsberg
gttgaagcatacaaccgtgagaggagctcacagaaggtgaagcggcatcatactttggctaagtctgaagttttgggacctattgtagttgtgtaggaagagacataaataaaacatttgctgtggtcgtcgattgtaaataaagattttagttgtagaaatcttatcagcaacactaagctataaaaacgtcgatatgatcaagacat

SEQ ID NO: 159792 - DNA, 290 bp, Arabidopsis thaliana landsberg
aatgtgttgtgtcttcttctcttgcaggtaaggctgaagatactggtgagttaacagagaaggagatcataagagctgagagaaatgccggatacattagcagtagattgagagagattcaggtgagctcaaaagttttgattatgtgacatcaaaagtaatgaactttggcttgtgagtgagctttgtttttgtttttataattgtagatgcaaaactatttgaagaagaaagaacagaaagctcaacgggagaaggatcttcgtgaagggctgcacttttccaagtaa

SEQ ID NO: 159793 - DNA, 267 bp, Arabidopsis thaliana landsberg
  unsure (1)..(267): unsure at all n locations
taatcacaggttggaagctctcaaagcataaaaggagagataacaccagctgtaacaaggagagtcacaacagtaacagaggaaggagaaggttcgttggagaaagattcaagtcatagtttgcatcatccatgtactttgtttnnnnnnnnnnnnnnnnnntttcttaagtgtttcgggattgaccggagtactgaagaaaccgaggattctttgagacaagaatctaagaaagagagatgatgaagctcttgtaataagaagaga

SEQ ID NO: 159794 - DNA, 697 bp, Arabidopsis thaliana landsberg
gtatatgagcaatctatatctgctgtgtgtcagcttgactggccaaaagatcgactgctagttcaggttctagacgattcagatgatgaaagcatccaggagttaattagagatgaggttactaaatggagccaaaagggtgtcaacattatttaccggcatcgtttggttagaactggttacaaagctggtaacctcaaatctgcaatgagctgtgattatgtggaagcttacgagtttgttgcaattttcgatgcggatttccaacctaactcggatttccttaaactaaccgtgccacatttcaaggtatgtagataggtggattagtaattctgtttggttgtgtcatgagagtatgagacaaccatttttggtgaagcatctaacttgtaaatgccaatgttatttcaggagaagcctgagttaggtctggttcaggctaggtgggcgtttgtgaacaaagacgagaacttgttgacccgtcttcaaaacatcaatctgtgttttcatttcgaggttgagcagcaggttaatggggtgttcttgaatttctttggtttcaatggaactgctggagtatggagaattaaagcccttgaagaatctggaggttcgcttgaaaggacaaccgtcgaaaatatggatatagctgttcgggctcatcttcatggatggaaattcatagtcttacgat

SEQ ID NO: 159795 - DNA, 1175 bp, Arabidopsis thaliana landsberg
catcttataatattatatcgccatgtttcagacaacaaggaataagagaaagtaaagagaccacaattgaaggaagatttcagtttgaccttattcaggttttttgtccttaacaaattcattttggttgagtcattcttagattgtttatttgtaacatcaacgtgattcgtcttttaattattgtaggcaatacacagaggcctcaaattaagttcttattcgctgaattctgtctcagctcactttctttccgagcaggtgaagcagagtaactatgctcagaatttcactgaattaatacttaccatgtggctaacctgaatgtctaccgcagaaagaagatgtccaccattctataataactgatctccagaatgggaatgcggaaaccaggaggcgtcttgctgtttattgtttgaaggtacctacttttatttattctggagtagtgctgtctatgtcctgatgcattgcctgttattagataactttaagattttctaactagctatcaagcttgtctaaccacctaaaggtcctattgcatgttgtcccaagctatgatgggagtcccaagtcccaccctttctagtgtaaaagatgaacattgatgtgtgttttaaaaacttttttagtaatctctgcttatatttttgtacgtgtggcaagaggaaaccttgtagataagggtgtatagaaatggttgctcatatgtccattcatgatttttttgagcatgctggaatctggatgtgaggtaggcttgaaggacttctggcaattgctggcgatatttgtgacacatggaataatgtgtttcgtaggatgtgtggaaggattttcagacactaacttagctgcttctctattaatagtcaaccaactaaatattacaagaagctacaacttcaccacgtttcttttctctgttacaggatgcatacctcccacagaggcttcttgaaaacctgatgtttatatataattatgtcgaaatggctcgtgtaactggagtccctacctcctaccttatttcaagaggagagagcatcacggtaggtttcactaaattctgtcgcagcacactttctttgactaaggctgtctgagaagttatatatcttgggtctaggttctatctcaaccacttaggaagctaaacagaaaacctg

SEQ ID NO: 159796 - DNA, 1334 bp, Arabidopsis thaliana landsberg
atgtctatggcgagtttgtatcggcggtctctttcccctccggcgatagatttcgcttcttttgaaggaaaggtgcgttatttctcaagtgttcgatccatggattcaattgaaaattcagggttctgggttttaactttttaagtatccttgtgcttctggttagagatgatcactgatttggtttttgtatgttgattgatttggttacttctctatctgtatagagtctagaaattggattttcttgggaactgtgtaaaactcgtaaaaccctaaaccccttgctgtttttacaagtttagttgttggtgagagatctgagcatgcttcatgataaatggttcacgaattattgatagccaatttagtagaatgggacaagttcttttgccctgagaatttaaatgttgtcattgtctttgcagcaaatcttcaatgaagcgcttcagaaaggcactatggaaggatttttcgggctgatttcttattttcacacacagtgtgagccagctttttgtggcttagctagtctttcgatggttttgaattctctttctattgacccgggaagaaagtggaaaggtatacatacctctactggagagtacattcgttggtgggtttttgaatttttttggtttctctcagggccttggaggtggtttgatgaatcaatgctggaatgttgcgagccgcttgaaatagtgaaggataaaggcatttcatttggaaaagtggtctgtttagctcattcttcaggagcaaaagtcgaagctttccgcacaaatcagagcaccattgatgatttccgcaaatatgtggtcaaatgttcaacttctgataattgtcatatgatctcaacatatcataggcaagtactcaagcaggtatcatttttttggcctaaactctgtgtatattaacagttatatggcaattaagtgaaattcattagacttaatgttattacaaagtttgataatggtgaaactctttcatgtcttgctatgaagtcccatgctgatcggattctaatgtctatgattgcagactggaactggccacttttcacctattggtggttataatgctgaaagagatatggctttgattcttgatgtcgctcgtttcaagtatcctcctcactgggttcctcttaaacttctttgggatgccatggatagtattgatcagtcaacagggagacgtacagggtacatggatctctattctttttcttaggcttcacttgcatgattaaagaatgtaatccggttctttttgctattctgctttacttcccaggttcatgcttatatcaagaacccccc

SEQ ID NO: 159797 - DNA, 2214 bp, Arabidopsis thaliana landsberg
atgccgtcggataatacttatgtacggtttaggcaacaacagcgtgacccgttgcatgtcaattctcctgttagtgctgggaatatctcaggggttcaaggttcaggttcacgccatccaccatcgcctccaacgccaaccactcagccttctgtcaatcattctgatgctcaagctgagcgtctcaacaatctgacactggatgagctccttgatagtcccggtcgtgctggcttgacaagactagacccaaagcgacctccggcaactctctggtaaggttaaattcatagtccgtgtagaacagccttgtaaaatggaattaggttggttctgccttagaagtttaaacacgtaaaacagcttggttgtacttagcattgtagtgtcttagaagtttaaagacataaagatccttatgtgtgggctggttgctcttgctgtaggtttgacgatgactctacagttgcagcaacagtccgcagcatatttgaaagagatttcaaagaacctcatgccaattggtcacagacatcaaaggctacaatcgatcgatggtatgaaacgtttgcggtaagttctgtgcttttttttttatgtttatgcttgttttgttgtttggtttcatttctgatgtgtgctttgtctgttttgtagcaagtatataactgggactgttcaattaacaaaagagtaagggttgagtttgaagcaaagctaaactctaggatgtctgatcaagtgtcacggtggaagggaaattggaaggagaagggtgatgaagccaagccaaaatggattgatcctgaggtgtggaaaggtctagtacagttttggcaagatcttaagtcataaataaagagtgccaacagcagaaatggtagatatcatgattcggatggcaagggcatatataaacactgttcaggccagacctcatacaaagctcgtgcaagaaaacgggttagataagtattcttctctccttaccattacttaatctacaatgttatattgacaacttgtttatctctttgtgtttcagtgtgagaagactggagaaacaactcctgatttccttgagctgctagatgagacacacagaaaagcggatggaactttcatcgatgggaagtcagaggagatttacaagaaaagtgacatctaggatagaagaggaaaagtttcatatgtgctcaatggacaatccggagagcactggatcaggtggattgtctgttcattccaagaacaagatttttactgaggtaaatcttctgtgctttttcttggcagcttgttgtgttgtgtacttatctgaattctgttgtgtacttgtctgaattatgttgtgtacttggcagcttgttgtgttctgtacttgtctgaattctgttgtgtgcttgtctgaattatgttgtgtacttggcagcttgttgtgttgtgtacttgactgaattctgttgtgtacttgtctgaagtgtacttggcagcttgttgtgttgtgtacttgtctgaattctgttgtgtacttgtcagaattatgttgtgtacttggcagctgaattctgttatgttgtgtacttgtgtacttgtttgaattctttagtgtacttgtctgaagtgtttgtgttgtgtacttgtctgaaatgtttgtgttgtgtctctagtgtttgatataaagtacttgtgttgtgctgaattcttttgaacttggtttctcatggtttttttgttgtgtccttgtgagtgtttgtgatctttgcaggttgctccgcgaaagaaaggaaggatttatggggttggatctctgctgtttgaagcatcctcagcccatagtggtccaatgcttcctagtgatgatccggtcatactttctcagaagctggctgccgttgaagcatgcattcaatctcaggctgagaagatcaatagcttcgacatcctgtttcactatcttgctgaaaaagatcctgctttggctgaaatttcttcgacgtggttcctcgacacagacaggacaggccaacccaaatgaaccacctgtgtctactgctccagaaccggaggtggccaatgaggagacagcagctgctgccctagctaaccttgcaacaggatcctctcctccatcaactgtattttgaaaacattgtcttgctttttccttgttatatctctttagaacaagttcttagagtttcaaacaatcta

SEQ ID NO: 159798 - DNA, 1834 bp, Arabidopsis thaliana landsberg
ctctaccagaaagaagtaaatcgtgatcttcaggcattgtttggagaagtttccaagactcataacgctatacagtgagatatctcttaagctgtaatgaactattttaaaacttctcgggtttgaaaacgttcttgtttaacttcaggacattggataagactatttcaagcttagagatggagttagctgcagcaagatcggctcaggagtctttagtaaacggtgctcctatatcgaatgatatggagaagaagcaattaccggggaaaagacggtatttgatggttgtagggattaatactgcttttagtagccgaaagagaagagattctgttcgaacaacttgtatgccttcaggttctaatatcaccttctaggttctttatcttcaagattgctgatatcgatatgttacttgatggatgtttctaatgaaaatattgcttgtaggtgagaaaagaaagaagttggaagaagagaagggaattattatacggtttgtgattggtcataggtgagagtttgaatcttttagtataatgtcagatatcgaatcaaccactatgttcttacatagtttctgagatgattcatactcagtgttaattttatttggcattggttctttagtgccacggctggcggaattctagaccgatccattgaagcagaggacaagaagcatggagatttcttgagattggtattttttttctcaagtttaactctcgcgcttttggtgtccaaatccttgaatattggtttctcattctctgctactttcaccaggaccatgttgaaggataccttgagttatcaggcaaaacgaaaacatatttttctacagctgtttcgaagtgggatgcagagttctatgtcaaagtagatgatgatgttcatgtaaatatcggtaagctgaacaatcttcctacattcaatttctatttcccagcttgtatgttgctcacatcaataacgtggtcaattgttttgttgaaaatatctgccgcaactcttggggaaactcttgttagacacaggaagaaacatcgagtctatctcggctgcatgaaatctggtccagtactatctcaaaagtataatcccatttctctcacttaccttctttttgaatctctttctcagttttgttttaactcacattttgtctatggagcagaggagttagataccatgagcctgagtattggaaatttggtgagaatggaaacaagtacttccgtcacgctactggacagttatacgccatttctagagacttggcttcttacatttcccttaatcagtaagatttgaactcctttgtaccgcatcatttatgcctcattctccatctaacttctcttacaaaatgttccaggcatgttctgcacaaatatgcaaatgaggatgttacattaggtgcttggtttatcgggcttgatgtgacacatatcgatgatagaagactatgttgtggcactcctcctggtaccttccttcaaatatctatagactcagttcaatacatcttagatgattgtgaagtggtaaaaggttaaacttagttagttctatgcacctaactagaatgtttttttttaaaacaaaccttaaccagaatctggatgtaaatggtaatcatatgatatacactaaatatgattcttggtgaattgcacattgtgattttatttcacaagcaggcaacatatgtgtggggtcggtcgactggacgtgtagcggtatctgcacatcagctgatcggataaaagaggttcacaagcgatgtggtgaaccggaaaacgctatttggaaagccagattttga

SEQ ID NO: 159799 - DNA, 813 bp, Arabidopsis thaliana landsberg
ggattcgccggcgttggatatgtctacagggatcagatcaatactttcctcactcaattctccacttacatcgaaggtaacgatttgataatactgaattggtgattgattctattactgcttagctttctagtagtattctgaacttagtgacaaaagaactttagatactaatgaatgatgcatttaggataagtttttgatggagttttgtgttcttgatgaatcaacaataggttatggtacagctgggtatgcgctgttcattgccgtctatgctgggcttgaggcaagcttttttatacttcttcatctgcttttgatgttttttatactcttcattgaccccagtttcaaggttttgttttttgaatcatttgtgtttagatactagccattccagctctcccattgacgatgtcggctggtcttctcttcggtccactcattggcaccatcatagtttctatcagtggaactgtaagttatttcttcccaagaacacaaaatacttaatgtcatcaagtgagaccttcccatgttcctatatatttttttggttgtcttaaattggtttctctttgtgtagatggctgctagtgttgctttcttaattgctagatattttgcccgagagcgcatccttaagctagttgaagacaacaagaagttcctcgccattgataaagcgattggtgaaaatgggttcagagttgttactctccttcggctaagccctctacttcctttctctcttggcaattacctgtatgggttgacgtcggtgaaatttgtgccttatgtattaggaag

SEQ ID NO: 159800 - DNA, 326 bp, Arabidopsis thaliana landsberg
atgttggaaagcgaggaagaagatgtggatatggatatggcggatttagagacacttaactatgatgatctcgatagtgtttctaagcttcagaagactcagagatatgatgatattatgcacaaagtagaggaggctcttgggaaagattctgatgatcatgagtataagcttattgtggattgtaataagctttcggttgatattgaggatgaaatcgttattgtccacaactttatcaaagaaaagtacaagcttaggtttcaagagcttgagtcgttggttcatcaccctattgactatgcatgtgttgtcaagaagattgg

SEQ ID NO: 159801 - DNA, 796 bp, Arabidopsis thaliana landsberg
  unsure (1)..(796): unsure at all n locations
atgcagaacacaaaggtatgtgttttctaaggnnnnnnnnnnnnnnnnnnngagtactgaaaaacaagtgtaatccctgatatttttggtgtgttcagattgtcgaacccttcacggctcattatgtttttgcacttggagtagcaagattttttagctgtgcacactgggttttacaggtaggttcttatcttcaacagagagttgtgattacatggttaagttgttctttccatctcttgcataaaccaatggctttacaaatatgtctaacatcctatgcttatggcactggagcaaatggtcaactccacaatatccccattagatatgatattttcgcaagtttgtttgtgtgatttttccaaactgaacgcataaatttggtttggtcttctgtgttgaaacagatgatggacacgcacggacgactgcttgtagtgctgggttatggactatggccatcgatggttataatctcagaaatagtccaaacattcatattggcagatttctgttactactacgttaaaaggtacttttactttcttcccccacacaagctcttcggtcttttcgcttcacctctttgatctatctttcttgtgcagagttttcggtggccagcttgttctaaggcttccatctggggttgtgtaagttataaaggaaaaaatataagacacattatgaccaaatttgttacacgaagatagacctcagcttggtgtaatctgagtagcctcttgttactctgaagttactcccttaggccaaggtctaattctattaactg

SEQ ID NO: 159802 - DNA, 444 bp, Arabidopsis thaliana landsberg
ttgggtttcgtgagtctcgctttataaggtaagactatatttttgactaaactgcttccggattctgttttgttgtagctcaattttactcttctttaggttgatgaacagaagatgatgtggctgtgtgttattgtcattttgcaggatatgggacaaaagagatggttcttcttgctggcaatttttgtttgccttggttcatcttcatgtggcagaggtgatgatgaaacttatccctctgagtctctttgagcctaatcaagatttgaaatttctgtacaatgatagtgattgggaagatgacaaatgaattaagactgtacttagtgaatttatggtgacttttttctatttattgcagttctcaagtttaagagcgatgatggtcgacctgtgtacaatcatacgcttgccatcacacttgtggagtatacttctgcg

SEQ ID NO: 159803 - DNA, 1362 bp, Arabidopsis thaliana landsberg
atgaataagccggcaaaaattacaagaacgacaaaggtttgcaaaaataataacctgagtttcagagtcaggtaagggtaggttatcagaattatcactttgaagctccttggcctgcttaatctgcaatcgccattgcatatccttatagaaattgttagtccacagtccagacattcattggacgaatggggcgggaaagagcatgaccacggatagttagatggcaaagcctccaaaacacttccgggacggtgtgtaaacccttgaccacgatttagacttgtgagatttgagagaattattttagattttagaaattagaaacttaaaaaaattgagatgttttttaatataacctaaaatgttacaccgtgggtaaaatctagtatgaaaaaaaaaatgttgcgtgttctgttaatattgtttgttttgttaataataatgtttactatttttaaaattgagatcttgaatggacatgttacattcttaagattgtgtggcttgttggtctgctgttttgtgtcaagtttttgcagatgtttcttgtttctatttttgccgttttcttctttttacactcaaccggtcgatctataaattttcaaatctccggtggcaagtgaagcggttgtgtaacttttccagtttttgttttctcctattagtttttttttttcaagaccaaatctattcgagatcctattagtttttgctttctcccaattggatcttcgttgagtatatttcggtgaataactaatggttccaaaatctcaagaaagaggccccatcaagtcggaataagaaagtctaagaagtctaacaagtatcaaccgaggatgtgaagaccaataatttgaattttcggtgaggtttgtgattttcatcgacatcaagacaattatgatctcaaaaaagaactaatgagtaggagtaatgacaaattagtaaaaatttaaattattgcggttttagtttagattttcgagtgtgctctaaaactgtctcctttgttagggctattttctcttgtattttcgagtgtgctcttaaactgaccctttttgccgttttagtttccgaacttattataatttttagtagacatgtaattttaccaatttctaatgactcaaattaattaaccagttgctaatttatatctatcaaaaatacaacagatctgaatatagtaatatcagtgaacatttgacatcatcaaatttgaaagtgaaaattgctaaagaagaacaggtacagacaatgaaagcggtcatgcctcatctgctgcacatttacaaacaattgcatggattttacccggttttttgaaataaaattgtgatttccgaaatt

SEQ ID NO: 159804 - DNA, 679 bp, Arabidopsis thaliana landsberg
atgtttgttgatgacccttctctacacaccttgaaacgcagacgactcgagatcaccgattcaatggaagcttcttcttcagctcaggtctaacttcattcttcttcttcttctccctcattgatctatatcatctgattcctacttccatttcgattttcatttgatccgaaatttttctgtttcttcttcttctatatttgggggttcccgcaaagttttctagggtttttccatttcttgagtcgaattcaatatttatttgatggattttcgtaaaattaggctaaaattgctgatatgcgagagaaattagggcgagaggttcgtgttttcgagacttcgagtatctcacagagaccaagtcaagtttctagtgctggtaacttttttggatctctgattcttatattgcatttgatctgaatttgaacaagtcttgtgattgattgtttatgaaaattccacagacgatgaatctgatgatttctacgagttcacacctgcagatttttaccgccttttggctactaagaaagaggtaacatgttctgagaatctgatggttagttacattcttaccatttctgaaatttgcaatcttgtcaaccactggttgcatatcgatgatgctgcttaagaacagacctgtgttatctctactgatgtaatactatca

SEQ ID NO: 159805 - DNA, 3656 bp, Arabidopsis thaliana landsberg
  unsure (1)..(3656): unsure at all n locations
atgtataagttttacagggtgaagcgcataagatcccgaaggcattgctccatcagctgtgtcaaaggtcagggtggatagcaccaaagttcaataaagtgactggggaaggaagaaacttctcatatactacaagtgttatgcgtaaatccagtggatttggtaaaagcagacaagccgggggtctggtaactattcaacttcctcatcaagttgaggattttgaatccatccaggtacttacttgatctgcatattttaacactagataatctattataagatgctaaacaagtgtttagttaggctcttgtgagtaaatcttattagggatatatcttctgccaagaaagttagaccttaataccttgatctgccaggttttatggtgtactataatttgcttaacaacattgctcaaattttttgaaacttctgattatgaaccttatataagttgtaagctgttgaatggaattaatcatcaatacatgtataatttactgatataataagcatgctaattatatcatattcatatgtgcatgcgttatatgcttactatgtatccagctagctcattattgtgcatttgtgtgtgacaggatgcacaaaacagagttgcggcatttgctctccataagctattctctgatttgcctgttcactttgcaattactgagccttatgcctctctagttttgatctggaaacaaggtaattttgacatatttcaaaagtcaacattcatatgttctggccctttaatgttgcaaaattacaatcactctaaaagagttgctttgagctttcacagaggaatcattaggtataccaagcagagaagagcaaagaagagaaaaatttgttgaaagcttgcttgaggcagacaatttcagcttgactactacttcgagaggcatacacagtgcacttccaatggtagactcctgtgtcaaagagaatgatgacttggatgttgtcaaatctaaccacagagccagaagtatgtttcttggatccactttgtcacagtccagatcttagaacccttgattgtagtgccaaaatcattagcaggaagtataatcttctgaatgatatgttacaggaaacnnnnnnnnnnnnnnnnnnnnnnnnnnnnnnnnnnnnaaacaagaaaacaagaagaagatgcagaagtacaaggtaaaatattcttgtttatggttgaacacaagttttggctaattttatacgttacagttatatgtttaaagcttcagagactatttagcttattccagttaggagtgtagactctgtttttggcatgttaaaaaccttttttactgcagctttcactagtaatcgtaattattcttttgtaggacatgttgaaaactagagctgctcttcctatatcagaagtgaagaaggacatactgcagaagctgaaagaaaaagatgtcttggtggtatgcggagaaactggttccggaaagactacacaggtttggtctcatcagtttctccctgttatgtaaaatatctttcaactataagctttgagtcatttctaattgatacattattccaggttcctcaatttatactggatgatatgatcgattcagggcatggtggatactgtaatattatatgcacacaacctcgggtgttatcagtgagtatctcggtgttaagatgtcaagttttcaggatttgcttgtttggtttatattgatataaactgtgatcggttgattctcgttggtccttttacttctgcaaagcttagtgatatcaattatcctagcattataccctttttacttttggtttcctgttcgtaactgggtaatatggtttaggctatcactgttgctcaaagagttgctgatgagcgctgtgaacctcctccaggcttcgataactctgtggttgcttatcaagttcgtcatcaaaatgcaaggtctgcctctttaattttagcatttttctaacgttttatgagctcatttcactgtgttctgcttgtatgcctttttatcgctatgtggcttgcaatggatgattagaagcatttcttcttttttatctatgttttggtagaatggaattgtgaagttttatttgggcgtaatgttatttccttgtgtacttgttcaggagtgataagacaaggctgctgttttgtactactggaatcctactgagaaaacttgtggtacgtccctattttattaggagcccttgtgcatgcatcatgcagtaacctgaacagaacttgcaggggcataagcaaaaacgaatgattactcactttttaaaatctgtttgttcgtttgtgcaaaccttgcagggggatacgaccttgaaagatgttacacatattatagtcgatgaagtgcatgagcggtctcttatggtgagcattcattaacgcacccatcaatttcagttcatgtcaaaataaatatattttggcatcatttgctaagcaaaataaaatgacagtccagtacaatgctactaatgcagaagactgtacacagttatattacaacagagaagtcccaaaccttagtggtcaatacattgatatgttcattctgcaagtgttgaataatctcaccataaaatgcgtttcacttcatttcagggtgattttcttctcattattttgaagagcctgattgagaagcaatcctgggataacgcattacctaaactaaaagttatccttatgtacgtatttgtagacgttttgtttttcgatgacagaatatgaaaaagtaagtaaacactacttttgtatgtattcatgtgtgtaataacctttcaggtccgctactgttgatgcacatcagttctcaagatattttggtcaatgtcctataattactgctcaaggacgaactcacccggttaccacttactttctggaggacatttatgagaggactaagtaccttctggcttcagattcacctgctgctctaagttctgatacatccattacagacaaggtattataatcttttggatgctggtaatgctatactgaaactttggaaattgtgaagttgatacatagatttaatgtctgcagcttggttctgtaaacgtccctagggggaaaaagaatcttatgttggctggctggggagacagttatttggtttcagaggacagtcttaacacgtcttacgattccagtaactacgaatcttacagtgaccaaacgcggaaaaatctggtactttgcctttcgagttggagcttatgtttctcttattcacctttctgagttaaatatattgcaagtgctgtgcagaaaaggttaaatgaggatattattgactatgatcttcttgaagagttgatatgtcacattgatgacacttgtgaggaaggagccattcttgtgtttttgcctgtaagctgatactgaaatgttttgtgttacttgagaatcaatcatctatcacgttagcatgatatttgtttggttaataacagggaatgtcagaaatcaacatgctactcaataggttagctgcttcctatcgttttcgtggagcttctggagattggcttcttcctctacattcttctattgcatctacagaacagaaaaaggtgtttctgcgcccccctaaagcatacggaag

SEQ ID NO: 159806 - DNA, 694 bp, Arabidopsis thaliana landsberg
atgaagactttggctccgcaagaaaatccaaaacagagcactttgatggggaaaattcaatctttgaatcgaaaagagtttgatagaaactctatatcagaaacagaagacacattaaacagtaccagtccactattctttagaagcagatccagccggcgttttgaaaccgatagaaagagcgtgcaatccagtatccaactcttcccggagcaaatgatagaccaacgtgtgtctcttcaccaaattcattccctcgaatcctttagaaacgatcttcacattgaaatgcgtctcatcgtcggttctacctttcattccggcgtgaccagcgtgctgatacgaaacatcttcgatcactaactccactggttcgagctctttttgaagcttctctctcatcctgctcgctcgattctctattgctccagaatccgacccggttttctcaacgctgctcattgctacggatcttgaaccagttcccgtcgattttgactcagagttgaagaatttaggtacggagatgaagacgctcggagaatttaccggcgattttaggggttgagtccggtggaacccagatacgattaacctaatcgaagatgaaaacattgccactgtcgaagaaactcgaaactatattaaacgctgtcgttttgtcagcttatcatcttcacgaatctactattag

SEQ ID NO: 159807 - DNA, 528 bp, Arabidopsis thaliana landsberg
  unsure (1)..(528): unsure at all n locations
gtgaatggcgctgaaagccnttgacnttanagaaataacaacataaggactctcaccacaggaaattttgataccaatgcttgtctctggatgtctggtttgaatgtcgttgatcttgctagatggagggcattgggtgtttcagaaacctatcaaaaatattataaagaggtcagtttcctgaaaaaccttttgtaagagataattgggtgattctgagcgatgacttccttttttcatgtgcagcagatgagtagtggagatgagtcgagcgaagcaattgcattgcaggcaagcttgctcacatttcaagaccaagtatatgctcttgacgacaaatgggctctatcagggcttggttatgactactacatcaatgcacaagccataaaaaacgcagccatattgcactataacgggaacatgaagccgtggcttgagctgggaatcccaaattacaaaaactattggagaaggcatctgagtcgggaagatcggttcttgagtgactgtaacgtgaatccttga

SEQ ID NO: 159808 - DNA, 718 bp, Arabidopsis thaliana landsberg
atgcttcagaaggctatataagtgtcaggtatgaagtcatggaattaccggtagcttttcctttccagaaaccatctgcggacaagcctaacccaaaagaaggagtcggtaagctctctcttctgcgaccaaatgcaaccttggaaactgcaatcggatattcgaaatttccttcttgtttttaacttccaaagctaaactcttttgaaatattcgcaggccttctagctaggagcaaggacagccagtacatatgcacacgaaacgacagtatgcccactgctctgtggatatgggacatgcgcctcctcgaggttgcagccatcctggtccagaaggaacccatccgagcagctgtgtgggacccaacctgcacacgcctcctcctgtgcactggaagctctcacctttacatgtggactccctcgggtgctttctgtgtatgcaatccccttccgggcttctccatatcggacctcaaatggaacattgatggaagctgtctccttctcaaagacaaagatgcgttctgttgtgccacggtcccgtctctgcctgagtccagcgactacagttctgatgactgaagattacttatgtggttctttgtaaaagtttcagccttgtttgtctttcaattttaggagtgtttttttccgcgacatttactagtgaatgttaaaaacatttttcaatgtataaagaagctttcttgagt

SEQ ID NO: 159809 - DNA, 1120 bp, Arabidopsis thaliana landsberg
  unsure (1)..(1120): unsure at all n locations
aacttatcaagtataaaggttttcaggtagctccggctgagctagaggctttgctcatcggtcatcctgacattactgatgttgctgttgtcgcgtaagttcaaatttttaaccgttgttcgttttgcagtcgctaattgaattgcgccaaaatatgttgttgaaccaacaactacaaaacggacattgtttgatcatgaccaaataatgttgttggttcaacaatatatttaggctaatctatgttctgagtactaatctattattaaagtatgttgttgaaccaacatgaatgattaaaacataatttaagcataatgacaaaaggagatcaatgatatcaataacagagccgatcttgatttctctagcatctctgtttcaaactgcttacactttttgttgttacgtgtatgattaaacagaatgaaagaagaagcagctggtgaagttcctgttgcatttgtggtgaaatcgaaggattcggagttatcagaagatgatgtgaagcaattcgtgtcgaaacaggtaaaaagtgaattacaaagcaagttcttgattttgattaatgcatgagaaatgaatcattattgatgcaaactttgtatatatctgaaatcacaggttgtgttttacaagagaatcaacaaagtgttcttcactgaatccattcctaaagctccatcagggaagatattgaggaaagatctgagggcaaaactagcaaatggattaatgaactaggttttatatgatccacgtatatgaatgcaatcttatcagaaaaatgaaacaaaatttcgttnnnnnnnnnnnnnnnnnnnnnnnnnnngtaaaagaataatatttgtgctttttcctttatgtgtatgtaatggataaatagttgtatcttttgtttggtgggaatgatgtaacctttccatattgtggcatattgctcgaatataatcaataattgccttaaaaagtaagcaaaactacattcacccaacaggaataagcatcctagaggggagggaaatacttgagtatcaaagactagagacggccacccatagagaatagaatcaagtgatcatgaagtcgtgatatatcagaatttggagttacaatgtgc

SEQ ID NO: 159810 - DNA, 1360 bp, Arabidopsis thaliana landsberg
ccgcctttctccggcggcgcttcttccgccactcctggctttcctctaagatccaccaccgtcttccccaaggtacattactactcttctctatttcacctgtcaccacttctctgatctttggattattctggaatcttcgttttatgtgatcttgttacaaaaagtttccattacgattccatgttttaacccttaagttcaaaattgtggtacaattctatctcataggtgttttgagttgaatgataccttctgattttctggagccctattgattgtatatctcccactctactcttatcttactatgcaactatcctgtctttctttacttgcttcagttatgaatgattccacgaggactgaagtatccattgataaatcagaagtagacaagcttgttgacaagattgattttggggaattatgcaacgattttgagtgcacaagtagtccgcaggtggaatccacagctagacaacttgttcgcgacattcttgaaatcagagaaggaaatcgtgcctttgcatgctatgcagtttccgttaaatataaggtacatttctctgtcacattgtattttacaatgtacattgcttttcagatagatatggttcgtcgaaaatttggcacttgttaatccactttgctcaaaatgggcacttgaatatatgtggctatgtgctaaagggagtagtatttatcttgcgtttagacatggtccagtaaaattgatttgctcgaacattacaacacttgtattccattatttctcttgtgatgttctgatattccttggcagtaagtaagtacatcgtgattgatagtgattgcaggatccggttagaagttttacaggtcgtgagaagtacaaaagaccaatgtggataactagtggattagagaatcctaccgtggtaagaactgatcacaaccttttaacatttgttttgcattttctaacccttttggttcacaagtaatgtgattcccttccccttatttgtagacggtacaagagatggtaatgttatcgaccagcgtcttgcgaattaaatggacagtgaaaggaaaaccaaaatctattcttgctgctgtaagtggagatttgatagtaaaagtcaaatctgaatttactcttaaccagattagtgggcaagtgtttgagcatgaagagtcttgggacttatcttcatcatcccctattgctcaagcctatttctggacatcccgccgcctctttgctgcttctgaatccgcaaaagatgtcgccgatgtcacaaaagacttgaccgccaatttgacaactcgaaaagaggacacagatatatatcgcgatccaaccgatccaaataag

SEQ ID NO: 159811 - DNA, 243 bp, Arabidopsis thaliana landsberg
gagtgatggagaccaacaagcaaggcaagcttgtacctctacttactgaagctggggctattgccaataactcttctcaactttgatgaaactcgaaactagtgtgtgttgtgtttagatcatgaaaaaggaggtatcgtcacatactcaataaagaaagatccttcccgttgtttaatacagaatatctaagtgtatacttttcatgttggtgtttccgttaatggaataaaacttgagaaa

SEQ ID NO: 159812 - DNA, 362 bp, Arabidopsis thaliana landsberg
gggggaataactacattggttaacatgcccttaaccagtttcccttcaactgtatctcctgaaactttgaaactcaaggtaaagccatccactttagttttccagttggtaagctcgacactattcttacagctttttgcctttacagattgaagctgcgaaaaacagaatacatgttgatgttggtaaacactttttgctatcaaaccttaccacatctgttgattcaagacaacacatggtgtgccctaaatctttgtttccatttttctccagggttctggggaggtctggtacctgacaatgcactcaactcaagtgctcttgagtctctcttagatgctggagttcttggtctcaag

SEQ ID NO: 159813 - DNA, 696 bp, Arabidopsis thaliana landsberg
tgtgatgctaacaatcaagatgtgatcagaagtcattaagtcaagccaagcattaacaggttttggtgtgttctagcagtcctaagtgaacatgcagaaaacagaaaatcaagcagaaacaataaaacactcgaccaacacagctcgttgcagagcactgggtgtggtcgagtaacagacagtaaatgaaacaaagatactcgactgcacaatctgttgctagacaactggatggtcgagtatcaggtcgagtaacaagaaagagttgcagaaactagacaacagatgacaagatgcagtaaacaacagtaaagtaaacaaagaaatcaatcagataaagaaatccagaggatgggataattgaatagtttcgtttcctcagtttacaggtgattgacatgctcaataaattatccctagacaacaagttcggtaaccaaatctaagtgccacctcaacagagaccctgaagttaaactagtcccagactcaatcaccattgacgagagctacctaacaggcattacgaatcaacaagttaaagccaaaacgctccctacaaccaataccttggtacagggccacgaatctctggaattagtggttcagacatttcatcgaacaccttttgggcgcgaaaatgtatgggctcaaaatcaagttgatcagaaagcaataggcattaagaacaactaa

SEQ ID NO: 159814 - DNA, 613 bp, Arabidopsis thaliana landsberg
ttatgagcgacaagggcattttcgtcagattttgcctcaatggttaattactgaaaggcccaatccactttgtcaagacctgaaattaaaacttggtcaaaggttactgtccataatttacccttaaaaaaatggttactggtaagatattgaaaccggaaaagtcaactaagcacattggatttagcgatcgttaacagccgttgagggcgactgtttcgaagtaacaaacggcagttttggctcgacagtgtgaaccgtcggacatggagataactcatctaacggtaatttcttagtcttttaccgagagccgtccaatctaaaagtattaatcacccagagcataaatggacccaaaaaggccttttaaaagttttttgagcataagccaattcaaaaataaaaatatcaacggatcactcaaattttgaaattaatcatctctctcctttttttaaacatacagagaatggattattcgaaaaccccagcgaaaacaaaactgttggattcgtcttcgatttctaatgtcagggtcgtccttcgagttcgtccttttcttcccccgggtgatttccgaccagagtggtgaccgaacaattgtgtgttt

SEQ ID NO: 159815 - DNA, 322 bp, Arabidopsis thaliana landsberg
gatgcctccaaggcgcttggctggatatgacccatgcttagacgattacgtgaaagtatattacaacagagcagatgttcaaaaagctcttcatgcaagtgatggagttaatctcaagaactggagcatttgcaagtatgtgttgttaataagttaattgtttctcttcttttgtatgatatatgcatgatggaacttgtctgaatagtttttggtattcttgtagcatggagatctttcataattggacttatgtagtgcaatcggttttgcctatatacgagaaactcatcgcgggaggattaaggatatgggtttacgg

SEQ ID NO: 159816 - DNA, 156 bp, Arabidopsis thaliana landsberg
atttgttccttttgcattttacacttttggatctgaaaatgtggttctctgtttcgcccgttaccgtttagattcagttctgttttttttcttacccgatcgcttgattcggactgtgatctttggtaagctttacgtattagatttgctgaagaa

SEQ ID NO: 159817 - DNA, 373 bp, Arabidopsis thaliana landsberg
tccttctccttagggttttgaccgcggctttcctccacataactgtggtcctcatcagcaccaacaccgtggctctcgaaatttcaagcacgtctatcaaattgcgtttcaacgatgtctatgcttataggtaaataaattatttaccttctctgtgaaaattttgtatccaatatttgactaactatttttacctattttttgcatatatgtttggattcatcattcatgaagatacatgctgtccgctgccgtcatcggactagtttacgccgttgtacaactgttcttaacaatctcccaatttgccaccggaaaaacacatcctcttacttatcagttcgatttctacggtgataaggtatttatatca

SEQ ID NO: 159818 - DNA, 714 bp, Arabidopsis thaliana landsberg
gtataagtatcattttccgtttcttgataccaatggaattgtcactgtagatgataaccgtgttgggccattgtacaaagacgtcttccctccagcatttgcaccttggctttccttcatcggtataccatggcaggttacatacctataaatagctcttattactttttcacatttcccctcaacattttaagtcataacaaattagatttcaggtgttaccattccctatgtttgagctgcaaagcaagtggatcgcgggtgttttatcgggttggatcccgcttccttccaaggaagatatgatcatggaaatcaaaaccttttactccacacttgaagtccaagggattccaaagcgatatactcatcgtatgggcaatactcaggttaaacatcccaagtttccgcacataaaattaaaaaaataaaccaaagctgaacagaaacacatcaatgacattttttgttgtttgcagtttgagtatgataattggttggcttcacaatgcggttgctcagaaacagaggaatggaggaaagagatgtgtttggcgaatggtgttaggaaggaagccaatccagagacgtgcagagacgaatgggatgatcatcacttaatttctcaagcttatcaagatttctctttgtactcataataaacaaaacattatatgaaagtaaatttaccgaatatgtaaatgccaatactac

SEQ ID NO: 159819 - DNA, 1895 bp, Arabidopsis thaliana landsberg
cttaaacaacagttcaatggaggtttccaacagcagaatccaccaccagggttcactcaacaaccacaacaagccccatcagctccagatcctgaaattaagtaactcattcaacagatcatccaaggacaagctactggagccatggcttttgaaaagaagatagttgaatcacataacatgatcgattgttcttacaacgatcaaaatgtcaagttcgaagctctgaattcaaaaatcaaatatgtggagagaaaatttgcatcaacctctgctccgaagcatcctcagcaactaccagggaaagcagtccagaatcctaaggactatgctactgctaatgctatccccatccaccaagaagatgagtctccaccaagtcatcagaatctcaatactgaggacagtatggttcaagaaggggggggatcaactcaaattgttacacctgccacccaccaattcgtatggactatatagcacatacctttgctgaatactcactgctctgaaaaacatttcaaaagataaaaactcaagaaggatcagaatcaagagatgattagtggagtcatcactcaagaaacttacaagaagaaattcatccaagaaaaacttgatgaccccggttcattcactctgccatgctccctaggaccattgacattcaaaaggtgcctttgtgatttgggagcatctgttagccttatgcctctctctatagctaaaaggctagggatcatggaatacaagttcttcaactttgctttactcttagctgatggttctgttgcacatcctcatgatctaatagaaaatctgcctttcaagatcgaaaatgttgagataccaacatattttgtggtattggacatagatgaagagggaaaggatcccctgatcctaggcagaccactcttagcttcagctggagcagtcatagatgttaggaatggaaagattgatctaagccttgaaaagagtatcaagatgagatttgacattagcaaagctttagggaatcaacaaaaggaggtcagaattttgggattcagaacatggatgttgatgaagaaacagaagctggaaccccaccaagagttagctatacttctcaactcagcaagttgaagagaacttttgaccacaagaagagagcaattgaaaggttagcttagactgaagatcctacagaagatgactggtatgagatgagaaaaatatttaaatggcaaagcagagtcatagagggattatcttcaagggtgatgaagctgaaagatcaactatggatgtttgaaaaaagagttaataagtattcaatgagtattgatccagagaatatggaaactgcactagctatcaaagaggacgaagatttcacaacagaatggtttgcaccagaagatcagaaaggagttcacttagaggaaagaagctttgagagcaagttgttgagtgagaaggaaattcctattccgatatattctctaggagtgcctaaaccgcccaccaacccctctgttgaagaagaacactagattcttgattatgttgctgaagaactcctagagttgtggattggatataaagctcaggaggatacaattggaaagttaactcataagatggaagagttaaacaacaccattctagaacttcaagaaatggttaaaggctacacaagttttgaaattgaggattggtcaaaggagcctggttcagaagaagaagactactctaatgttcagaaaaaagtttattttgaaggaaaatcaaataagtactcatcataccatatgtccagagaggatgcagagtatgattcgggcactgaaaattcaactactgaagatgaggacttctctgttcctctcttcaaccttttttctaag

SEQ ID NO: 159820 - DNA, 1900 bp, Arabidopsis thaliana landsberg
agaagctccggccgatgggtttacacaaattgagactcgcagcggcggttcctgtaaccttctcctctcgcctcttcctcaagccatttaccaatactcttaccctaggtttgttttcccgccatcttcaaccccgtaataagcctctccttgtcagagctttctccgcttccgccgccgtacaagatattccggccacacagacctccgattcctctggtattccagtttaccctctcttacctcgtggcattgcttttgaatgcaaagctgattcgttcctttttagtagcagcaaggcctctgtggaaggcagcgattgatttcaaatggataagggacaataaggaagcagtcgaaatcaacatcaggaacaggaattcgaatgctaatttggaagctgtgctccagctttatgagaacatggtcaatctccaaaaggttacctaatcttctactctcttcgaatttgggattcttagtagtagaaaatatgtgaagtcagctactttgaggaagaagaactcaaaagaaatgttaaagttgcaaaaagcttcttgttttcttagtttatggatagtttacttagtattagtttctagtctctggctagatttgagagattggattaaattgtttttcttttctctcggttcagctaatcaatgattgcagatagcaggaagttgagaggcttcgtgaggaaagaaacaacgttgccaaaaagatgaaagggaagctggagccatcagaacgtgagagactcgtagaagaaggtaaatgaggaatatccattttgtttgttagtctgggttctgtactgagatatcatagagcgtttttgccttcaggtaaaaatcttaaggaaagtcttgttactctggaagaagacctcgtgaagcttaaagatgagctccaacatgtagcacagtctataccgaatatgactcaccctgatgttcctgttggaggagaggattcatcggcaattagacaggaggtaagttacttttgtcagaactccctcaactcttgcgttgacgaaggcattttgctgtcaaaggtctttcttaaaacattcataattttcttatgtaggttggtagtccacgtgagtttagttttccaataaaggatcatcttcagcttgggaaggatcttgatctcattgattttgactctgctgctgaggtatacactttgtcttatttcataggcaccaaagcacagtttgtaggttgttggatcagatttggcatcttgcgtagctgctggttttcttttttttagtgcagttgtatttagactgaacatttgattacttcatattgtagagttcacttgagtaggtgaacgatcacctccttcagtaaagtattagattgatgaccaaatattttggttttccggtatatttaatcaaggagataagttgaagtaacttccttgttatttacactcatgcaggtaagtggttcaaagtttttctatctaaagaatgaggcagttctattgaagatggctcttcttaattggacattatcacaagtcatgaagaagggttatacccccctaacgactcctgaaatcgtgagatcttctattgttgagaaatgcggtttccaacctcgtggggataatactcaggtttctgcaatactagtgtgtttgctctgtttgataagtcaacgttttttgtttgttgccaatcatgcttccattcttctgaataggtctattcgatagatggaactgaccaatgtctcattggtaccgctgaaattcccgtaggaggaatacacatggattctattcttcttgaatcagcattgcctttgaaatatatagcattctcaaattgctaacgtactgaagcgggtgctgctggcgctgccacaaa

SEQ ID NO: 159821 - DNA, 300 bp, Arabidopsis thaliana landsberg
acgaacttcgacgcttcggtggagccgttggatatcttcaaagagaagtacccaggaaaaggaacatcccaagttttcaaaagagttgtctatggggagcatctggttcacaaactccagaccacttttcaaaatttagtggaacacagttaatgttaatggtttggatggtcattgaaatgaaaaaaaatgaaatatcaaattgtaatttgatttctatactacaataaagaattctacagtttgtttaccaatcggctagttttagtaatttgagtaaaaaacgatgagattcctcta

SEQ ID NO: 159822 - DNA, 255 bp, Arabidopsis thaliana landsberg
taacgatgtgtacaatgtactgtatatatactctatcacattttatactatagagtaaaatatactcatgataatattatagttaatttagtatttagatcttgagaaatgaaatactatataaaaatataaaattcgagggatttagtattaaatttttatggagatttgcaaaacactgaatttggtttgcaggcgccaagatgcttctgtcatggggcgtagtaatggaggaaaagagggagagatctagtt

SEQ ID NO: 159823 - DNA, 821 bp, Arabidopsis thaliana landsberg
attgaacaccggcgagcctacaattgtgaaatcatgctttcaaaagtgaaagtacctttacaggatttgacggtaatataaagctagacaggtttaggttgtactgtaatcatagctttttaatctggtacaatgtctatgtgtcgctatgtctgccatgataattaaaagctaagtgtctctaaaatattacagaactcagtgcttaacctggaggagtcggctcttgatgctgatcaggttgagaacctaattaagttttgcccaacaagagaagagatggagttactaaaggtataagacgtgtactcctagaataatgttcaactgctttgttttccaaagtcggaagtccctagaaaaaattggggtgttctgtgatctagcttttgtatgttcttttgacatttcttcatttcatactcggtttgtagggttacactggtgacaaggacaagcttggaaaatgcgaactggtacaaaactttagaaaaactttttagtttcattggagtagccattagagtctaacaccatatatgccttttgaaattgtttgaacagttcttcttagagatgatgaaagtcccacgagtagaaacaaagctcagggtattctcattcaaaatgcagtttacctctcaggtctgagaagctaataccttgctaattacgattctttgtggcttaattgtggtacttattgatgctgctcaccacatttttagatttctgaactcaggaatagtctaggtgttgtgaactccgcagcagaacaggcaagtcaaacgcaactgggtctaggtgtcctcccgccatga

SEQ ID NO: 159824 - DNA, 706 bp, Arabidopsis thaliana landsberg
atgtcattttcctaattaactgaaccaaaattatacaaaccaggatgacatcaagttgatgaaagagctaaatatggacgctttcagattttcgatttcgtgggctagattaatacccagtaagtaaatttacattattactatatacgttcaataaaaattaatatctatttaaagattttggtgaatctctgctttaacttttggtactatttaaaaggtggaaaagtaaaagatggagtaaacaaagaaggtgtagaattctataaggctcttatcgacgagcttgttgctaatggtaagttaactaatcaaagatattatgcgttataatatcttatattatatgttctaatgaacaaacatatgcaggcattgaaccatcgatgaccctctaccattgggaccatcctcaatcactggaagacgagtatggtggtttcttaagccctcaaatagtgtaagcgaacttagcaaattgatggttatattatatcattaagatagatataaaagaaataatattaactaatatttttaattctcctaaacagagaagattttcgagatttttcaagagtgtgttttgaagaattcggagacaaagttaagatgtggactactataaacgagccttatgtcataactgttgcgggctacgacactggcagcaaagcggttggacgatgctcgaaatgggtgaata

SEQ ID NO: 159825 - DNA, 783 bp, Arabidopsis thaliana landsberg
gccagtgtccccagaagagttaagaaaaacgggcaagtgtccactaacaccagaggaagcaactctggttcttgctggtcttggattcaagagaaaaacatatatttacttagctggatctcaaatctatggaggctcttctcgtatgcttcctttaacaagactgtacccgaatatcgcgaccaaagaaactctccttacacctcaagaacttgcgccattcaagaacttctcttctcaggtaaaaagatataaacaatcttaaacttactttttcccgagttactctgttcttgctcaaacttcatttcgatgttttcggacgctgttttgcagctagctgcactagatttcatagcttgtatagcatcagatgtctttgcaatgactgattctgggagtcaactatcatccttagtgtctggatttagaaactactacggaaacggtcaggcaccaacattgagacctaacaagaagaggcttgcagcaatcttatcagacagtgaaacaataaagtggaagatttttgaagatcgtgtgagaaaaatggtagaggaaggccaaaagcttcgtactaggccttatggacgcagcatttatagacaaccgagatgtcctgagtgtatgtgtaaattttgatccttgaaagtaaaacaatagtgtctggtctgaaatttttgattacccgttagtacaaaaaaagaatgaaggtactgtatatcattgattttaagttttgactcgttatgaaacattgaactagaacccctttagaaactc

SEQ ID NO: 159826 - DNA, 1054 bp, Arabidopsis thaliana landsberg
atggtggtaattggtaaaatatgtcaaattaattatgacatattagtcattctcttcgtgagagtgaacgtgaaaaaaagaaggtatattgtcggagtgagccaatatcatcatctcaaatggttatatacaaggaatatgcatggatcatggatcaattcatgcatgctgtattggaattttatgaaacttaatactatgtttggagcgtgtgttttaaacatttttaactagtattatagctttgactcagatccactctataaaccagatccatatggtaaggaaaaaataaattgttaagaagcaaggtcaacatgaggagtagaaagaagacaaaaaagaacgtgtattgtaaccaacccattatgtccataatctctataaaaggaaactcaagacaagaacacaaaagcaagaagatcagaaacaacacaaagatgaaaacattccaattgatgatgatctctttcttgttcgttgcaataacaacaacatccggtgtggttagtgagggtaacgacgtagtttatgacggcgaaggagatccggttaagcccaacgttccatattacatcagcttcatgacgtcggattacaacatgtggatctgccgaaagaaatggagatctaatgatcccaactcctgcctcatatgcaaccggtaatggtcactcatccaaatgtggcagcacccacaccggttatgtttgtgttatcaaacaaatcagagacagtcgcacgtgaatcagccaaactcaagattaagttcgtagatccccgtccctgcggtgaatccgggttttggagagtagttcagagaacttcttcagaaggtgaagtagtcctcaacggatctgaatctacgtcagacaatgccagtacgttcgccatcgagcaaactaacgaatactacaagttcactttcggtgacggccctgactatctaacgactatcagtttatccaacgattatccaatatataggttgatatccaagaagttctctggagaaatggagatttatttctacaagaaccttactatgggttaa

SEQ ID NO: 159827 - DNA, 346 bp, Arabidopsis thaliana landsberg
taatatactaatgttgaatttatatgtaacggaaaaaaagattcgaacaatttctgataagttttaaaataaaaatgataagtcgcaatgcaaacttcacagacgtttgcggaatattaccaaaaaaagaaaggaagtttgtttcgaaaaactaaagagctccttaagctgagagacttgtaccactaccaccaacagagttgttatccatcttaatcttcttagttggaggttcggattcttcttcttcttcttcagaaatggatgcatcagcctcttcctcactcttcttaaaattctctattatctccacatctctctgttcacatgttttattatacatttg

SEQ ID NO: 159828 - DNA, 4993 bp, Arabidopsis thaliana landsberg; identical to SEQ ID NO: 34996

SEQ ID NO: 159829 - DNA, 740 bp, Arabidopsis thaliana landsberg
attagcaagtatgcgagtatcctcttcgtggcgcttttcgggtcgattgatgtaacgggcattctcgatatgcaatggggtaaagtagggatcgatgattggtggagaaacgaacagttttgggtgatcggaggtgtttcagctcatctctttgctctcttccaaggtctcctaaaggttttagccggtgttgagcacaaacgtcacagttacatgtaaagcagcagatgatggtgaattctctgagctttacatcttcaaatggacatcactcttgatccctccaaccacactactcatcataaacgtaatcggagtcattgtgggaatatatgatgcgatcagtaacggatatgactcgtggggtcctcttttcggaagattgttctttgccttttgggtcatcctccatctatatcctttccttaaaggtctgcttgggaaacaagacagaatgcctacaatcattcttgtctggtcgatccttctcgcctctatccttacgcttctttgggtacgagtcaatccgtttgtggcgaaaggcggtcctatcctcgagatatgtggcttggactgcctttgattcgattgaccgatggatgggttggtgaaaaaggtttaattcccacggatcaaagagaggtaagagagatattgttttacctctaaaagactccttcattgtgttcattagatgatgaaaaatgaaaagaaaaagaagatttaattttgttacgaga

SEQ ID NO: 159830 - DNA, 233 bp, Arabidopsis thaliana landsberg
tcaaaccgccattgacgaatcagctttagtgcttaatcgcactgagaaatcggcagaggcggtcctgcgagtagcatcaatggctctaagtattacgggtctcgtcatcatgatcaagaactctatctccaacgaatttggctctgtttcttactcaaatcttggagctttcatgttcaccttcttctatctctctctttctcttcttgcttcattagagcgtaatcaatcat

SEQ ID NO: 159831 - DNA, 962 bp, Arabidopsis thaliana landsberg
aagcaacatgagtaatcatcaaactgtgcgtgagatacttcctctcttatatctcactgtgtcagctcaatgatatgaaaatttatcatatatgctttttaatcatcttgaatatgactctaacaaagcaggtattgaagcaactggagccatagtgtgaacttaaagacaaagtggttcgtgtgacaggagcttcctctggtataggaagagaggtatgtcttgatctagccagagctggctgtaagattatcgcagcagctcgtcgtgtagatcttctcaaatctctatgctctgaaataaatcgcttagaatattcagctggaattcaagctgaagctcttgagctagacgtttcatcagacgcagccaccgttcaaaaagcggttaagaaagcttgggaaatcttcggaaagatcgatgcgttgatcaacaatgcgggatttagaggcaatgtcaagtcgagtttggatttgtcagaagacgagtgggacaaagtgttcaagcccaacttaaccggaacctggttagtctccaaatacgtatgcattttaatgcgcgatgctaaacgtggtggtggctcggtgataaacatttcatcagtatccgggctccaccgcggtcaggtgcctggtggagtcgcatacgcttgttctaaaggcggtgttgacaccatgacaaggatgatggcacttgagttaggtgtttacaagatcagagtgaattcgatcgcaccagggcttttaaagtcagagatcacacaaggtcttatgcaaaaagagtggctcaagaccgttatcgagaggacagtcccattaaaggtacaacagacagtggatccggggcttacttctctcctacgctacctcgttcacgactcgtctaaatatatctccgggaatacatacattgtcaatgccggagcttcattggttggtctgcccattttttcatctctctaa

SEQ ID NO: 159832 - DNA, 550 bp, Arabidopsis thaliana landsberg
agtcccacctaataaacaattgagaagagttacatcaagaatatataacaactcttacaagttacaaagatctaatccgataatatcgatatcttacgaggcaaaatccgtgaccatgagatcgaaaatcggtaagcatcgaagccaatttgatgcagcaaattcacatcttcctgattttccaaaaaaaaatcatgaagcaaaatgtaatgcttgatgtataattgactttatttcttttttgggtgaagaaagcaaacaagaccttgtaaagattgtaagaatcatctgcaatggacccattactaccatccattatcttttctgaaaatgaaaatgacaaaaatatttatctttaaatttaataccaagaaaaagaaagaagtatcaagaaggttcatcatcatcaacccatttttgttatgaacacaagacaaaaccagattcacatatatgaaccaaactccaacattttgaggcttaaatctttatagagatctaaagcttttggggtttctaattaggaaaaaaacctgggaatttttcagag

SEQ ID NO: 159833 - DNA, 506 bp, Arabidopsis thaliana landsberg
cggcaaacttgttttactcgcaatacatattactctttgtcacctctaaagaagcttcgaaactagcacttgttgtttcaattttcgtacatcaattctcatcaaaagccgactcaaacataaaccgagagtttataaaaagcagatgtcagaaagactagaagatgactttgcaatcgatgaagagagatcctcctactatggcggagcctccataccattcatatgggagtcaaggccaggaacacccaaaaaccacctctgctccgattcttctcttcctctgcctctcacaccgccgccctcatactactcctccgggattttgtcgacaccaaagacgcaaagcaaggtgagatcaaaactaagtaagtttctgtccttctccatgttcagtgatctcaggaggagcaatcacggtagcaagaagacggcaagctcatcgttttcttggtcttctacgtcatcttcatcttccttttcctcctcgccaccacattctttga

SEQ ID NO: 159834 - DNA, 670 bp, Arabidopsis thaliana landsberg
agccaacttagcgtttgtaattaaacttatttttctcgccttaatcaggctgaagcttcatgttgagcttatcctcaaatgcatccggtcgttaccatccgacagtgccaatcaatcaggcatcccaaactggggacaactagatgaattctttgcacaacactttaaagaagaagaagcagcaggcgaagctgagtgatgaaggcgtcaatgtacagcaatttgtttcttctcacatcctttataaagtcaaaattcagagtttgggtatgaggatggactactcgccctgtagattaacttacaggtaacaaattccttctctctgacaccattaaggcatttagtgatcaagtacaaatatatgaattgtaattggtctcatcgggttacatctcatttgcaaaacgcggatcatgtagcatctcgaaaagcaataacaacattttgttcatctactgcataaagaaattagagcgaattctgatggttggacctacaaaatgcaggcatattacagttattggctcgaatgaacattatatcaaactatggttgtaccaaaagttccgaagcaaatcatatatcaaactctctcttatcttttggttttggattttctcatttacatcacttgttgcttctctcttttattttttctttatttttt

SEQ ID NO: 159835 - DNA, 1378 bp, Arabidopsis thaliana landsberg
tagctgcttctgttttccgatctccggagacatctccgattgtgacaggctttgaggttcctgttgattgttctggtcgagccgttcgtgtagctgtcgtggactcgattaaacaagactttaaacgatcctacttcgtcacaggtcagtgtaaaatcatccaatctgaattctgtttcttttgtctaaatcgaaatctctgagttttcaggtaatttgacgccggaggtttatgaggagaagtgtgaattcgctgatccggctggatccttcaagggtcttgctcgtttcaaaaggaattgcactaatttcggaagccttatcgagaaatccaatatgaagctcatgaaatgggagaattttgaggtacggtcaactactaaaagatgtcggagtaaaagtttcgttttttgtttctcaccagagctccatcatgagttttgcaggataaaggaattggacattggaaatttagctgtgtcatgtcgtttccatggaaacccattctttcaggtatttattttatcaaggaaaccttaaaagttttcagatttttgtagcctttttaggataaagtttgcaactttaatagcttcaatgattagtaatgaagacaaaaagaacaaaacttttactatgtctttttatggaaatctgtttttacagcaactggttacacggagtattatttcgacacagaatccgggaaaatttgcaggtaaaaagattacttatgagctcattaatataaaccccactaatctcttttcaactttgaaatcttttgtgaagaagaagaagctggttaaacatattttgatgaatgttggcttgcaggcacgtggagcattggaatgtccctaagattgctctgttcaaacaacttctgagacccagccgtggtttagtggggacacaaaactagcgcagatgaagaatgatgtcaatttcaaattagattttttaaaccgtaaatatatgaaacttgcttctgaaactaatatgggatactctgctcttagagatctgtaatgaatctattcaagatgacacatataaacatactatcactgtctcattaaaacaaaggtccattcttctcggttggacaagcaacagagaaaccatgcttgaacctcttcaaccttgcaccgtctcaagttttaaccgtactctatgaatttgcattctcttgaaaaaaatgataattttctagtgtcttaagtacaattgacaatatatctcaagcttttggatacaattgtcactttgaaggctccatgttctcagctgctaaagctgctgcagaagcagccttgtcaaaaccaagcttctgcaactcggttaagaacccatcgagctcacttgctgtgatcat

SEQ ID NO: 159836 - DNA, 783 bp, Arabidopsis thaliana landsberg
atggccgaaacattagtggcagaagatgactttgagctctctaggagaagcacagtcatgcataagcgaaggactatcatgagcaaaagtgaaactcgaaggacacgcatgcttaaagaacagcgaatggctcgaagctttacacgtgttagggctattgtaatgaccacgacaacacagctcgtctgtatggaaagcctcacacccactcttacaagccaccacgtgtccactgtgtgaccggacctgaagatgagccggacacgtttttattagatcttcacgacaaccaacgacaggacagacaccatggccttcgtgaggagtcacggtcatcggaacattgtaaccgtcaacgagagagacaccgtaagaggagaagtcgtggtgaccaccgtggtggaggtcgaactgagctagagaagctggtggtgccccgccgagaccgttgcattccaggcggtttccgcagtctccggtgaggcaggagaattttccgttgtagtgggcacaccaggttctggcccagatgcgaccggaccagtgtgtggttggaacgttgaaggagcggtgagtgaaagttgggagagcgaagcacctttctctaggacggggtggccggcgttgggttgaatggctggccagacagtgaagggacagttgttgacgacggtgaggaagagacgggaagtgtctacggcggaggagaaggagatgaggaggaggaaggaggcggcgagaggaagagaggttttagccattgtgtagcttttggtgtgaaag

SEQ ID NO: 159837 - DNA, 940 bp, Arabidopsis thaliana landsberg
catattgcttgttgtacacggtaaagatttcaaccaagacattgacataacctggggtgatggtagaggaaatattttgaacaatggtactcttctaaatctcggtcttgatcaatcttcgggttcagggtttcaatcgaaagccgagtatttgtacggaaaagttgatatgcagatcaaacttgtcccgggaaattcagccgggaccgtgaccaccttctacgtaagcccttcttaattagctagacatacatataaatctgttaccgtatgttatattgtatgatacattttgagggcttttggtgtgtagttgaagtctcaaggattaacatgggacgagatagatttcgagtttttggggaatgttagtggagatccatacattgttcacactaatgtttacactcaaggcaagggtgatagagagcagcaattctacctttggttcgatccaacagccgcgttctcgcaactaatccgagtcacatagtgtaagcatatataccacaatccaaatgatagttcacaaagtgatttttttagacatcgaactgaaagtgaaccggtttggtttttggattaatttgccaaatcaaaaatcttaaatcactagatccatgacgttaaatatatatttcatcttactataaattttgttgctacctttatatattttcaactcatttttaattatactatgaatgatatggttaataaatataagaggtgacaaaagctaatcacaacattataatatctcattgaacaatatcttggttcatatttttaatttcctaataggttctatattgatgggaagccaatcagagaattcaagaacttggaagtattgggtgtggcttatccaaagaaccaacccatgagaatgtatggaagtctatggaacgcagacgattgggccacgaggggagggctg

SEQ ID NO: 159838 - DNA, 218 bp, Arabidopsis thaliana landsberg
caaacccttaagatctaattttctctgtgtgatctgacctctcaacaatggcggcttcatcagattgcggtgcctccgacgtctcctctgatttttcagactctcatcgtcgccgaaaggatcgccgtcatcatcgtataaacgatcgagacagagactcgctcaaagtaccgaaaaagagcccatccaactcgaaaaaacgccgaagacgccaacac

SEQ ID NO: 159839 - DNA, 1224 bp, Arabidopsis thaliana landsberg
atggcaagtgaggtttaaccattttgtaggttatctttctgcatttgttcttgtggttcttttaacttgtttataagttttaaaatttctcgattaagctttggtttcgtacttagaaaggatcgtcatagcggattcgatatatcggtttatctgttatggtaacaaactaatgagaatctgaagcattttcaagcgaaattagctcgtcttgaggagtagattcatactgaataaagcttatttcagctcaaatggcttgaagttaatatgactttatgactgatatttgctttcagttgtattagatagtacatatccacatttggtggtatcagatatatttagctgtaaggattaagtattattgagcctctaatacttatctacttggtaaattatctggttgactcttgtgtatggttgaaaatgcagcgccggagatagttgagaagcctggtgatatttcattgtcaaagcttaaaaatttgtacattcaagcaaaagagctttcagaaagtgaagtaacgtaagccatatttcttcatcatttcctttcagttgttacatcagttttgaatggtttagagagtgataatacaactaaatgacattttgtgagccaaaaataaataactaaagctttgtgtttaatgcagcgtttcaaatattctgcttactcagttggattctctgcttccatctggaccaactgggcaacaacgcagaaaattaggtatacttccattactgtttagactcttctttgaatatttcaggctagtcatgtaatgtatatactctttgggcgttatttgtttttgtgagaaagataagacttgatactctcttttgtgtctcaaacctctccaatgatttgatatatatataagagggattaagctttttacgatgcttgtaatgatatcacataagtggcagaaggcaacgaacagaagagaaagagaatgaaagtagatacagatgtaacaagagtttctccttccatgagaaatcaaatcgaggcatatgctagtctaaagggtgaacaggtacaacaacagctacttctttctttgaattgaatcatttgtttcctccaaaaatggtaaatttttaaaacatctgttttatgtaggttgctgcaagagtcacagccgaggatgccgagaaggatgaatggtttgtggtgaaagttattcacttccacagacaaacaaaaga

SEQ ID NO: 159840 - DNA, 538 bp, Arabidopsis thaliana landsberg
attttatgtcttaagctcttcttcttccttgacatttcctcaatttcactcccgagtacgattaacaatgcattgtcacaacgatgatgttcgcttctcttcatcttctatcagaatccattctccatctcccaaagaacaacactctttactcaccaatctccaatcctgctctaaaaccttcgtctctcacctctcaaatactcgtaactcactaaaccaaatgctccagtcgctaaagaatcgccacactcctcctccacgttcggttcgtcgtcccaatttaccgactcagatgctcaattcagtaacccagcttatgattgggaagtcttctccaatttcattgtctcttatccaatccacccaattcaattggtctgaatcaagagatgagaacgttgagacaatccgtggactaagctcgcctctgctctgttgtgcctctctgtctctaactagacctaacgagtcgactcagtcagtggaagggaaggatacagtacagcagcagaaggggtcactcgtgagtcgaaat

SEQ ID NO: 159841 - DNA, 880 bp, Arabidopsis thaliana landsberg
cccattttcttactctcttgccctttcttctctcactctccggcgactgttacgagtttttaacacttccgtcgtcttctcaggtttggttcttctcatttatgttaaaccattatgtatggtaattctagaatgtagatctggttcgttctcatggatcttgattaatatgtttgtttaatccacgtattagcactaattttggattattatttggaactgttatcattagataagttttgaattatttgcttaagtaaagaagataagagaaaataatatttattagtctgaacataatcttatcttaagataaacagaatttatttccaaaaaaataagtttttgttaaactaaacacaatttattaccagcaataaaaagattctgtttaatgttgttatcttaataactgatcttttgtctgttttttagatgttgttgttgttgtttatgacaagatcttgttctatccattaaaaccaaagaaatggaggaaggtcataaagagccattggtgctaagagttgaaggatcacattgttctttatcagagatggatgattttgatctaactcgggctttagagaagccgaggcagctaaagatcgaacggaagagatcgtttgacgaaaggtcgatgagcgagttatcgactggctatgtaagacaagatagcattttagaaatggctcattctcctggaagtaggtcaatggtggacactcctctctctgttaggaactctttcgagcctcatccgatggttgctgaggcttgggaagctttgagaaggtcaatggtgttctttcgtggtcaacccgttggtaccattgcagcttatgaccatgcctccgaggaggtcttgaactatgaccag

SEQ ID NO: 159842 - DNA, 3332 bp, Arabidopsis thaliana landsberg
  unsure (1)..(3332): unsure at all n locations
catgttttgagcattcatttgtcatcactttagcatcatatcatcactgttttatatcatttctcatcatttgtcatcactttgcatgtttaggatagttttgcatgcatgttgcatatttgtgttgttttaaggtgattcggagttgttgacgagctaattggaagaagcggacctgatcatgcaaaaccactcgacccctaggtcgagtagacgattcacaacctcagcagaccactcgaccccctggtcgagtagaggacatcaccacttcacctcaccactcgaccccgaggtcgagtgtctacatccccaccaccggaccatcactcgatcacatcactcgaccccgaggtcgagtgtcttcacctccattacctgatcatcactcgaccacatcactctaccaggaagtcgagtatcaccatcactaccactcgactacatactcgatggcaagcttcagagccatcttcattccgcactcaaccagacactcgagcacaaggaagaaaagaagaccctaactattcactcgacctcccactcgaccacctgggtcgagtacagtttttaatccgtcccaatactgcgtcgttttaagtattagggtttcggaatatttggctataagtagcatgtacttcacattttcgcaaacaagtttttatctagctttattccgcagacactgtgttctagatctttgtaatccagatttctctttatctattcagtattcagtattcagtatttgttcttgatttcgtttactaagatgttcatcctgttatcatcttgctattactctgttgctatcatgttttcattcttatcatcgtttatgctttctacaatgatgtcttggtagtgactaggtttatgaggatgggttagagtagtttagaattctcagtatgctgggtagttgagtttgattgatagatcccttctggattagttgttcttaatgcctattgctttctgatcaattggaatttgagcccagacatttttgcgtccaaaaggtgttcgatgaaatgtctaaaccactaatttcagagattcgtggccgtgtaccaaggtattggttgtagggagcgttttggctttaacttgttgattcgtaatgcctgttaggttaggtctcgtcaatggtgattgagtctgggactagtttaacttgagggtctctgttgcggtggcacttagatttggttaccgaacttgttgtctagggataatttgttgagcatgtcaatcacttgtaaactgaggaaacgaaactactcaattatcccatcctcgggaatgccttatctgattgatttctttgtttactcttctgttgtttacttcatcttgttacctgttgcttagaatttgcatttctttcctgttacnnnnnnnnnnnnnnnnnnnnnnnnnnnnnnnnnnacagactgtgcagtcgagtatctgtgtttcatttttctgtctgttactcgacctgtcactcgacctcacccagtgctctgcaaagagctgtgttggtcgagtgttttactgtttctgcttgaaattctcttttctgcatgttcacttagaactgctagaacacaccacaacctgttattgcttggcttgacttagtgacttctgatcacatcttgattgttagcatcacacccatttggattgacaacctaaaatactacaacgacatgattggtgttttaggataactgacttaaaaacctgttatcaaaatactagatggctctagatgcagcgagcaatggtaacttcaatacacgttattcagctgatgctaccgctttgatagagaatctcgcttgtagtaacagcaccaagaatgttgactttgggaggaagaagattgctggagctgtttcaggtaatcaaatagcagaggataagactattgagtccgaataggagtctgaagagggactcttctacatagatagtcagagctacggaagtttggacaaccatagggtaacttcagtgggaacgggtttacagggaaccagagttcatcaaactacactccaaatcttgccttccagaagacatttcctcaaaggaacttccagaggacctatggtaattcagcaagcccccccccctccctctaccctcattagagacaagaatggaatccatgcttgagtagattcttgagagccaaacaaagcttgttatggagtttaatggtacatcgacaatcttagctctcacttgaagaagctggatgtacatttagctcaaactgtacaatccattaagagacaagagggctttcttcctagtaatcatgatgctaacccaaggaagagttgtaatgccatcttgatcaaagaaggagattatgtgtgggaagaattggacattgaagacgagttggagctcgctgctgtagagttggtgtcgaccgacacctactagtgtcgatcaacaccatatggaacattgttttcagaattggttcctcacgagggtgtcgatcgatacacctctagtgtcgacactggatccggactgcaccttgtgaggtgagaatcccgatgcagctcgagtctgcgtacactcctcctgtcccttatccaacgaagcgtcgttctaagcaggatattcatgctgctaagtgcacaaccatcatggaaaagatcctcacttctcttcctaaggatgcttctaagacatcttcttctccactcaacaggtatgtcaaacgacttgttgacaatggcattagctctgatgaacctaaactgctgacaagggacatcagtgcaatcatgttgcataaggtcaagaaagagaaggcacaacgagtggacatagcttagtacatccgcaatatcactcctgatcagaccattgagaagctcacagatcctggtagcttcattcttgattgctctatgtccacaagcagattcagccgctctttgtgtgatatgggatcaagtatcaacctcatgcctaagtctgttgctgagagattaggcatgactaattacaggccgactagaatcactctcctcttcgcggatcgttacaaacaaatccttgaggatgtccctgttaagttagtaactccttaatcccttctgactttgtggtcctggactatgataaggaacccaaggatcttcttatccttggtagagcattcctagctacagctgatgctaggattaatgtgaagagaggtaggatatctctcaaagtatgtgatttggagatggagtttggcataaattgttcagagttccctaagcctatcagtagtattaattctagcacaaaggcatctcctcaga

SEQ ID NO: 159843 - DNA, 359 bp, Arabidopsis thaliana landsberg
gctcaatcctcgggtcaacattaataaaaaagtacaagtgacttaaaaagtttgtgtaaattttttttgcacactccagatcctatgggcaattcaaaatcacaaaaacaaaaaattatataataatgggtggctgtggtagtagacccaaggaatcagacatgcaaaacgaagaaggctctgttcctaacaagcctgtctctgaaaacgtagtagccaaggtaacaattaatctctaggttttaaatatgataatttaattaggttttgttaccaaaccgggcttaaccggttatgatcttttggtatgattcattaatacaggagaacaccccacaaagcggtgagaagcagaacca

SEQ ID NO: 159844 - DNA, 570 bp, Arabidopsis thaliana landsberg
aaattggatttgaaattaatctttctttggtgtttgcaggatggaaattctgctgagattgcacaaggacaagagctatcatcaccgggccgagacctatggaggcgaggtcttgtgttagatttaccatcaacaacacctgaagatactacaagagatgatctttttagacgaaatgcatctttaacttcaagtcctgttgccaaaagagtcaacttttctccaatgtccagccctagagtcggacaacgtggtgcatccttgagtccttcttcttctacttcttcttcttcaagaaacaaacctaatagcctgaagaatctaatccccaagttaagctttaagaaccggaacagcaataacgataatgtggatatcgagaaagccgcggatttgggctttgtgtcctccccttcttcaggaaatggcagggacaggtctacatggactctcactaatattttaactccaagattgaagaaaactgagtctcttcctgtaacccctatagctcactcaaatcctgagtccactcacgggagatttgccgttgatctagttacttccacg

SEQ ID NO: 159845 - DNA, 540 bp, Arabidopsis thaliana landsberg
ctttctctaaaccaatctttcaaacaccttattcgtcttcaagatttctccaacaagtcctaccatgtccggcgaaggagacacgaccctcaaagctatctgttacaagcctggctctctccagttactcgatcaggttctctctttcacttctataaagttttcaaatttatactttttttcctcaaatctgattactcgtctgaattggaacagaggaagcttcctttagagactatttacttagagattcgtgatgcttcagatggatggtaaagtctttacctttatgattagagattgttatgggaaaattgtggtttaaaaagtttgatacttttggtaggagtgctatacatgaaatggttgtacgtggtgctcctgctatagctattgctgctgctctctctttggctgatgaagctttcaactttcatggctctgatggatcagcttaacatgctgatgcttttgttgagaacatagtggaccatttagtctcaaggttggattttgcatttgttagttaaaccctttgca

SEQ ID NO: 159846 - DNA, 1337 bp, Arabidopsis thaliana landsberg
gttggtgagaggctaaaactagcaagaggaggacaacagttcttggccatgtactcaagtgttgttgatggaattacaaccgatccagcagcgatggttcttccattggatgatcacatggttcaccgtggtcatggagtctttgacactgccctgatcatcaatgggttagtcactttaaatagtagcccccttttctaatttgtcttattactcaatcatctgagcttcgcttgttgtcctgcgaataagcagatacctttatgaattggatcagcaccttgaccgtatcttgcgatctgcatcaatggctaagatcccacttccattcgatcgagaaactattaaaagaattctcattcaaaccgtgagcgtttctggatgtagagatggatctctaagatactggctctctgcagggccaggggatttcctcctatctccatctcaatgtctcaaaccaactctctatgccattgttataaaaacgaacttcgccattaacccaataggtgtcaaggtagtgacctcgtccatccccataaagcctccagagtttgccacggtgaaaagtgttaactacctccctaacgtactctcacaaatggaagctgaggccaaaggagcttatgcaggtatttgggtgtgtaaagatgggtttattgcagaaggcccgaacatgaatgtggcgtttgttgttaatggtggtaaggagcttgtgatgccgcggtttgataacgttttgagcggatgtacagcaaagagaacacttacactcgctgaacagcttgtaagcaaggggattcttaaaagtgtgaaagtaatggatgtgacagtcgaagatggaaagaaagcagatgagatgatgcttattggtagtggaattccgatcagacctgtgattcaatgggatgaagaatttattggtgaaggtaagtaagattatcatataaacattttaaaagcctcacttttaattacttacatgatggatagattggctgattaaagatgggtttctttctgtctgactcaggaaaagaaggtcctatagcaaaggcgcttcttgatctgttacttgaagatatgagatctggtccaccttctgttcgtgttcttgttccttactgagccaatcactctctttgttcatcaaagacaataagctgtggcttttttgtaaagctttgctgttattgtaagttgagtttatcatggggtttttaggtatctgtctttgtaaagatttctctttatcacttttgaattatgattgtacccattctcaacaattcatggagtggttgcgtctagtgctcaacattcttgcttttcat

SEQ ID NO: 159847 - DNA, 949 bp, Arabidopsis thaliana landsberg
atggcgtctcttctgggaacatcttcttctgcaatctgggcttctccttcactctcttctccttcctcaaaaccttcctcctcccccatttgcttcaggccaggtaaaccagtctctccaaaccttaaaatcttactgttttttctcaattcgaaatcatggtgaattgaatttttgtatacaggaaaattgtttggaagcaagttaaatgcaggaatccaaataaggccaaagaagaacaggtctcgttaccatgtttcggttatgaatgtagccactgaaatcaactctactgaacaagtaagcattttttgatgatgttcactgaaagtttcagactttgcttgattttgaagttaggaacatgattgttgtttgttttttatgttatggtggttttgggtttttaggttgtagggaagtttgattcaaagaagagtgcgagaccggtttatccatttgcagctatagtagggcaagatgagatgaagttatgtcttttattgaatgtgattgatccaaagattggtggtgtgatgattatgggagatagaggaactggaaagtctacaactgttagatcattagttgatctgttacctgagattaacgtagttgcaggtgacccgtataactcggatcctatagatcctgagtttatgggtgttgaagtaagagagagagttgagaaaggagagcaagttcctgttattgctactaagattaacatggttgatcttcctttgggtgcaacagaagatagagtttgtggaaccatagatatcgaaaaggctttgacagaaggtgtaaaagcctttgagcctggtttgttggctaaagctaatagagggattctttatgttgatgaagttaatctcttggatgatcatttggttgatgttcttttggattcagctgcttctggttggaatacggttgagagagaagg

SEQ ID NO: 159848 - DNA, 688 bp, Arabidopsis thaliana landsberg
gctacaaaatcttcactctttgttcatcttcctccgccgcttcttcaagatccgttttgtctctacgattccggtgaccgctcgtggagaaaattcggcggcgttgatcaagttttacctcgtgggtttaaccaagatggagtcttttacaatgggtcactctatttcgctagatccgagccttttctaatcgtgagcgttgatctcaacgacggaaaatggacaacagccaccggagacggtgtttttccggcggatgatgagatcacgtttgctagattagtaagtgatccagagaagaagatactttacatggttggaggaattgggagcaatgggatttgtaggagtatcaagatttgggaatttaaagaagaaacagagagttggatcgaagtagaaacattaccggacattgtttgtaggaagtttacttcggtttgttaccataactacgagcatgtgtattgtctgtggcataaggagatgatttgtgtgtgttgttacaattggcctgagattctgttttttcatgttggaagaaggacatggcattgggttcctaaatgtccttcgttgccggagaaatggagttgtgggtttcgttggttctcttttgtcccaagcttgtctgcttctgtttagttgttatgtgatgtctgtattcatctttgttatagagtatttg

SEQ ID NO: 159849 - DNA, 558 bp, Arabidopsis thaliana landsberg
tcatatccgagaccccatgcccgtacccgtgttatccaacgccgcctattggcggtggctcctccacaccctccatgactcaaccaccaccatatcctcctccaggcgttaactaccctactccagctgggaatttaccaaattaccctcctccggttgggaatatacctaactacccttctccaccgtatggtggcggagacggtagtggcagcagcttctatggccctccaccgccgaatgctatcttgccgtacttcccttactactttagaaaacctcctcaccaaacggatcaaacgtcatcgtcttcacacgtggcggttccagggaaatggacggtgaggatcgtagccgtggcaaatcttgtggttgttggagttctcggtaacattctgtttataacttaataaatacgtaactcttgtgggagttttttttgtgtgttatgtatgtaagagatattgtaatactttagaatatactgaagcggaactgtagcagaaaaaattgttgatttacttaagaacattattcgaagtatttcttgtactattt

SEQ ID NO: 159850 - DNA, 6094 bp, Arabidopsis thaliana landsberg
  unsure (1)..(6094): unsure at all n locations
gtcgccccgacttcaaccggtggtggcggagtctgctggccagacgcttcctgggaattttggacgctcggactgacggtgccctggaagttgagtcgnnnnnnnnnnnnnnnnnnnnnnnnnnnnnnnnnnnnnnnnnnnnnnnnnnnnnnnnngtatgcgttgtgagccgatctgatttcggaatgattagccgctagtgctgcgagttggccgttgcattgctcttggaaggtcacgaacttgtcggagagagacgtcacggcaagctgctgtcggtcagtcttctcggatagctgctgaagcagctgcttaatgtcgtcgagggtgggggctcggtcgccggagctctgatcgtcgttgctactcatggtgactttgatcgttgttctgaagtaaaagactttatttcccctccttctagcgccaaattgtggattccgacatccacaacactatgcatgctttcagctacagatgatattacaacatcaggttcacttcaattcgaactcaaatctattgaagctgcaacaagtaattttcagaagaggaacaagcttggtcatggtggatttggtgaagtttacaaggcataatgttcttaaactttctcacctactagtttgtgttataaactaatattcaaaaatgagaaaagacattctgaaagttagtgaaagatcatacgaattgacagggaacattcccgaatggaactgaagttgctgtgaagaggttgtctaagacgtcagggcaaggtgaacaagagttcaagaacgaggtgcttcttgtagcaaagctccaacatagaaatctcgttagacttctcgggttctctgttgaaggagaagaaaagatacttgtctacgagtttgtgcacaataaaagtcttgactacttcctctttggtaatagatttatattctctatatcttagtatcttataggcatagtctaataatggctctatacattggatgtgcagaccctgtaaagaggggtcaactggattggagaaaacgttataacatcatcgggggaattactcgagggattctatatcttcatcaagattcacggctcacaatcatacatcgtgacctcaaagcgagtaacattctcttagatgctgatatgaatccgaaaatcgcggattttggaatggcaaggaatttcagagtggaccagactgaagacaatacaggaagagtagttggaacattgtaaataatcttccatttcacttacattctgtctgtcctttttcctttattttgatttctgatcaaactaaaagtgatatgtgctgtgttttgcagcggttacatgcctccagagtatgtggcgaatgggcagttctcgatgaaatctgatgtttatagtttcggagtaatgactctggagattattgttggcaaaaagagtagtagctttcaccagacagatagttcaataggcaacctggtcacatatgttagtaccaaaaatccagtttattctccaacttctttttactcttttaaactgtgaccatgacctgaacattagtttcttgacaaatgacttacaggtttggaggctttgcaacaacggatcatcgttggaactcatagacccggccatgggggagaattatgataaagatgaagacattagatgcatccatatcgggttattgtgcgttcaagaaaatcctgcagatcgtccaaccatgtccatagtatttcagatgctcactaatactacaatcactcttcccatacctcaaatgcctggatttgtcttcagggtcagaccggagccaaacccatcagctgagagattgcagcctggtccgtctactgccatgtcgtttgcttgttccatnnnnnnnnnnnnnnnnnnnnnnnnnnnnnnnnnnnnnnnnnngaggttaatgattacatgtagatcctttcgtaagccaaaacttctaatagtcactcattattaatgtgcacacattctctgaatcatctaaagaaaagaaaaaatgggaaagaagaggtatgtacagagtcctctgtttcttttttctttctgtaatctcaagagccatttctgtttctctacaatattgtgtaacactaccaaattgtcagagtctatgccatggtgaggcttctataaacaaaataatctcttcaacctcgtgtgactaggatatgctttggtagttctataaaatggtgtacagttcagtttatttttgggtttggtttgacatgggaatatgggatagatttatcactccgggaacgtgctacacaagtaagtgaatcttttttccaaaaccaatgacacaaggatatactaccaaaaccggttaatatgcaaaaccggatacatagcccactgcaaaacgatcatctgatccttctgcatctgcctttgcttcgtcaggtttggtgataggagagtttctgggctcaacggttaaaacatatggtcaggaatgatgatgaaatgcaacgttttccaatagcctaaaaccattgacttttgtcgcgggcccgtttcacgccgtatatgtctaacagggagggtttaaggaccactgttatctgtttgacgaattcaacatttataattttcggagaaacttcgatttcttttttagtaagtaagatatcaaaaacgcgtaaacaaaagacaacgaatcagcgaataaaaataaaaagggataatcttttaagggaataagattatgtgatccaatcattaactgaatagttcattaacgtcttattagcgaatggaaatagtgccttaggttataataggactacgataacttagagctcacgaaactaaggactcgtcaggaactgatggtttttaaggccattttctagggttttgctaggcgatttcgtttgtagccttgtgacccatatgacatttgcgacgtgttttgaaggcgttttggttttaaaggtaagaaattgattaggaaaacgctacgtaatgtggccgtggatgagtgttaatggtacctcgacccgagcctactgacctagtaaatatctacattattatttgaaaggatttaaacataataatactgtatgaacagaaaaaaatgaaataagacttttgattttcatcttttgttttgtgacatttagaaagtttctgagaaacaacaattgctgtttaaattgctaaggaacgaacagatgtttaaacactaaaacaaagctataatctcccaaggcaaaatgaagcagaggagtttcttatcaatcctctgttttattcttctagcctttggtgttgcttctgtttcagcacaaacatgcatagagaaccgtaaatatttcacacccaacggtacatacgattcaaatcgtcgtcttatcctctcttctcttcctaacaataccgcctctcaagatggtttctactacggttcgattggagaagagcaagatcgagtctacgcattagggatgtgcatcccaagatcaactccaagtgactgttttaattgtataaagggtgcggcaggctggttgatacaggactgtgttaaccagacagacgcgtattattgggcacttgatccaacgctgtgccttgtccgctactccaacatttctttctcaggatctgcagctttttgggagattgagcctcagtatttggtcttgaacactgcaactatcgcctcagatctaacggatttcaagaacatatgggaagacttaacatctcgtacgattactgcagcctccgcagcaagaagcacaccatcgtccagtgataaccattacagagttgattttgcgaacttgacaaaattccagaatatctacgcattgatgcaatgcacgccagatatttcctcagacgaatgtaacaactgtctccaacgaggcgtacttgagtaccagtcatgctgtggaaataatactggaggctatgttatgcggccaatctgctttttccggtggcagctttttacattctctaaggcttttcataacattaccttggctactcctccgaaacctccaatgaatgtaccgcgaccaccttctgtaggtcacggggcgaacactacagataatggtaagtattcaaaccgattaaactatgcctgtaagaaaaaactgaaataaactcaattatctatgtcatgaacagatagcaggggagtctcagctggaattgtagtggtgattaccgttccagcagttgtcatcgtcttgatactagttgttctaggattttttatttgctggaggagaaagtctttgcaaagaactgaatttgaatgttagtgtcttgtgatttatgctttttatcggtatttttttttcattataagcctatattgtctccttagccaagagacgaagcataactaatacacgctttcttttcagctgatagtgatgtttctactacaaattcattgcaatacgagtttaagacaattgaagctgcaacgaataagttttcgaagagcaataagctcggcgaaggtcgatttggggaagtttacaaggtattaagctatcggtttgccaaatttgccaagtcaaacacataggctaagttactggtaataaatggcgattgttgtttcattcaatgctctgtagggtaagttttcaaatggaactgaagttgccgtgaagaggctctcgaaagtatcaggacaagacacaaaaaagttcaggaacgaggctgttcttgtatcaaaaattcagcataggaatctggctaggcttcttgggttctgtttgcaaggagatggaaagtttttgatctatgagtttgttctcaacaaaagccttgactattttctattcggtatagttccctttaacagaatgattactcaaaggattcttctacagctttaaagtaaatgattgtacatcgatatgtgcagatcctgaaaagcaaagtcagctagactggactcggcgatacaagatcattggaggaattgctcgagggattctatatcttcatcaagattcacggctcaaaatcatacatcgtgacctcaaagccagcaacattctcttagatgcagacatgaacccaaaaattgcagattttggattggcaactatttttggagtggagcaaactcaaggaaacacgaacagaattgctggaacctagtaagttctgctcgtagtagctgaacactaaaccattttctattgcatattaacccgtgttgtatgtttttcagcgcttacatgtctcccgagtatgcgatgcatggtcaatactccatgaaatctgacatttatagctttggagtgttagttcttgagattataagtggtaggaagaatagtagcttcgacgagtcagacggcgcacaagacttgctcacacatgtaagttttgagaaagaagaaaaaatttgaaccttttaataatattactctgtttttcaataatctttacaatgagattacattcttctttttatagagattgagggagaaggatctagaacactctcgacactatacagatgtatgtaattttagtcattagataaggatgaaagaggattgaattagtttgagaggagcgtcttcctttctcttttaatgtttcctgcaggtacatgtacggatgagagacagcttttgatctttgtcatcttctgtatttgttgaccaggctttatagttggacttgatttgttatgggtttggcccatctccttagcttcacacatctcactcacaagttttaaggcaatcaatatatacctctcttacattacaacacgtaatgttagctagaactgattgcttgattggtattcaaggcttggaggctttggactaacaaaaaagcattagacctcgtggatccacttatagcagagaattgccagaatagtgaagtggttcgatgcatccatatcggtcttttatgtgttcaagaagatcctgcaaagcgtccggcaatatcaaccgttttcatgatgctcactagtaatactgtgaccttaccagtgcctcggcaaccagggtttttcattcaatgtagagccgtaaaggacccgcttgattcagatcagtctaccacg

SEQ ID NO: 159851 - DNA, 1188 bp, Arabidopsis thaliana landsberg
ccgctgtttcctggccgcctgctcagagcaccatctactcgggggcgaaggaatcgctggaagagcttttgctaccaagaaacagtgtttcgcaacagatgttgccatcttcagcaagtggagctaccctctctcccactacgccaggatgttcgacctccacgctgctcttgccgtccctatcctgacaagaggcaaccgcaccgtccaatttgttctcgagctcttcttcccgagagactgtcttgacatccaaactcatagtctgaccctcgcctcccaactcaagctacgcttccagagctcaccacatctgatggtagacgacaaccaaattgcagaggaagtgagagacgcagccacaccacccctgacacaagaggatcccaagggcaaacaagtgtcgttttccttttcttctgcttcctctctcgagaaccgaaaacgcaagacaaaggctgaaaaggatatcactttggacactctccgacaacactttgctggcagcctaaaggacgccgctaaaaacattggtggtgcgtcagagtttttataaaatttgaattgatatttacatattatgatgatgatgatgatcatgatggcattacatattgcagtatgtccgacgaccttgaagaggatatgcagacaaaacggaatctcaaggtggccatcgaggaagatcaagaaagttggacattctcttcgaaaactgcaggtggtgatggactctgttgaaggagttcaaggctctctccatctcgcctccttctactcaagtttccctcaactacaatcttcttcttcttcttcttttcctttcattaacccaacccaaactgtccatgtgcctccaaagtcaccaccttcgtcatctggcagccagagctcgtcaggttcaagcacttgttgctcctccgaagagcaacaacttggtggcttccaaaaaccagctctcagtcatccacaactgcttactctaagcagcatgcacgaggaccaaaggcctgttcgtgtgacctcatccctacccccactgccatccgcaactactccaaggaaagcaaaggacgggatgaaagtgaaggctatgtttggagattcgatgctgagaatgagcctgcttccacactctcgtctcacagacctcagaagagagatcgcaaagcggtttgggatggatga

SEQ ID NO: 159852 - DNA, 736 bp, Arabidopsis thaliana landsberg
atgtgttgggttatatgcagacatgatgtgattgctcagatatgttacgcaagaagactggcacagaggctatatcccgttgctagaatggtggatcttcatggaggtcatcttgtaagccacgagagaacagaagaggtacttctgtcgaatataacttctctgtctctcttgcgtctgatgtatataagacttaatatctaaagtctttgtctttccttaatccctcccatctgcagtaaatgttaatgaatgtcatactcagattaccgtaacttaacaggaaaaatataagacagaaatagaatcagactgttctgaaagtaagaataagttgactatgaatttgattaactgatttaatcatatatggagaaagattttaaaggcaacctttttggacaaaacacttgagtgcagtagaaactgatcaaacattgtaagggatcatacggtatgattcataccattacttaaacctcattgttagttgtgatagcaaactataaagactttcaggctctgaggtcttttaggaatagcattgctactttgtggaagaaggaacacattttccttacttttgttggtatctctgtattttcaaaacctggaaaatagattaacataccttcttgtcaatttcaggttaataaagctcttctcgagttaatcaaggcgtcagaaatgaagaaaattccaacagattggactaacctcaccatggaaacacctg

SEQ ID NO: 159853 - DNA, 1183 bp, Arabidopsis thaliana landsberg
atggtcgaggaacggacaaaaatacttagtcgaaagaacgagaaagttcaagctgaactagctaggtgagctggacaagctggatgaactagctagctaagctaagtgagctaaaccagctgaaagactagctagctcagctaggtgagctgaccgacagctcgactgagctcagtgagctgatcgagtactgacccagctgggtggtccggtcagctgacactcgagctggtggactatggtagctcacggatgaagagttgtctcggccaaaagatgtaaagtctagcgggtaccaatgaacggttgcatcgccaaaggatgcaaggaacggatatgacctttcggaaggatgcaaggaacggatgtgacctttaggaagggtgcaaggaatggatgtgatgcttcgggaagcatccattcgcctcctatataagggaggacgcccaaggcatctcacaacatcatccagacaccacaaaacattcttaaaagagtcccaacacatcccgaagttgttggtcagaaagggggtgcgcctcggcgagtataactcgaccgaactgatgcgcatgctacctcccggtccaacggttcgatggagtgtagaggatggagagggtagaccgttcgttttagagactaatcggatctggtagaccgatcgtcagattggatcggccagaccgatcgtcggacggatcggatcgggcagacggattggaccggataaaccgatcatcggacggatcgggtgggacaggccgatcgtcagacggaacgggttagatagactgatcgtcgggtgggatggatcgggaaaagtgttcgaggaagcacaaggattagtgcatccgaacacacccaagggtcgcccatggatgcaatcttaccgataaaaggatgaaagcaccgaagatgggtaaagaacgtgattcacccaatatgatcaatatggtgtcgcctttgtgtatcaagcgccacggccgatggtgaaaccgatccgagattggtgaaagaccaaagggtgactcgaaagagaaccaacgggaaattccatggtgagaaccgatggacaaaacagatgtttgacccgcgagtaaaccaaaggccgacggacgaaggatttcatgggcaagcctacgatgattcaatggttgaatccacggacccttgtgtgtga

SEQ ID NO: 159854 - DNA, 362 bp, Arabidopsis thaliana landsberg
cagatccaaacgaagaagaagaagaaagagaatctacgaacctagagaaaatgatccttgttgtcttcttgtaggtgaagcgagctcagaagattcagaagaaatccacaacagtgaagacgcgaaatcaaaaattaaacaaaggttagttatagttttattagttaattgttttccggaaataatcaaacgaatttagtggtaatttattccttaaattaatcatttgtttcttcttccggagcccattaatgccgtctgtgatctcatcggcgcgtatacgaccacgcgatgatgtaaagttacgaaactacccttcggtcaacaccaccataacattgcgtatatttcgaattttgtaa

SEQ ID NO: 159855 - DNA, 364 bp, Arabidopsis thaliana landsberg
tcaaaaccacttgttacattcatttttgttgattttataaaatgctaaaatgtgattgctttgtgccgtaggagaatcctgatgctgggcagtatcggttgagtgttccgcatgatctcaagaagctagagattctctttgcgggttgtaatgtagaggtgaaaaatgatgaagtctcgggtgtaaggaagaggcgaagaagttgttacgaggaagaagatgaagataaccaaagcatgtgtagttcatctaaccctcaaacaaaagggtattggtctccgtctacacataagctgtttcttgatctgttggttcaagagactttaaagggaaatagacccgacactcattttaacaaggaagg

SEQ ID NO: 159856 - DNA, 551 bp, Arabidopsis thaliana landsberg
ggtttagtggtactacatcatctctatataccacgaagatataattctgtttaactggcacgttaaatacctttattggtcttccagttcttagtgagtcgtaagaaaactttcttgattcagttggtgtgtgtatttactgatctctttaacaataatgtgggttaggttcttgtggatggtgaggattggaggtggagtattcccagtgatcaaagaacctgattaccttgtgaatggtgaattccgtgtagacaaaggtgcatcaccgaagatgctgaactgtctcatgtaagttcacactcaaggatatacttttataaaggtaaatttgagaacgatgcaattcatcttaattgtgtttgcgtgtataggtacaagttatgctattacaggttcggtgagctgaccacagaatacggcaagccacccgggtacgtttaacacctatttgcgtttaattcatcataagcacattttactttacataagaaaaaagttgagcggtggaattattggcaggtatgatagagcaagaggagtggagatag

SEQ ID NO: 159857 - DNA, 439 bp, Arabidopsis thaliana landsberg
gccttctgatcttatccttcgcttggtcagttgcgagaactctaaaaaggccgaatcgaatggtaatgtgattggtccttccgttgggagaccgaaatcttcttcagatattttcaatagctcctggacaacagagttgctcagataacttattggaaaagcaaagcggattttatccgccgtgtagaccacgaaacaacccttttctacagtagaagagctgctagtaaagacacttgatctctgaaatgagattcttttcctgtggagggctgctctttgttgccatttcttagccatcttcataagcttctttgcgtttatcatcattttcagggagagttaaagcttgagattggaaagcaaggtgtggagaaagaaagagaaaagatacgtgagttctgtttgaagagctctttgaatgaaagttgtggttgat

SEQ ID NO: 159858 - DNA, 396 bp, Arabidopsis thaliana landsberg
  unsure (1)..(396): unsure at all n locations
acaaaaaaggcttcgaacatttccactcaatactgattcacaagtaaacaacctctttatttggttcagattaaaagttctaagagcaatgtccttatttaaagatgattgggcatcacacaacgttttgggacttacatcaaccattgctgcctgatggaagaaagcttaagccaagtactgtttcatccaggaggtgaagcgagaccaagcaagctccannnnnnnnnnnnnnnnnnnnnnnnnncccatgcttttccttctgctcactccttctggactcctgttcaagaacgcgtgtccattacctggatagatgtgaacttcatgtgctactccagacgctttcagcttctcttcgagattctttgctgcctgcaaaggtttgtaataatt

SEQ ID NO: 159859 - DNA, 1811 bp, Arabidopsis thaliana landsberg
  unsure (1)..(1811): unsure at all n locations
acaggaactttgatccatactgagaaagcgccagactctgccttgtcggagcggaccattggaaatgtcctcgaacatacgcaagtccagatgctatacaggtgaatttttatcacagtgttttagttattataatactagacgtaagattctattttgaggctttttatgaatactctccatgtttctcaaatatgttgtatagaaactctgacgaaatttatggaggacgccattttttttcttacttatttgaaattctcttgatttgtcggttgatctttgcatgggcagagaacagagttatatgaatactctaagacgctgggaaactctcagtatatcctgttaccgtttcaaccatataaaatcatatatgctcatatgctggctgaagttggtaaactttctactgcacaaaagtaagatgatttactttccttcatctgctccttggttagactctatatggcttcctgatgtcattctactgttgcttattcaggtactgtcaagcagtaataagatgcctcaagactagccgatcatctgaagtagaaatgtggaagcagtttgcttcatctcttgaagagagaatccgtagccatcaagaggtacaagttacacaacttctggttccaatagaattacatggaacagttgatttttcgtgtggggttacatctgttagctgtcttttcctttaaatggaaatgcaacagtgaaaagtatttacatctgtgagttgtactttgattaaagatgtcaaaaaagaaactcgagcgttgtggacatccataaaattgggtaccacgtaaagcttctttttacttatgatccgactaatcagacatttctatctcagggtgggaatttggccccagcaaaacttgttggaaagctgctgaactctttgtgggggatgccaccacctgcaccacattcactacgggaactcccaggtaatgactgtcaacaatacatggggaagcgtctaagtcatcatataggcaagtcgctaatacaatgtcatcattgatgccacctgcttcaattgaacccgtacatgagtggggtgggaacggtaggacaatggcagcacattctagaagtgtatcagagccagatttcagtaggacgccaatacaggtctatattactagaaaaccatttctttttcttcttttttgttagtaacagatgcgggtaagttgctccctcatcatgctatttcccctatccagctaccccacactcagatatatcactggatcgagtagtcctaaggaggctttctaagtataccaaccaatacgcgtcagaaaaccattgcttattgcttaaatgtttgtcttttctgataggatcagactgactcctcaaaagacaaagctcctgatggggtgacacaggtgaaatcaactcggaaggtgccaagttctcggtttagccgctttggtattggcatattgaagaacactgtagggaaggtcttcccatctcgatcatctaatgaggtgcaccttactaaatcttgaggtcgtgaggagtcttgttgaacttatactaattgttttgagtcattctttgggtaaaggcaaaactgggtaatgagaatcaattctactatgacgataacctaaagagatgggtggaaagaggtgtggaacccccannnnnnnnnnnnnnnnnnnctcctcctccaacgtcagtgccactccgaagcaactcataaggtcccgaaccaagtctgagataaagaacgagatgactccaactagtgggagctggactagtgccagccccactcc

SEQ ID NO: 159860 - DNA, 2021 bp, Arabidopsis thaliana landsberg
atggatcccgaagaatcaagaaggagagcctctgctcgagctgtggcgagagggtttgctatgataattgagaagggtccgtcatggaatcaggaagctgtgagtcctggttttactcggttgacaggccgagtacagtggccgagtgtagccccagagccttctatgggtcgtactgcggctgctagagaggaaattgcaagaggcaagagggtctgggagtctgagccagctgcaatagaggaagagcctgtgctagagaaggaagcatgtggggaagatgtggaaattgacgaggaggtcccaatagttcctgcaaggagaagaagtaacaacccaagaaggaagaaggagcctacaattgaagaacactaccagtacctcatggagttgagctttgaggggacaagatatccccataggcataccatgcaagctttggggatctgtagagatgttgactacctcatggagatggccaagctggggacattcttctcctacaagtgtgagggataccaaactgagagctgccagttcctagccactttgaagctccatttctacgcagaggagagggagagagagatacataagggagttggctatatcacattcatggtgtttgggattcactactccctccctattaggcagttggatgttgtattcaagttccccaccaagtatgggatccgccaaaacttcagcaaggacgagctccatgatctatggttgacaatcgccggtccactcccctacaagtcatctagggccaagagttcattgataaggagcccggtgcttaggtatctccacctttggattgcaagtgccttcttcccaaagaagacaaccgatcatgttaatgagggagagctgaagatgcttgatctcaccttatgtttcattttggggcaaacaaggaagaatatagtgatggaaggggatagggctgatacatccctttcggtggtgttgactgatcacttgataggtttcagagagtatgccactgatatccaccaatccggctatggaggaagcttatgtgctggaggagtgatcacacccatcctaatagctgctggagttcctcttcacactcccactgtcacagcaaactacattgatatggagtacttgaagaggaaatgctacttggatagatctgcctcagctgatcaactccatttcaagttcaagcaccccacgctaggtctctctaggttagcacttccttgcaaggagtacaccacagttagaattgggaacaacattgactttgatcctccaccatcaatcttagtcaatgtccttgcgcctttacaagcagagtggagcatggggagtgagtcacaagaagaaggagcagagttcaaccaagaagaagctgagcaggaagcttatactcggccgagtatggccaggtcgagtatgaacaagctgagttcagtcgagctgaacagtttgatgagcaagaagactcgtgtgaagctgcagtggagcagtatttctttgaagattatgatgagtccgatcaagagagagatcccggtcaagtccacaagaagctgggaatgcacaagggcctagggaagtttcagagaaagttgatcagtgggttgaagaagaaggtgagaaagatgaagagggcaatgaacggcatggcggttcagattcaggagctgcaaagaagacagagatcgccaccacctccacccgagttcaggagatgtaactcaacgagtgtggcaccacaaaggaacgttcgtttcaccccgccaagagcctcaaattacaagctcgggagaagctccaccttctcagatcgccgtttcaacaggcgcccacccggtccagtgaaccgattggttctgaatgctgacccgagccgagaggagtactactcgggctacatgctcgaccggccaaacgagtacaaccccaacacctccacccatgatcatgagtacacacaagaccgcctggacgagtttgtccagaacctcttcgtctga

SEQ ID NO: 159861 - DNA, 444 bp, Arabidopsis thaliana landsberg
gggctctgtggcttgtgtacttggaaatgcagaggacttttctgtttaaacggctacaagtgtaaagttggggagagcagtgacattaccgggttgttctatcccgttgtctttgctcggcactggttagttttgactatatctgcactatttttagcctcgaaaatgtaaactttttgcaacggttttatacatcaatgtggcatcttgtgtagatgaaatacgtataaatttgctcttagccttccattaatgaatttatctatgaaaatgcataaattttttcagggtttagggagaaaaagtttgctatcatcggtgtcaaagtctatgctgcgggttattatgtgaatgaatctatcttgagcggcttaagcgcttggaaagggcgatctgctgatgagatccaaagagattcatcactgtttgtttccattttccaag

SEQ ID NO: 159862 - DNA, 985 bp, Arabidopsis thaliana landsberg
agctgactttggtctatcgcgtattaagcatcatacatacctaaccagcaagtcgggaaagggaatggtactattctagacgcttatcgatatgaatcctgatttgatttatagtcaacgtctcacacgatcttgattggcttcttacctgttctgtagcctcaatggatggcaccagaagttcttcgaaatgagtctgctgatgagaagtatattctcgtgttctgtttgattaagttcctttgagtacttgttttctagcctcagttgctaagtagctcttctcattccttgaaacaggtctgacatttacagctttggagtagtactatgggagcttgccacagagaagatcccatgggaaaatctcaactcgatgcaggtatcgtttttgagtgatagaatgatgagaagaatgtgtcttccaaatgacagttgaaatattagcaggtgatcggagctgtggggttcatgaaccagaggctggaaattccaaaggacattgatcctgattggatctcactaatagagagctgttggcacaggtacattaacgttctgaacattgcacaatcattgaatataaccttttattgtaatggttctccttgctttaggtgttctacatgtttcacagctgatgctgacattaatttttgtttctattttggtttgtctcacctgcagggatgcaaagctgagacccacattccaagaactgatggagagactaagagacctgcaaagaaagtatacaatacagttccaagcgactcgtgctgcgttatctgacaagtgacaactctcttctcaaggacaactaaaccaaacaaaagttgacccttttcacttatggcttcttgttcctcaacgccgcatcgcttcaagatccaactattgttcacagaaacaaagaaagagagaaagagagaaagagagagttggtctttttgaacaacaacaattggtggaacatgctgtgctg

SEQ ID NO: 159863 - DNA, 730 bp, Arabidopsis thaliana landsberg
tcatatttataccggatgcagctagatccaccgcggtcacacagtgacctacagcctccagatgcgttttcaccttgtaccaacaccaagcgccgtggcacagcccatggacgaggacaaaccgcttcttgttgttcttctccattgttttctttcttctatactctcaatatcgtgttcatgcattgatatatatatatatatatatatatcgatggtcactttcctcatactctttctatattgactgttagtttctggtcattctcgaaacaaacactacattgactgttagatttctcatttcaaccaaagtaagtaataaattctgaacctttagaaatatcaattttagaacacacacttgatgtatcattaagagacaatgaaccaggcctctttagaagagattgattgcagctccaaatacattttcatcaaaatattatttaagagaatttgtcggcgattgccaatagatggtcacttagtagttgaggtttgcaaaacaatggcaaatgatccgtcccttccatctctatcactaaattcggcggatagttatcgatcatccatcgttgatattcttctgagatggtgtggtcatctttgctcacaatgtaagctcgaggaacagatccataccctttttcagaaaagttcttcatcctcgataaatcattaagaaataatgaaccaggcctctttagaagcaatctaagctcaagat

SEQ ID NO: 159864 - DNA, 926 bp, Arabidopsis thaliana landsberg
  unsure (1)..(926): unsure at all n locations
gcaaaaactagattcacgctttcagatttcaactggtgagtgctaaaatatgtataaaccttaatcattgttaatcgtctttgttatcatcgaatctatagttctggtatgaattttttggttgtcctgctctgtttttactttgttgcccagaacttttactaaaactagaaagctaagctcgtttgttatgtttcatttggagcagtaaattgttcttcttcctccattggatgtgtatttttgtttgttctttatgttcattgtgttgacttgtcggttttagtggaatgaacaagttgagagtgaaactgagactagtcgtcctctgtttctttcagataaacagcaaccacatataccacagtgcanagactctgtgcatgaaaaaaggttntgttttctattcattntcatgtcttttaactctatggtgtatattaactaaaggaaggagatggatagttggataatactntatttgtttatttgtcctgtgacacattatgtatcagtttttntttttttcgtttatttagacgttcaaacatagtccacctttttttttcaaactaagtctagttgatgttacttcatcccatccctctgagctgatctcaaactcgagtcctcttaagtgatgcattcacagaaagaaaaagcatatcaagcatagtgatctgaaattcaacacttttagttaactttactaaaccatttgattgccaaagtatatgcttcatagtattatctaatgatgatatgaatatctatttgtggcagtaaatttcagaaacttaacgagctggtccaagatctaaggaggcagttgccgcaatgcagaaatgaaaatcaggttgagttgacgaagctagaaactgagcttgatcagctgctgttaagaggtgttcagtccatttttacaa

SEQ ID NO: 159865 - DNA, 598 bp, Arabidopsis thaliana landsberg
ctgattccactctcacctcttctaatttcccgatcacaacctcaacaccgtacttctccgtcgccgtcgataacagcttccgagtaaagagctgaggatgcacttgtgctgttgttttagttgtaccaatcgttgatgggcttttagctgggccgttgacccaatccggtaatcccaaaccgccgccacctggttttgattccgtcacggtaaggctaagagtcgtgagtggtctgtatccgtacgattcgaaaccgtttagctcctcagcgagcgatcgatggaggttaaagctcgcgcgtgctaaatgcgcaacaggacttccatcgcaccaatcgaaagcgagaaatccaccggctttaccggaagcagcgcacgcgacggctgatttctcgatgagagtgacagcgactcctttcttggccaggaaataagcagtgcaaacgccgattactccgccgccacatacaacgacccgcttcgaggtttctccatcgatttgtttttccgccgccattgatttcgatgagttggagcagatcgtgattgttcgtcgggttaacaccggagggaataataacgatgagatcaccgtcat

SEQ ID NO: 159866 - DNA, 1266 bp, Arabidopsis thaliana landsberg
  unsure (1)..(1266): unsure at all n locations
tcgcccttttttttcctttgcagaatgtacatagtgccgcgaaaaattctcctccaaatgacagcaacagtcactctgttactcttcctgctggagccatgtggtacactgaattcttatgataatgttttttttaattgctttgtctgagaaacttaacttgtttttcaggggaatgcattcttcggtaccgaatacaccgtcttctagggaacccttaagagacaaatctgctacannnnnnnnnnnnnnnnnnnnnnatcctacacagatctcttctcgtagtgatgaattaaggaagccagcattagaggctgcaggtggaaatgttttgaaaccacacagcctattggatgggaaaactgattttcctgagctttcctcatctaataagacccagatcagtaatagtaggaacgtagtctctgccagtgtggataatagtagagctattagtgagccatcagattgcacagaccttccagaacatacttctctgtctaatggaaacaaaatgattaacagaagaatacagaatggatgcagcaatgttgtgtcagtggatgcagatagtgttgtggatggctatcatggaataacaagatctgacaaatcacatattgatcatgcttccataaagccaactcttacagaggtgtcccaagactatttacagcgttgtgtcgatgaacctagagaagttcagccattacaaaagtctggtagaactaacgcaaatgaggttggtgtctcgagagaagaagttaatagaggtacttctttgatgtcaccattgggaacaggtcattatcttgaagctgaggatgatatatctttgttctatagacaaagactcaaggatccggaagttcttagctgtcagtccaatggtttcctacgcccgtcaaattgtatgcagccttgttcatcccagtataaggctgagcatgatgaaaccaggactgtgtttggatcttcctattctgacagcaggggaagtaatatagcacccatctcaaatggatataccgagatgccacttagtgagcccaatcagttaaacggcagtcttaaccattctattttggttccagacaaagcaagggacacacagccaattgaaaattgtttcgttgactcccatgaaagcccaagtgaaatagatgacaggataattgcaaatataatgtctttagatcttgatgaatacttaacttcacctcataactatgcaaatccatttggggaaagtgacgaagaggccag

SEQ ID NO: 159867 - DNA, 276 bp, Arabidopsis thaliana landsberg
aatggttcagaatagaaacaaaagcttatattggtttgcaaaagtgtttctttctactatttggttgagttttatttatatggaaagtattggaaacacttgcagatagcaggccaagactggtcgctggctcccctgaaggatatccaggtcatgttgacgggagattacgtgatgcgaagctgaaccatcctaaggggcttacggttgatgacagaggaaatatatatgtggctgatactgtgaataatgctatcaggaagataagtgaaggag

SEQ ID NO: 159868 - DNA, 374 bp, Arabidopsis thaliana landsberg
gataagtaagagacataaaacggagaggattcgcctagtgttcaaatctgttccttatatacgacagtgcaactttcttttggaagagaaattacccttttcatgagttcgttaacataaaaacctttcaaatgaagtgaaaccaaatcccaaatgtgtcacatgactcagacgaccggagtcagaagtgatttcccagaaaagtgcgcttccaaggttacccacgacaagatcggccatggcattccgtgtttccacagtgccactcccaacgtgagggaggagaaccacattctcaaggccaaagagctcctcgggcacgtgaggctactgctaaaacacatcaagggcagccccacctaggcggccttctg

SEQ ID NO: 159869 - DNA, 6384 bp, Arabidopsis thaliana landsberg
  unsure (1)..(6384): unsure at all n locations
atgaaagaaaagaccgcggaacaccttttctctctcttcattctgggggattctacagtgatcctccaccgacttccaccgcctcaattttgtggtgatctctttgtcgtcctagtgcggatcttactctccggtgtctctgccggtccgttcgtgttgttctctttgactgttgttgtcttctctgaatccatggataaagaattatggcaagcgcttcaaaatttagatctaggatctgagagagctcctctgaagatgtcagctgaagcgaggcgctcgcgtgatatagataatcgtctcagcctaattgtcaaaggtctaaaccctcaacatcagaaaccagcaggacttaaaggtgctttgcctaaagcttggagattggatggaagggttacaagtagaattaatgatgacggtactgttcaattcttctttaaggctgaacaccatctcatgtctgtcctagaaaatggcccttggcaccataatttttggatggtggctgttgatcgatggaccaatcgtaccttgtcaaattttctctctcaaatctccttttgggttaaaattctgcatattcctcaagattttaggatagannnnnnnnnnnnnnnnnnnnnnggggttctggggcatattgatgaaaccaaaattatagaagccactgcggatgctgaaggtgaagtctaggctcatgttacaatgaacatctccgatcgtttaatctttgtacgatctgttgaattcgaacctgccacagccccattcatggttaggtttgttttcgctaaactgaagaaattctgctttagatgtgggtcattgctgcatgatgaattagcttgtaaccatcaaagcactgtgctccagttgaacgttgaagcaactagacaagctatagaaccgatgcaaggcattaatcaaggggatgacgaacctatgcaggaaggttctagttcctcaacacatgttgttggccctattcctttagttgtcagagaaactggtgaagcatctgagactcttacaattcgcaccagagcaactaatttattgactgctggtaatgatgaatctatgcaaaaaggagaagagaatcccattcaaatccagccaacacttcactcagaagaaatgggaccgacacagttgcaacctcaagaagagcttgatgctcttagaaacacagcagatagtagtcgcaaaaggaaaggggataacctttttgatgaagatcaagctgcaacaagttgccaaaggacgcaagatccaatactcactcaaggggaggtggcaacccctaaaccaccatcgccaaaatgaagatattacactggaattgtcagggacttaagaggaaccctctgacaattccatatttaaaagacatcaggcagtcttctaaacctgatgtagtgttcctcatagaaactaagaacggtcaagaatatgtacaaagtctatgtaatgatcttggatatgcccaccattttgttgtgaatccggaagggcttagcggtggtatggcagttttttggaatgatgaggttaagctggattttctatcatcacctactctccattatactgatatgtatatatcggaatccggttcacctgcttttcgtcttacttatatctatggtaatccagaatataaagagcgaaatgccttgtggaagaaaatgattttttgggcagaagcaggactctatcaaagtaaaccacgtctggttcttggtgactttaatgacatcaagactaatgaagaaaaatcaggcggcccttctcgatctgaggcttctttcaagacttttcgacaaatgcttaattcttcaggtcttcatgacatcaagacgataggaggaaatttacgtggacgggccatcgatctcattatcacatcaaatcaaatcaaaaattgaccgagcagtggctacttcagattggcaagatctctttccaagagcatatgttcagttgatgtcatggggtggctctgatcataggtgccttttgttggatacaggaaacagaaaatggagaggatataaattgttcctttatgataatagatggagatttgatcctgctgtaaagcaagaaattcacaaagtctggactacacaatgtcaagacattcagaacacaaactttcatcttgcactcaagaaatgtcgtgttagtctgtcccgatggaagtcgaagcacattaccaactcccagaagaaaattcaagagcttaagagtaagttgcataaggcttatgagactcttccaataaactatgctcatatcaatgatctcaaaaatcagttggttaaggaatatcggctggaagaggaatattggagaactaagagtagagttcaatggcttcaagctggagataaaaatacatggtacttccatgcgaaaacaaaacagaggaggaattttaatcgtctcacttcccttgtagatgagcagggtaacgtttgtactaaagaggatgaaatttacaaccttgtggagacttacttcagcacccttttcacttcgcatggcagcaacaacatggaagaggtattgacgtctattcagcctagagttacagaggaaatgaacaaccatttgaccaagccggttacagaagaggagctctctcaggccctatgcagtatgaatagaaataaatcacctggtccagatggtcttggagctggattctataaagatcattgggcggtcttaagcaaaggtgtgtttcagtttgtccaaaacttttttaatacgggtaccttagacccaaaactcaatcacactcatatttgcttaatcccaaaggtcgagaatccattagaagtcaaagattacagacctattagcttgtgtaatgttgcctataagcttatctctaaaatcttggctgatagactccaaccttggctccaatttatcatctcagaaaaccaaactgcattcattccgggtcggatgatcattgataatgttcttatagcacatgagctgattcattccttacagactcggaatcttaaacaaccatatatggctttcaaattagatattagtaaggcctttgataaagttgaatggtcttttcttgaagcaattatgaagaagcttggttttgctgaaagatggtgtgcgtggattatggaatgtatcaccactgtcacttactcagtccttgtcaatggttctccaattggcaacatcctcccacagagaggtattagacaagatgatcccatctcttcgtacttgtatttattatgttctgaaggactctcagccttaatccgtcataatattcatcaaagtaaactgcatggatttaaggcaagcagaaacggccctcctatatctcacttgctattcgctgatgattccctcctgttctgtaaggccacagtggaagaatgttctgccctcctgcaagttcttaaccaataccatgcagcatcaggtcagcaagttaatttccaaaagtctgccgttacttttggcaagggcctcaactgtcaacaaaaacatgatcttactaatattatgggagtcactaaaattagtggttttggacgataccttggtttacctgaatttgttggcaggagtaaatataatgctttttcttaccttcaccacagagtttcacagaagctccaaagttggtattctcattttctctctcctgcagggaaagaagtcctcatcaaagctgttgccactgctctcccatcttactgtatgtcatgtttcatgttgtgtatcaaacttatcaaggaaatcacctcagtcattcgcaagttttggtgggccagcacacaacatcataataaaatttcctgggtagcttggagcaaaatcaatgacacaaagaagatgggtggacttggcatcagagacttagagcatgttcaatggtaagcccttgacagagtctctttaaaattttatagtaataaattttaagaatttgtatagtttagagattatgatgggtttttatattttttatgtccaatggtggaatcttaaattgggtctctttggaaataaaaatgttgaagatcaattgatttcagagagatcagaaaaaaaaacagagaagagcagctgagagagagtgagaaagagatgggaaagggaaaaaaaaaaattgttttatcaaactcacgaccaatcaggctgtgacacgtcaagtccctttagcttcacaaaaacctcttaatttaggaacgttcctttgggcttttataggaagagtcttttgctctagagccctttaaagcctttcattggacctgctcttaaaggactttaaccttgctatgattgccaaacaaagctggaggcttctccaacaacctcactcactactagcaaggctttacaaagctaaatattatccccactcaagtttgttggaagctggtgtcaagtggcaatctagccatgcttggagaagcataatgcaaggtaatacacttctagctgatggactaaaatgggtagttggtaatgggcagagaaaaaatatatggcaagataaatggcttccatcgaacccaccgcgtgcccctaaacgctaggaaaatgttcgtacctcactaaaactggttaaggatcttttcataccaggtaccactcggtggaatgaggagttgatagataaggtaatagctttggaagacagaaatctaataaaggctattagaccatctttagtgggggtcagtgatagtataacttggatttattcaaaagatggtagctactctgtcaaatctggctattatgcagttcgtagaagaggaattgagcaagacgctactgtgaacagccaacacactcattttctttttaagtacatttggaatgtggacgtccctccaaaacttaagcatttttggtggcgctccttgcataatggcttgcctgttgcagataatttgaagaaacgaggcctacgggtagatgccatctgtcagctgtgtggcgaagaagatgaaacagtaaatcaccttttgtttcaatgcaagctcacgaaggaaatctgggacctcactcctatttcaactccttcaggtgaatttcttaatgcccacaatctagctgataatttgcaggacctaatcatgattaatagaaaccatgccaatgagctgaaacttttattcctccttgggtgacgaatttggaagatgaggaatgctctcattttttagaacaaaagaatggttgttcctgatgtcattagtcaagcgcttgttgatttatctgtgtggaatgaggcatgcaaattaaatcagaataagccatgtagtcaatcgcataatgtgaagctgccaacgaaggaaatatgtactatggaagaggcaattcacagctctgacgcctattgttgttttgtagatggctcctggctttcacctacgcaacaagccggcattggttgggaactctataacaaggacgctgccctccttcttcgaggcttctgctgctatctcccctatggtctcttctcttgagactgaagcagaagcagttagaatggcggtgctccaagtcagaaacctgggatattcacatgttgcttttgcaggtgacaacatggatctttacaaagcattagagatgaacgaagctgcacatcccttacaaagatgggaacatactacagtctcttcgtatatcagagacatcctgcagataaataacgctcgacatgattttagctttataaagatctctagaaacgcgaaccatgtagcagattctctagcgaaaagtgcaagaacgaaccaatctggttatgtaatatcttggaacaatgtaccttgactttattaataaaaagtttaagttgacgacgaaaaaaaaaaatgaaagaaaagacgcccatttcgtaaatgaaaattcgaattccatctttgtttacgttacgccacaattgtgatgtgcacaaagtttggtttagtaacaaataaatccaggattttaatattttggtttaataaagacctgaaatctttttggttaaagcttaaccaccgtgatcccatgaacaattttatgctggttcagtttggtttgacctctgttgtaagttcgcagagaatcttataaacaacgtgtcgttcaatccccttttgcaataccaaaacgacaaacattcgacgactgcatatacgaaacgaaatccataagcaatttacagagaaacatatttcagaacttttttcttacagtaggacaaacatatagttgagaaatgagattcttttatatatagaaccgaccttgacgtagtttatgggtatgcaacatagtcagaagaaacagaaaccatagatacttgctctgctcgat

SEQ ID NO: 159870 - DNA, 1086 bp, Arabidopsis thaliana landsberg
atgacttatgcccttgagatcaaatcaggagatatggttttatctgttaacagcttaacccctcaagtgtattggtcaatggcaaatgccagagagaggatcatcaacaaagatggcggcgtagtgacttcatcgtctctccttgggaattcatggcggttctttgatcagaaacaggttttgttgtggcagtttgtattctcagacaataaagatgataacacaacttggatcgctgttttgggaaacaacggtgtgatctctttttctaatcttggaagcggagcatctgctgccgattcttcgactaaaatacctagcgatctgtgcggaacacctgagccttgcgggccttactatgtctgctcgggttctaaagtgtgtggatgtgtgtccgggttgtctcgggctcggtctgattgcaaaaccgggattacttctccctgtaagaaaaccaaggataatgcaacattgcctttgcagctagtaagtgctggagacggtgtagactatttcgctcttgggtatgctcctccgttctccaagaaaactgatcttgatagctgtaaagagttctgccacaacaattgctcgtgccttggtcttttcttccagaacagttctggtaattgcttcttgtttgattatattggaagctttaaaacctctggcaatggaggctctgggtttgtgtcttacatcaagatcgcaagtactggttctggaggtggagataacggagaagatgatgggaaacattttccttatgtagtgattattgtcgtggtaacagtttttatcatcgctgttttgatctttgtggccttccggattcataagagaaagaaaatgattttggaggctcctcaagagagttcagaagaagataacttcttggaaaacttatccgggatgcctattcggttcgcttacaaagatcttcagtcagcgacgaataacttctcggtgaagttaggtcaaggagggtttggatcggtctatgaaggtactttaccagatggttctcgtctagctgtgaagaaacttgaaggaatcggtcaagggaagaaagaattcagagccgac

SEQ ID NO: 159871 - DNA, 603 bp, Arabidopsis thaliana landsberg
gaaatcatgtacaacacgatacaaaccggagtttacacgctgattctatattcaatgatcggatgtaactggactatggccaaattcttgtggttctactactacatgttaacaagcttcatctactttacgctatacggtatgatgcttatggccttgacaccaaactatcagattgccggaatctgcatgtccttcttcctcagtctttggaacctcttctccggtttcctcatccccagaccggtaaattaagcaacttacactttgataatatcaacaaaagtgttttaagagcttaactttaggtttttgttttgattaaaaatgcagcaaatacctatatggtggagatggtactactgggcaacacctgtggcttggacattgtatggactcatcacatctcaagtaggagacaaggattcaatggtgcacattagtggaatcggagacatagatctcaaaacgttgctcaaagaaggatttgggtttgaacatgacttcttaccagttgtagcagttgttcacatcgcttggatcttactctttctctttgtcttcgcctatggtatcaagtttctcaacttccaaagaaggtga

SEQ ID NO: 159872 - DNA, 374 bp, Arabidopsis thaliana landsberg
atgatcccattgacggagatcattaaacctgatcatgagattgttgttccaaacgaaggaatgcctatctctaaagaacctggaaaaaagggtaacttgaaactgaagcttagtgtgaaatacccgtcgaggctcacatcggatcagaaattcgagctaaagagagttcttggtggggtctcatgaggaagtcattgatgaatgtagatagcaaaagtagaggagatgatagattgtgaatggtaggagggattcttctaaggaggcttggatttgagagccgaagaaccaacaccagcttcgcttctgtctttttacttctcttgaatgaaattagaccttttcccctttgtttaattatttcattgatttga

SEQ ID NO: 159873 - DNA, 3955 bp, Arabidopsis thaliana landsberg
atcggcaaaagaaatgacatgcctcagagtccaatcttggaagttgagatctttgatgtatgggggattgattttatgggtccattcccatcttcatacggtaataaatatatactggtcgccgtagactacgtatcaaagtgggtcgaagctattgctagtcctaccaacgatgcaaaagttgtgctgaacttgttcaagaccataatcttcccaagatttggagttcccagagtagtaatcagtgatggcggaaagcatttcatcaataaggtttttgagaacctcttgaagaagcatggagtaaagcacaaggtcgccactccctatcatccacagacaagcgggcaggttgagatccccaatagggagataaaaataattctggaatagactgttgggattacaaggaaagactggtctgcaaagctagatgatgcattatgggcttacaggacagccttcaagacccccattggtacaactcctttcaatcttctctatggaaaattatgtcatctacccgttgagctcgagtacaaagcaatgtgggcggtaaaacttctgaactttgacataaaaactgctgcggaaaagcgattgatccaactcagtgacctcaatgagatccgtctagaagcttatgaaagttctaaaatctacaaggagagaaccaagcttttccatgacaagaagatcatcactaaggatttccaggttggtgatcaggtgctgctattcaactctcgcttgaaactctttccaggaaaacttaaatccagatggtctggcccaatctgcatcactgaggtccgtccttatggagcagtcactctagctggtaagagtggagattttacagtaaatggtcaaaggctcaagaaatacttagcagaccaaatccttccagaggtgacattggttcatctccaggagcttcttgatgattaaaggagtaaaggagtcaagctaatgactttaaacaagctcacttgggaggaagtcccatgactatccttgtaaataatttttactttcttgatatttttgatttgttttagttgtgtttgtggttttcagagacaagagaacaacgcggagatagagtaaaaattcaaaacttttactctacagaagacctggagatcgagtgtacagcccgttggagtacaaaattttgaaaatcttctgttgcacctggagaccttgcactcgagtacattggtcgagtatgtgtgatgtttaaaacccaaaaacttttaaatcatcattttactcgaccaacagaagctacagagacttgcagaaatttcctgcagtttacagtaggttttctgcaaattttctcagtcaacagagtgtgggccacgcgctgcggataagctggagagaatctaaaactcaacctcaaccactctttttgaaacttcactcgacttcaccaaatccgctcgacctaccacttttcatctcaccaccgacactccaatctctctacaccacgaatcgccgtttaaagagctactcgatccagacaatttcactcgacctcgtagaatcactcgacctctgcgccgccgtcaccagttcattccctctgtcacccgaccagaccacttcactcgattcctttgatatactcgaccaattcatccacatcaaccgccgtctctttcaaaagaagttactcggcttcgataccgagtctcgtagctcactcaaccgccgggaatcactcgaccttcccaacgccgccgcattgagtactcctcctcgtcacctgtcaaagtctcagggttcaagctttcactcgacctcgagttttaactcgccctctacaactgctactcgacgtcttgttttgaaatcaacaaaacactgaagcactgttatagagattactcgacctctagactccaccggctgaactcgatatccacaattcactcgacctccaggaacagctcaggttactcgagtacagaattgtactcgatcaattaaatctatttcatttgagactaacctattgacatttgagctttgagttctaaatttctacaggagaatcatgagcaattacagtggcagttcttctgttaatcctgactacaacatggatgagacagagtcgtcatcttgaaggccagagagggaacagagagaatatgaaagcttcagaaggaaaactgagatagcccgagggaagagagcgatgacagagaggtatgagcttatacacgaagatctggaagacgagtacatgcctgaacagactcgcagagctaccaaacttctgcacaagactgacgtattgcctgctgaggaatatgttaggcttttcaagctgaatgagttctgtagcacgaggtatccttgctcgacctcacttgcacaactcggattgttggaagatgttcagcacttgtaccaaagttgtcatctggacactctgatagcttatccttatgtagcgtatgaagatgagacaatacaattcctttccacgctacaagtagagctctaccaaggtatgacctctgatgagttggattgtgaaggattgggattcttgtgattttctgtgtatggtcatgagtataggttatcaatcaagcgcttggaaggattgtttggctttcccagtggaacgggatctaagcccaagtatgacagagaagagttgaaagacttgtggatcaccatcggcagctctgtaccgttgaatgctttcaggtcaaagagcaatcagatacgcagccctgtcatcaggtacttccagcgttctgtagccaacgtactctactcccgagagattacagggactgtcactaactctgatatggagatgatcgcaatggccctcaaaggaactctctgccaaactaaaaatggcatgtccctccaaggtgaagtcaatgacacacctctctctatacttcttctgatccatctgtgtggatacaaaaactgggcggtcagcaataaccgcaagagagcacgaggcgctctgtgcataggtggcgtggtgacacctattctgatagcttgtggagtcccactcatttctgctggactcgagccgcgagcaatggatatcgagcacctacgtcactgcgaattcctggagtttgcaatggttgacgatttccacaggttcaggtttgagcactctatagacaggagagataacatccttctccctagccctgaggtcacacggataatcgagggagataacattgattttaggcctgagattggacgcctctactatgagaacgctccaccattagatgaggacgatcttcttgaagaagctgcttcggatgggatggatgaagatggagcagtgaagttcgacactagcatgtatcactttaaagagcatgtacctctagcgagggagagcaagagcttgagtgaggctcacagaaacaacatcatgttgtagaagtggtgtaagaaacatgataagttcatcatcaaatgcctaaagaccatcaaggctctgaaggctatgataaacttcacctcttccactacagctattccgcatggacctcctcctcaagacatgccatcgaggagatatgacgagcctgagccaagtcagcacaggccagagcctagtgagcaaaggatctcataagttccagcgaggcattcatcatacgagccttgggagtacgggaggaagaagaaagttgtgctcactcgatctagcagcaagaatacaagacttctccagactagaagtttacgcgacagcggtgctggccgcagcagaagacaagaggtcgagtatcttcgttgcggtgttggccgtaagagaggggatgaggtcaagtaccctcaaggacctggagctgaaacagaacagggcgactcttcaatggcctgggagcaatcacatgcagctattgacgaccaactccgctccttcttcgactga

SEQ ID NO: 159874 - DNA, 1460 bp, Arabidopsis thaliana landsberg
atggtcgaggaacggacaaaaatacttagtcgaaagaacgagaaagttcaagctgaactagctaggtgagctggacaagctggatgaactagctagctaagctaagtgagctaaaccagctgaaagactagctagctcagctaggtgagctgaccgacagctcgactgagctcagtgagctgatcgagtactgacccagctgggtggtccggtcagctgacactcgagctggtggactatggtagctcacggatgaagagttgtctcggccaaaagatgtaaagtctagcgggtaccaatgaacggttgcatcgccaaaggatgcaaggaacggatatgacctttcggaaggatgcaaggaacggatgtgacctttaggaagggtgcaaggaatggatgtgatgcttcgggaagcatccattcgcctcctatataagggaggacgcccaaggcatctcacaacatcatccagacaccacaaaacattcttaaaagagtcccaacacatcccgaagttgttggtcagaaagggggtgcgcctcggcgagtataactcgaccgaactgatgcgcatgctacctcccggtccaacggttcgatggagtgtagaggatggagagggtagaccgttcgtcttagagacgaatcggatctggtagaccgatcatcggatcggatcggctagaccgatcgtctgacggatcgcatccgctagacggatcggatcagacagaccgatctttggacgggtcggatgggacaggccgatcgtcggacggaacgagtcggacagaccgatcgtcggatgggatggatcaagaaaagtgtttgaggaagcacaaggataagtgcatccgaacacacccaagggtcgcccatggatgcaatcttaccggtaaagggagaaagcaccaagaatgggtaaggaacgtgattcaccatataggatcaatatcgcggctgccttcatgtatctatctcctcagccatggtgaaaccgatcgaagatcggtaagaccaaagggtgactcgacggataaccaacgggaaagtccacagttggaaccgatggacaaaacggatgttggacccgcgagcaaacctaaggccgacggaagaaggatttcatgggctagcctacaataatccgtggatgaatccacggacccttgggtgtgataaggatatcgttcggaccgcatggatggatcattaagccgaaagctttcccgaccaccatggatcggacaggtaaacggttagtaacccaagggcggtcgtagtgttaaacgaccggatcggaaacatggatggttcgataagccgagggctcaatcgtccaccatgtagccggaggggagtacgtttggagaacggatggaccaataagccaagagcttgattcggccatcgtgaaccaagggaatcgtacgatccccaatctctatcgttgtacttag

SEQ ID NO: 159875 - DNA, 8992 bp, Arabidopsis thaliana landsberg
tgctcttgcttgttgatgacgagcactatcaagtccaagatggagagggtaaccagttagaagaggccaactacatcatacaacaactagagtagctacaaagggtacaccaacttcaaaaccaacaaccccaacctctcctaccgcagcaccaacgttgctaatccttaggatcaagtgtatcctccacagcaacaacaaggtcagaacaaaccttttgttccctacaaccaaggtttcattcccaagaaagaattccaggagaactaccagccgcaaccaccacctgggtttgcacctcagtaaaaccaaggtcctgctgctcctgatgctgaaatgaaacagatggtacaacaactgctacaaggacaagcatctagctccatggaaattgttaagaagttatctgaattgcaccataagctggactgcagctagcatgacctgaatgctaaagtggaggcgttgaattccaaagtcaaatacttagaaggacaatccgcatctacctctgctcccaaagttacgggacttccagggaagtcaattcagaatcccaaggagtatgctaatgttcatgctatcaccataaggagtggaagagagttctccactagagagagaccccagtcagtcactgaggacagtgcataccaagatagggaggatttcagtctcaataaagatcaagctgaccagtcactcgagcagccactcgaccagccacttgaccagccactcgaccagtcacttgagcagcccgagcagccactcgaccagtcactcgagcagccactcgaccagtcactcgagcagccactcgaccagtcactcgagatgcccctcgacccctttactcgaccgaccttcctagcaacatcaccaactgctctgaaaccagttgctgtcaaaaacaaagaaaaagtcttcattcctcatccttacaagcccacacttccatttgctggtcgacacaagaaagagttagaagataagtacagagctatatttgccaagaacatcaaggaagtcgaattaaggatccctcttgctgatgctctaacgcgtatcccggattcccaaaagttcctcaaagacttgatcatggagagaattcaagaggttcaaaaaacaacaatttagagccatgagtgcagtgccatcatacaggagaacgatgtcccagaaaagctaggagaccctggttcattcactctaccatgctccctaggttcattgactttcaataaatgcctttatgacctaggagcatcagtaaatctcatgccactctcagtagctaagaggttgggtttcaacaagtataaatactgcaatatctccttggctgataggtctgttagactacctcatgggttattagaaaatttgcctatcaagattggaaatgtggaggtgcctacagacttcgtagtgctaaacatggatgaagaaccaaaagatctcttgatattaggaaggccttttttggctatagctggagcaatcataaatgttaagcgaggaaagattgatcttaatctggggaagaatttggaaatgaagtttgatatcaatgatgctatgaagaagccgacaatagaagaacaaaccttcttagttaaggaagtggaacagttaactggtgaactgctagtggaacttgaagaagcaagtaattcaaaaactgttttgatcaagagtggtaaaggtgggtatctccttagtgaaactttgagttctaagaagtcattagactcacacaaggcagtagttggctcagaggtttacaagggcttgatggggtctgacacaaaggtcatgaaagctaatgaagtaagttcaacacatgctcgaccaactaattccaccaacaactcgaagaagtctccaacttgtcctgaaagctcatgctcgaccaaacaactcaaggcaagcactcagatgtcagatgattggttagaactcaaggagagatctaaatggcaagacaaatccatacaagagctaacacatattgtgaaagagctaaaggatcaaatcaaggagctcaatggaaaagccaaccaagtaccactcaacatcaaggacgcccctgacgatggagccactatactagtcagcaaagaaggatgtgaattcacgtcggaatggtctagaggagaagactatcttgataaaaaagaagcttactgtgaggacatggccactgagtactcaattgcagacctgtcaagaaaccctaatgagtatgatgatcactctactgaagaaggagaggagacctcatttcctctctataacccaccctaagcctaatgagtatgagaagtcaagcttagagacctaaaacaagctcacttgggagcaaatcccatgtctatctttgtacatatctttatttttccttgttgtttttgatgcatttggttagtgttttcaagagataagtataaagagctgagtgaagtggattctggctctgagagtgcaacactatactcgaccacagagcaatgaaggatactcgaccatgttttagcttatccacggcaggagatcactcgactgcggtgctggccaaagaatggaggtcgagtatactcatggcggtgctggccgccatagaggcactgaggtcgagtacccacatgctggagctgatacagaacagggcggttcgtctatggcctgggagcaatcacaggcagccattgacgagcaaataagttcattcttcgattgaggtacgcgcctcacttcaccattgtattatatcatctgttgtgatttgtttcttcatttcgtttctgtgattgaatttgtcatgagtactctcttccaaatttattcgcacagtggactgtgtgatttaagtttgggggagggcttagaaagtgtgtgttgcattgtatatatttttgagtctgcattcatctaaggcatagaaaaaccaaaaaaaaaaaattgaaaaatttcagaaaatgatttcacaaaaaggaatgttcatgtagttgcatcgcatttaggatcgagtctagaatgtttcatttaggattgttgcatatgcataggggatgatgatgagatagtcttgtaagcattttgattcaccgaataaactcagtgccttcgttgctagttgtctgttgcgtagtcaatgaatttgaaataaaactgaaccatgcctagattgctctactcgaccacactctcatgatctgataccattccctatcaatttgaacctgaatctgatctttaattatcatgtctgcatcaaatttgaactcatggataccctaaaatacttggattttcttattcattttgatcactcttgttaattcaagtagctgactctccttattagagcagttaacccaaacccaaacctagactttctttcaagccctatatcacttgtgagtgtttgtgaggtcttattccgattaagcttggtagaaagtgttaggttcgtaacgacagagatagtgtctcatgtagttctagttcgcatttttcggactagataggactaggtgggcgcttatactttgggttgggatgtgtttaaaagaaaaaaaaaagggattgattcattgatgagaaaaggtaaaggactctaggtgaagtaagctaaagaagcagaaaaagtctagtaaaggttttgggatttgtaaagaaaagaaagagttcttgttagctattggagatgggcaaaagcccttggttttaaaatgttaaaaacaggaacctttgttgttaaagaaatccaaatccgctagatatatcaaagtgttgagaaagcttctcctaaagttaagagaaaagaaaagaatgattagaaaaagggcttaaaagggattggtagatttgaaaacatttgtatgtcgagcatatgagtgggattgattgataatgaggcatggctaacgtttttaagtagaattcgatcttgcagcttagaacttttaacttggacattgattttatctggtttatcttgtgctttgactgtgagtccccgctttcaaacctcacctccagcttgttcttgattgtttgcttgagggcaagcaaagactatgtttgggggagttgataagtgtgtattttgcatgttttgagaatccatttgtcatcactttagcatcatatcaaatcactgttttataccatttgtcatcattttacatgtttaggatagatttgcatgcatgttgcatatttgcgttaatttcaggtgatttggagctgttgacgagctatctggaagaagcggacctgatcatgtcaaaccactcgaccccgaggtcgagtaggggcttcaaaatctcaacagaccactcgacccactggtcgagtagaggacatcactacttcaccacatcactcgaccccgaggtcgagtgtcttcatcccatcactcgatcacatcactcgaccccgaggttgagtgtcttcaccttcattaccagaccactactcgatctcaccactctacattgaagtcgagtaccaccatcaccagcactcgactacatactcgactgccagcttcagaatcttcttcattccgcactcaaccagacacttgagcacaaggaagaaaagaagactccagcttatcactcgacctctcactcgaccacctgggtcaagtacagttcttagtccgttccaatactgcatcgttttgagtattagggtttcgaaatattttgctataagtagcatgtactttacattttcgagaacaagttttgatctaagttttatttttctgcagacagtgtgttcttgaccttttgtaatccggatttctctaatctattcagtattcaatatttgttcttgatttcgtttattgttgttcatcctgttatcatcctgctattactctgttgttatcatgttttcattccattcaacgcttatgttttctacaatgaagtctgagtagtgaataggtttctgaggatgggttagagtattttagaattctccctatgctaggtggttgagtttgattgatagatcccttctggattagttgttcttaatgcctattgctttctgatcaactggaatttgaatctagacatttccgcgcccaaaaggtgttcgatgaaatgaatgaaacactaattccagagattcgtggccctgtaccaaggtattggttgcagggagcgttttggctttaacttgttgattcgtaatgcctgttaggttagctctcgtcaatggtgattcagtttgggactaggttaacttgagggtctctgttgcggtggcacttagatttggttaatgaacttgttgtctagggataatttattgagcatgtcaatcacctgtaaactaaggaaacgaaactactcgattaccccatcctggagaattctttatctgattgaactctttgtttactctacttctgtttactgcaattctttactgttactcgacctggtactcgaccacccagttgtcttgcaacagactgtgcagtcgagtatccctgttacattttctgtctgttactcgacctatcactcgaccacacccagtgctctgtaacgagctgtgttggtcgagtgtttatttgtttctgcttgattttctgttttctgcttgttcacttaggactgctagaacacaccaaaacctgttattgcttggcttgacttagtgacttctgatcacatcttgattgttagtatcacacccatttggattgacaaccttcagtactacaacgacatgataatgcattaggataattgatcttaaaaacctattatctagtacgccgatatgaagggagcttcgatagaggagggggatgctaatcaaaatatggatgaagttgaggatgtaaatgcagaggaggatacaaatgaaaaaaggatgaagacgagatgtccagatttgattgtttcgatgacgctgatggagcgagtgacggggatgaagagtctagtgtgtgcgcaacgtatttgaagatcaaaaccagtgtggatttgataatggaaatggtgacaatttgtttgaactatgggaaagttcatcaggaggacaacaagtttatagtagaaaaaatgagtttgtgaaccttgattttggttctgtagtagatttagaagttggtcaaatatttgattcaaaagatgatttcagaagtttgacttcaatgttggtcgatcaaccctggagttgtatactatcaaatgatgggtgcccggttgtaaatggagagttcgagcggcacccacaggggttggttcatgttttgaaattcgggtctatatatcagaccatacatgctctgtgacagcgcgttctaatcgagcgcgtcaagctactcatgctatattaggacagatttacaaggaatctgttggtggtgttcgagctggtgttcaacctgttcatgttgcagatgctctaaacctatgttatggcattaaagtaaagctaaataggtatatagtattacatactggcacttatatagaattctcttatgtctcatgccttattatttttatatatataggttaattattggatgtcacatcgtacacttaagtttgcgaggcatttagttaggggaagtgatgaatctgaatatgaccaactaccatcttacttatatatgataagaaaagcattgcatttaagaaggcttgaaatagatgtgttagatagattcaagtatgttttcattgcatttggtgcaagcattgatggattcccatttattagaaaagtaattgtggtggacgcgatatttttgaaagggaaatacttgggtacgctattattagcaacaacccaagatgaaaatttcaatatatttcctttagcttttgctattgttgacactaagaacgatgcgtcgtgtgagtggtgatatagctcaaattgccttaagcttactccctcaaataagagatcgtcgttagcacttaagggtcaaattccactgagctctcgatgttcacacaataaacttgtgatgattttaattaagctagacaaagtatattaatgtaaagacaataaagcaagtaaatgagttgtagattcaagtgattaaagagtcgggtctaaggaattatctagggagatagataaattgtagatctagctagtatcaggattgttatcgcaccgttctcaaactcaaactatgattttagagtaaccagtggcattctgcaaaactctctatacttagagctaagataaccggagaagccgagaaatcctatactaaatcatgcattattatcaagttttattagttcacctagtatctaaaccagagcccttctttgagcctatatgttctttcttaaatgcataggctcatctatgatagttcaaataacaagtacctatggtgggtatacctattatctaatatcaagttctaggtgatcaatctaaaactagcaataagagcaatcaagatgaagaactctaagaataatcctaaggggttttcgatctactaatcaatctaaatccctattgagactcccttcaccaaccaacttgatttctcatatatgataatagaacacaaatcatagtctgaataagaaatcaataatagcaagagaaagagtaaagaagatcttttccaaagagagtctccatagggttttgctcccaaagtacaaaagagatgaggagaatagcctctccaagcttagggtctcaacattgacctaaaaaatatatatgtcttaaaaacgtgttgggccttcattaaacataggcgaaagttttgggccgaatttagagatcttcaaaacgtcaataagttacgtcttcgaattgtcgtcaggtattgatgtcgctcgacaccaggagtggtgttgttcgacacctacgcggtttttagtctctgaatttcttcagcagcataaattctctattttcctccagaatgctccattgtctccaaatgaatcccaaacatgtaaagacctgaaaaggactataaaagactctagaataacaaatagactctaaaaactatacctaaatcatagctaaaagcagtaaaaatagggttatatcatattcctatgagcttctctctcatgtcttcgcgtttcacaacagtatttttgaaatgcttcttcttgaaatccaaatttccctgatttttatacccaagtgtatagttcttgcaattgaagcccgatatcaatgcgtgttccgatataccatatcaaattggaacgccattgacgatgaaccacgcttctttcttcctttcaatgcgcgtcgtgcgaagatgtattggaaacttggatgattctcaaaccatgccctctcggacttgctcatcgcaagctgcaacttatcgaatgtagtcaacacttcatgaatatagcaccgagttgaaagcttgattttcttcgcatattctgacggcggtacatactcagcggtggtattgcttctgtttctttgtcgatctccagcaatagacattcattcatattactaccaagtatacctagaatcatacacatagttatatcctagttatgacagtattatccagaaatcataaacgtacttgtatcctagtaatgataatattaaccagaaacacatagttatatcctagtaatgacagtattacccagaaatcatacacatagttctatcttagtactaccaatgttacccataattcatacaaatagttatatcctagtaatgaaagtattacctacaaatcatatacatagttctatcttagtactaccaatgttacccaaaattcatacacatagttatatcctagtaatgacagtattctccagaaatcatagtattatcctgttctactagtttcataccattcaaatacttgagaaatacttatcattgctgccggaatttctacttgattttccactgtagtctcatcatccctattctcatcggacgaggtttc

SEQ ID NO: 159876 - DNA, 266 bp, Arabidopsis thaliana landsberg
tcttgaatcatcgagatgagaccactcttaatctcgaagttgttgttctgtatggcaggaggtgcaattcctttcctctgacggtgatcccgtgatgcatctctagcaccaatgtttgcagggccattctgttgattttgttcatcagccatttcgagtggttgctggggtacaagtttgactgtgtttctcctttctctgaatacgcgagctatgcggtcgatgttatcgttgaaaagaagacaacaagaaaaacacacagttaa

SEQ ID NO: 159877 - DNA, 495 bp, Arabidopsis thaliana landsberg
gttttttgagttctgatgctaaatccgttgtacaatctgagttgtgtgattggttttaatgcttggtatcaatttgacagggatgagactggtttattctatgcgttggatctaggcggaacaaacttccgtgttatgcgtgtgcttcttggtgggaagcacgaccgtgttgttaaacgagaattcaaagaagaatctattcctcctcatttgatgaccgggaagtcacatgtcagttttctcactaaacttttattccttattgttatgattagtcttcatggttggtctatatctttgtgtattggttacattttggcaggaattattcgattttatcgttgatgttcttgccaagtttgtcgctacagaaggcgaggactttcatctcccacctggtagacaacgggaactaggtttcactttctcatttccggttaagcagctatctttatcctctggcactctcatcaactggacgaagggcttaaccat

SEQ ID NO: 159878 - DNA, 222 bp, Arabidopsis thaliana landsberg
ctaccagtccctccggtgaccgtccctaagctacccgttcctcctgtgaccatccctaagctacccgttcctccagtgactgtacccaagctacccgttcctccagtgaccgtccccaagctacccgttcctccagtgacagtcccaaagctacccgttcccccggtaactgtccctaagctacccgttcctccggtaaccgtccctaagctacccgttcct

SEQ ID NO: 159879 - DNA, 155 bp, Arabidopsis thaliana landsberg
aaggggtgggaataaagaaggggggaagaagaggcaacctcccatctcgggcaagagtcgccgtgctccttcagatcaccaaacgtcacaagagtaaaactctacgacgcagttcaaacgtcctattctccttctcaaactcacaagtagatttc

SEQ ID NO: 159880 - DNA, 225 bp, Arabidopsis thaliana landsberg
gccccagacgttgagagttgaggctaatcaatatcagaagatcctttattttgtatacacttcgaagattcttttttttttggcttgttgttgatcaaattcagatttccttctgaagactgtgttttgttttttttgggtcggatgagaaaacttattgtcacacccacattggaggttgaatatattacttacagggataattggggacctctgttctacgtt

SEQ ID NO: 159881 - DNA, 328 bp, Arabidopsis thaliana landsberg
atcaacttcatctcatcattcctctgtttttttctctctatctctcttaataaagaaaatgatgaaaatgagtatcggaacaacaacttccggcgacggtgaaatggagctccgacctggaggaatggttgtacagaaaaggacggatcatagctcaagcgtgccacgtggcattcgggttcgggtcaaatacgggtcggtccatcacgagatcagtatcaactctcaatctactttcggtaaacgacacaaaacattccgagttatacagtatttcctttatactattagtatgctctgtttttggaatttgattgttgttgttgtt

SEQ ID NO: 159882 - DNA, 79 bp, Arabidopsis thaliana landsberg
caggtcgactctagaggatccccctattgtatacattccccttcacaaaatatatataattttgtgtttcttctgaaaa

SEQ ID NO: 159883 - DNA, 622 bp, Arabidopsis thaliana landsberg
aatcatcaatgtatttaaatcttcctggaattgtcttcgactcaccaatctctcgcttgtggtaagctacaatcaagttcttttctctgatgtttggatcttctgtcgaattatcgtttaaatttcttttatcttccgcttgtaagagtgcttatatttatccttgttcccaaccttgaggttgatgtttgtttaaacaatatacttgttatggtttaatggaatcaagtatgtttttgtccaaaaaaaagagtaagtaaatgcaaaactgtctattttataaaaaaatagcattaatttatatttgtaacttctagtcatacatactatgaataaaagatttctaaaataaaacatttatagttttattaggaaagtgaccccaaatcgtatggtgaagagcgccggttcatagtcgaaaggaattactattgtactacagtagaaactctataaattaataatgttgggaccatgcaattttattaatttatagtgatattaatttataggataaattaatatcacaatactaatttaatacgtataagttaatacgtataagttaatacgtataagttaataaatattaatttatagatatatttacgtaaatacaata

SEQ ID NO: 159884 - DNA, 552 bp, Arabidopsis thaliana landsberg
ctttgtatatcctcgaaactccagttctattattgaaaccatattcgtgcatttacataaataacacataacagaagtaaagactgaaacttaagagtctaatacatcattaccttataaatacttccaaatgctataactatagacaatataaacgccaaagataaacggaatacgatccataacctttgcatcatcactcaaagcagagtaagtagtggctattgactatcctctgctgttgttgagaatcgaacctagagttcccaaaacggcgaaagcaagcaaagggctaacgtcaagcgtatcaaagactggagggataatgttcctgaagagattaagataaggatcacacagatctctaatggctgacaaaggctgacgatcccatggaatgtttgggaaccaactgagcaaaactctgaccatcagaacaccactgtatatatcgagccatttcgatagcccggctgcaactaccgtcaacggagtgttcagataaccggcgggtcgatcacggagcgacgcgaagaacaacggactggggat

SEQ ID NO: 159885 - DNA, 585 bp, Arabidopsis thaliana landsberg
aacccgagttcaaattatctctcaaagtacaacatcatgtgagttataataaaccacacaccaaaaaaaaaacaatatattttgttgttgttgctaggagatttatgtacttgagagaaaacccacttgttaataaaactaaagctttcactaaaacaagatagcagaacatctaaaacctgaaacaaacttgatgaactatatactacactggtctactacgttcatgccttttgtctctcttacgaacttcttccaatgtctttgcctgaaaactcccctgatccaaacagatcgattccacctccaccacctatagaagttaacagagcagacaatccacctccggtattaccaccattaccaacagctcttcctaatccaagaaagtctagtgtcgtctgtttcggaccaaacaccgatgaattccccatcatgagctcttttagacccgatccgctaccaccgctgctacaaggtagtccaagtccaagaccaggagctaatgacaatgcatcatgattgctgagttccatagatgaagaagtagttgaaactatgcctaacccgcgaagcaacgaacct

SEQ ID NO: 159886 - DNA, 191 bp, Arabidopsis thaliana landsberg
ttcttctccggaaatccacaatgaggttgctctccctacaaaataaatgcatacgtcatgggcttggaaagagagataccttacagacaatccaggagaaatttgttatgtaacacctatgaaaagaaccctcttagcataatctgatgccaaatctttggggttttgaaccatttttaacagatgtattc

SEQ ID NO: 159887 - DNA, 214 bp, Arabidopsis thaliana landsberg
catgctgacttagcctaaaagtagagttagtaaaaagatcctgactctatcattacccgtttgtatcgaactctcaaatgcagagatatcaccgagcagaacaagaaagatttgcaaggcaacgacctccggtgcctaattttcctcctccaccactttcgccgcctccaccagttttaatcagcagcgatttgcctagaaaaatgtcaagtgg

SEQ ID NO: 159888 - DNA, 486 bp, Arabidopsis thaliana landsberg
cataactctatcagtggtgtaaaacgcttcttccactccatctccatggtggacatcaatatctatgtagagaacccgctgcaaacaaaatttgatgaaagcattaagatgtaagcaatggaaacatcgttccacactcaatcaacattttgaatgatgctatcagaatacattaacaaagcaacggaatcctaattagagaaacttaaagaaccagacgatgaaaacaaagaggcaatgtagaaaaccattctcaaacaaatcaacatccttatcagaaacacctgatgcacttgacctaacatgagattctaaaggtaatatgcagtttaggaacatgaaaggatcaaagctcattcgataatcacacaaggcttcaaggtttcaggtagatttaagaaaagccactcaagataagcttaaaccctaaaaatttcagaagaacatgaagaagttctctatgatgagatcataaagaaggaatgc

SEQ ID NO: 159889 - DNA, 1197 bp, Arabidopsis thaliana landsberg
ttcttcatcttctctacatactcttcgaataacttcagttgctgcgataaagttattcctccctttaagaacaacaatggtttatatataaaaaggtacgtctaattacagcttagaagtaatcatattttgttttatagatagtgtaagatttagaagtttgattaccgataattgggttgtgaagggaacgtaaccagcaccaccagacgcaaatgttacaccggttaagagatcttctggtttcaaatttggatttcgatatgccggtatacttggtttaattccgaattttcccgctatgatttgcaagagaaaataactattaccagttatataaatttatatcatttgtccttaatttctttgatgtttcgcttttgagtttttatatctcaagaaaatgacacatattgaaaacttggaaaaaaaagaaagatcatttgtgtaaaatataataatttttttttgtgatggtaccattttctggagtttttttgtgtaccatacgtatatctttagtcaataatgtaaattacatacatattaacagttttaacactagtcagtcacttagatattattcagcactacgtacgatacaataaatgacttttatataagttttttgttttgtttttttattgataaaaggctttctatagattttttgtctcttttcagtttacaggcttgagaagttttcagagtgttcacaaaacacaaatgcaactaaaagtgtgtgtttagttgttatctattggggaaattctcgaaatataatcaaaattacatctgagaaagcaacgtgaaatttacctataaaatcagtcgcaactttgccgttgcaaaatcttccggtaggaattccaccgtcaaaatcgatgccgtaaggaggataattgcatctagccaacgttgtcataatgtcgtcattatttccggcatcaacgattgaatctccgaacacaattatcgccggagtcgtttcgtttggcggctgcttcaccaaagcgttggtggacgtcttacataacaacacgagaaagaaaacacaccaaaacggactcgaagaaaaagaagtaacgtgatgaatatttatactgtttcgtttcattgttactctttgtttctttggaagcttttggaatgatgagtaaatatatatatgtagagcttggatcgacatgtgaaaat

SEQ ID NO: 159890 - DNA, 503 bp, Arabidopsis thaliana landsberg
tgcctttgtgggtgaattttaattgttgttttgttgcattgttgctgatctttgtaaattcaactaccaggtgttttctgcaacaagcaatatgcgacaaagaaatatgatgattggttcagacatggagcagaattctcaaagctttgttccccatcctgaacctcgcattggaactaactatctgtatccagatatcccaccagtgaacactgttcctcatttagaagctcattctctgcaagaaccttatgacaacaactcaatgttctacgggcctccacagtaccatcatcaacatgcttcaaatcttggttctggcatgtcaaccgcaccaaatttctatgtcccttatgtgaattatgaagctccaccgagttttctgttgtctcatggaagtaatgatgcagttgttggagttacttccactgaacatgagagaaatgcccattttatggatcacggattcaaaagaaagagttctgaagtaatacctggaaatt

SEQ ID NO: 159891 - DNA, 402 bp, Arabidopsis thaliana landsberg
taaccaaaatcttgagcaataataacgttactatcaaattgggttcagaaacatgatacataccagaatttagtagagcaccgacttcggccaaaaaaaagtagattcaccgacaaaagctcagttctcagatcaaactgaaccaagaatcaaaatccggtttactctgaccgagtactcaaaattggtttggtaaaaattacaggcctcactgttgtaaataaattatagcagagccagagggtagattaggacaacttacctcaaaagctggaatcagaaaccgggttctgaaccaagcttttgttaaccggagaattcaaccatttggatcccgcgtcccgcaacaactatttggtatcggtttctgcagatagatcaagtatacagatttggtatgtg

SEQ ID NO: 159892 - DNA, 104 bp, Arabidopsis thaliana landsberg
tttgtttcttaagaatgttaaagttcaccatggatttggtaaagtatttctaataatccaaggttttttgtaatttataaaagtaattaataatcaaaggtttg

SEQ ID NO: 159893 - DNA, 276 bp, Arabidopsis thaliana landsberg
aaatcttccactttgattttgtcgtagtcgagaaataatgggccaaaacgtaaatgggctaatacaaagcccaagatcagacgcgacagctgctcggaagcatattttgtacatagcccaagatacacacaaagacagagtaaacgaaatgaagattatcatcacgactaatctattagttctctagaagtctccatggggattatcagcattcctgcttccactacctctaatctcagcataacccggaggtagttttgggggatgaataacagg

SEQ ID NO: 159894 - DNA, 481 bp, Arabidopsis thaliana landsberg
acgcgctctttctgcgagtgggtacgaaatagagccttctgattggcttaaaaactcaaaaaaaagtgcaatagtatacttgttgctagctatgttattatttgcttttcgtcttcttctctaattttacgcaaaaactagattcacgctttcagatttggactggtgagtgctaaaatatgtataaaccttaatcattgctaatctcttctttgttctggtataaattttttggttgtcctactctgtttttactttgttgccgagtaattttactaaatctagtaaagctaagctcgtttgtcatgtttaatttggagcactaaattgttcttcttcctccagtggatgtgaattttatgtttgttctttattttcattgtgttgacttgtcagttttagtggaatgaacaaaatgagagtgaaactgagactagtcgtcctctgtttctttcagataaagagcaaccacatataccac

SEQ ID NO: 159895 - DNA, 490 bp, Arabidopsis thaliana landsberg
ctttgatatgggcaactctagggttcatcaggtggctaacaggtgaaaggtagatacccttgacgatagattcaaaaactggatcaatccaccgtcgtgacaaagatccccataactctaccacttcctaatctcaactgccgttgatgaaacatagaagagcagggtttaagtaacaatctaccaaagccaataagtagacaagccaatgtcatagtcgagtctacaaatctctggaattcgtagatcagacatccatttgaacgtcttttggacgctagacgtcaatgatcgaatctcaacattagccaccgaaaatcgcataggggccaagcgaatccagaagggttctaacctaatcttaaccacctgactaacctagagattaccataatctaatccatcctcaagaaccataatcactactcaagcaacattctcaagtacacaaacccagaaattactgaaatcataccaaaatgtagatcta

SEQ ID NO: 159896 - DNA, 427 bp, Arabidopsis thaliana landsberg
agaattaaagcgtcacaacagccaaataaaagaaaaagaaaagcaaccaaaataatcttaaaatagaacaatacatagagatcagatagattagttgtacatatttggtccgaccaaattaaagtacgatagtcgatatataaaaccagtctatacgtctctatcttcttaattcgtatcatagcttatatcgtcaaatagaatcactcactcttttaaatctatatcgatctcacctggatatttgtgtagacagtgttcccaagaattattagtagaaggcttgccgttgcgaagagccacccaatctgaactattacacttaaaacctgaccccaacgcaatctggcaaatcctataaccaaaccccacccttcctttggcttctgtgtagcaaataagaccaaatggagctgaacaggtattc

SEQ ID NO: 159897 - DNA, 199 bp, Arabidopsis thaliana landsberg
gaggaggatttgtcatcggagcagacgaatcttgcggaggatttaggtacggattgagtgagagatttgttagatctcgggttgagaacgagattcgtcgggatagtgagcgacatggcgctttttcgggttcttgggagatttcgaattctagggttctggagttttgggtgaagtgtggagagaagacttatgggag

SEQ ID NO: 159898 - DNA, 228 bp, Arabidopsis thaliana landsberg
gggttatatttatatattgtaacggtgaaaaatcgtcatctacttcttcttgaaaccctagttccaaaatctgcacacacacactcagaagaagaagacgtcatctctctatctctgtctttctgctaatttcacgaagaatctgagaatatgccaaccatcagtgttggcagagaccgtttgttcgctgctcttggagaatcctatagtaattcaatttcttcttct

SEQ ID NO: 159899 - DNA, 367 bp, Arabidopsis thaliana landsberg
aagtaactaccaaagatggctagctgattcttgcttaaagcactgtatatgtgaaaatgagagatgcttacttcggaatatcggatatgatctctgtgcatgtaggaagtcttaacaatagtttcccacttggtaccatttctgtagttttctgtaagatcctgcttttgggggttgaatggatgatatctacgtgaagtgatctgagaagttactgaaggcagattatgacaaagccaagattcagaaggccttttgggagaaggtggtgcaagaggagaccgatcaaaaccactactgatctctactaactcatttcccttcaccatttcactacttctaatacttatattttcaaaagcttcaa

SEQ ID NO: 159900 - DNA, 599 bp, Arabidopsis thaliana landsberg
tataattccaacaaataatttaagctacctacgaaagaacaagttccattctttttctttttttggttcacacaacaatacaataccagatattaatatatgtgatcacacaatattacaattataagaaagataccaaatggaaacattacaaagtattgaaaaacaaaaccttttctttttaatctcaaatcatagaggaccggacgctcaactgcttcaatttagtttccagtgtggacccgtcacaagacctcccattattcatgtatgtttgataatgcaaaataaaattattataacctttcttttgtttgtttgtttgttttaacattctggtgtttgggtatggtctcttttcgggtcatggcaatagttatagaccaagaagttcctctgtgcccatgtcaatgccgccatctgctgccggctcaacccacggttgcgcatgggtgcaggcgatggcggtctgcatgagctagagctatccgctgtgcatcccgctagcttaaagttcttgtacttagccacaaatggttggtatcggtagtcagctttgatccttccattttctgtggcccagtccgatgcatcccata

SEQ ID NO: 159901 - DNA, 66 bp, Arabidopsis thaliana landsberg
tttgtaatgtggagttgatcctcgtacagtccatggagcaaaaccaattttctttaagcaattcct

SEQ ID NO: 159902 - DNA, 173 bp, Arabidopsis thaliana landsberg
aagtagcatgtacaatgctgggatcacagtttccaacatgtcaatgagatcaaattaaatccgggacatgagaattttataattctgtaaacatgtgataaaaatgtgaacagaaaaaagaaataatgtaaatgattatttttttgggctcgttgcaatatgattgttaaatt

SEQ ID NO: 159903 - DNA, 348 bp, Arabidopsis thaliana landsberg
taagtgtaattcatgattggatctaaaagaaaatcagttattttagagataaattgtgaatccatgcatatattataccttttggggcatattttttttcttaatttggttaaaatattcgttgcactgccagctaattatgagctgtaaatatttgaaactagaaatttgacaagaggtttagagcacttccaatgcttttaaaatattaatatttttaataattttaattttaaaaaaaatgaacaattaaaaagagacaattgtaaagttctagttagtatacccaaagttcttatttgagaaattttctcttctttctatcttatttttttttagttatgatta

SEQ ID NO: 159904 - DNA, 178 bp, Arabidopsis thaliana landsberg
gaagaagagaaaagtgagtttgttgtttgtatcgatcagaaaatggcgacgtcgatgatacagaggatgttcaagcaaggcacgaagatcgtctgcgtcggccgtaactacgccgctcacgccaaagaactaggcaacgcgtccccaaggttcttcaacaatcatctcttttagaaat

SEQ ID NO: 159905 - DNA, 361 bp, Arabidopsis thaliana landsberg
atcacaatgcctaacttctttgagttccaaaccctttactagactaacactttttgtatcccccttaagaactctaaactcttactcactttttttttcttttcttttcattctcattgtctttttcaatcattccatacacaatcccaatcccaaatacaagtctccacctagtcctagctaacccagaaagcgtgggctaggtctacatgaaaggctgctcttgtcggctcatacctaacaagttataccaaactcaatcaaaaaagacctcacaattacacacaaatgatcattggcttgaaataaggctagccttagggtatgggaaactgctctaaaaatgagagtcaaccacttg

SEQ ID NO: 159906 - DNA, 524 bp, Arabidopsis thaliana landsberg; identical to SEQ ID NO: 3408
  unsure (1)..(524): unsure at all n locations

SEQ ID NO: 159907 - DNA, 202 bp, Arabidopsis thaliana landsberg
ccgttgtatcggcgagcgaaatgggagcagcctaaaccgtgaaaacggggctgtgggagagcaaaaaaagcgtcgtgctgctaggcgaagcggtggagtgccgcaccctagatggcgagagtccagtacctggtaggatcgtgggcctatgatgtgctttgagtcgcattgggcacgtggtcttctgtgtgggtcagcaagg

SEQ ID NO: 159908 - DNA, 236 bp, Arabidopsis thaliana landsberg
ggaattgaactgaaccacacttcagcacataagtatgcctaaaaaaactatttattaatttggcgccgttgccaattcattgttgcattgttacattcaagatatcagaaaagttaagatcaacttcttttacattactcaagttactaactcatcttttcgtctgcttgtttttgtggtataggtactaatctttgtgaatgcaaactcggtccaaagattctgcacacctactg

SEQ ID NO: 159909 - DNA, 293 bp, Arabidopsis thaliana landsberg
tggtctcaaatgcaggtttgcgagctgcggaagctccatagaagataagcggagttcacaatcgttgttggacatatatcccaaacctgtcatagactactcctgcttcaaccgctgatgatgttctagctgcctgatctgcttcgttccattgttgtgggagcttcttgatcgatctgtttgctgtttctttttattggcaagcagatacagttgttgtgtcttgatagtctctttgaattcggcgatagcgttgtagggaatgatccataatcttcgcattatggccgagt

SEQ ID NO: 159910 - DNA, 287 bp, Arabidopsis thaliana landsberg
ttgtaacccatgtggggacaataagatggtgggacactggttcggttcctcgggtcggttctggtgttggcatgtttctgagctgcccagtccaagctgtgagtaatccgtgtgaatcaagcgaaggcttggctcagtcggtttctaaaggcggaaggcaatgcgtgaggctggtttcacagagcagcgactacttcccgcttacagcagtggatggatcatagtttggcgtctctcagatccactatggcccgctggttcgatctctcctggaccaccactttttt

SEQ ID NO: 159911 - DNA, 144 bp, Arabidopsis thaliana landsberg
agtgagcactgaagaatattgatgtctagcagaattgtattcatgttcattgcaatggcttcgttagaatctatgactgttgttaaattggtgttgtttcttctcatacacatctctgtatctgccaagtacatgataaaaaag

SEQ ID NO: 159912 - DNA, 444 bp, Arabidopsis thaliana landsberg; identical to SEQ ID NO: 78970
  unsure (1)..(444): unsure at all n locations

SEQ ID NO: 159913 - DNA, 354 bp, Arabidopsis thaliana landsberg
ccgaagactatgtgtttgagctccgtttgttcctcaggtgtttgacccgacccgagacggataacgggtacgaggagagaattgggggatttagaaggtgaatatgggtttagaaaagaaatgaaactgaatgagtataagagatatgagacgaagatcaagaagacgacgatggccgtgaaggaacatggagatgaagaagaagaataaaagggtttattagatttgtcgtaagaaagtgttttttgatctttgtgattgttttctcccatggctctgattgacatagatgacgaaattttagggtttttctctgaggagaagagactagttttttttttgttttgctttgtg

SEQ ID NO: 159914 - DNA, 224 bp, Arabidopsis thaliana landsberg
  unsure (1)..(224): unsure at all n locations
ttttttttttattatattttttttttttttttttttatttttttatttttntnattttttttaaatatttttttttttttctttttttttatttttnttttttttttttntttntnttttttttttttntgtttttcgctcgtatactattttttttttttatttatttattttttttttttttattattttttattttttttatttatttattttatttttat

SEQ ID NO: 159915 - DNA, 472 bp, Arabidopsis thaliana landsberg
tttacacccaaatatatatatatatatatatataatcaaacaataataataaagtggttaaaaatttgaaatccaactaaatgtctaacaccgtaacaaatatattaggagatcatcaatgacagaaataaattaataaaacatcgtgaattcaaacaactaatctcgattgtctctctcaccattcgattcaattttaaggcggtattgtaaagtcttcaccaaaatctaaaacatcaaatgaatttaagaactgaaaaaaacttttaaaaataattgaataaagtctaaaatcccatattttattgtaaaatcaagagaactttttaaaacccacacccggccggttcaaccggttcaccgggtcacgggttaattgcgagtttttgtgagttttttcagttttgaacttgttgggttttagcactaaacccaaaccggaaaagtgttcgggtcacaggttaaccggtcg

SEQ ID NO: 159916 - DNA, 183 bp, Arabidopsis thaliana landsberg
ttgattgttactttttgatgctaggtaggattgtcatgtgccttagatactttgagtggtcaagcttatggagctaagctatatcggaaagtaggagttcagacttacacagcaatgttctgtcttgcattagtatgtctccctctcactctcacactggttaaacatggaaacgcttcttgt

SEQ ID NO: 159917 - DNA, 364 bp, Arabidopsis thaliana landsberg
attacaatgcctaactttctttgagttccaaaccctttactagactaacactttcttttgtatcccctttaagaactctaaactcttactcttttttgtttttttcttttcattcccattctcttttctattcattccatacacaatcccaatcccaaatacaagtctccacctagtcctagctaacccaaaaagcatgggctaggtctacatgaaagactgctcttgtcggctcatacctaacacgttataccaagctcaatctgaaaaagaactcacaatcacacacaaatgatctttggcttcaaataaggttaagttcagggtatcggaaactgctctaaagatgagagtaggctacttg

SEQ ID NO: 159918 - DNA, 384 bp, Arabidopsis thaliana landsberg
cagattcgaattctgcaacaacaatgacaattagcaacggagatgtcaaatctgaaacctgcaacaatggctcttctgagaagaaaccattcaggatcttcgttggttacgatccacgagaagatcttgcctaccaagtttgtcatcattcaatcacaaaaagatcttcaatccctgtagagatcacaccaattattcaatcagatcttcgaaagaaaggtctgtattggagagaaagaggtcagttagagagcactgagttctctttctctcgtttcttgactcctcacttgtcagattaccaaggttgggctatgttcgtcgactgtgatttcctctaccttgctgatatcaaggaactcactgatttgatcgatgataaat

SEQ ID NO: 159919 - DNA, 99 bp, Arabidopsis thaliana landsberg
gtactctttccgtttcacaatataagatgttttagctaaaagcatgcagattaagaatatttatttttaaaaagtttaaccaatcataaaagacactgc

SEQ ID NO: 159920 - DNA, 214 bp, Arabidopsis thaliana landsberg
tcatcatctctttcctcaatcggagcgagcgcaaaaaatcaaaaattcgccgagagcacaaaccctaatggcttctctctcaatggcttacgttaacgttagcttctgtcatcctttacgctcttcttctccaaaggtctcacttcgcagttccgatcatttcgcgacgagtctttcctcaagtcactccatttctgggctttcgcgctgtttg

SEQ ID NO: 159921 - DNA, 198 bp, Arabidopsis thaliana landsberg
atgtcatgcttgactcaatatgggcgtttccgaatcggaatatgcatattaatgaagatttgcagtgaggtccgcatgcatccagaaaaatctatcaagttatgatcaaattccatgtgatagtcaaaaagaatggtaagatcccttgacagagcttcggtctctgtagtagtagagagatagaatcttgtgtgctca

SEQ ID NO: 159922 - DNA, 175 bp, Arabidopsis thaliana landsberg
cggttagtgtcacgggctgtcccgaaggatggttttcaatggcatctggtattttgagatcaatggcgcactttgcagctgcaatatctgcaaacccaaaaacatatctccatatgtctaaagaagctttcgcttcttcatctaataaattccttttactttcttccattttgtt

SEQ ID NO: 159923 - DNA, 246 bp, Arabidopsis thaliana landsberg
  unsure (1)..(246): unsure at all n locations
taataagcattaagactaaaaacntcagatctcttactcaagactaataattctggaacatgaatctctttctatgtctcatgtccagaatccaaaatcttttttttttttgtctcttccataacgcacctcagaagttgaaatctttctttttcttctcttccttgtcatgcattttcctcttcctactattctgctacacatgctcgacgaccatgtcactcaagtccactggcttattgcgct

SEQ ID NO: 159924 - DNA, 293 bp, Arabidopsis thaliana landsberg
atcaatgcaaaatttagaaactcccattttttaaaaccaaaagagtaacatgatccttttattcttcattgtaaatggtcaaaactgagtacactaacacagccgccatggaatcacaaagataaaaacacaaaactaaatttagtaatcaggtttctagtcataagctgaactgcgaaatctcttgatagtagaatcattaagtatgtcaagcataacagaattggtcgtacacctaggagtcttaaactggttcaagccaccgcatttcccaacgcacctttccgccactt

SEQ ID NO: 159925 - DNA, 100 bp, Arabidopsis thaliana landsberg
tccctgtgattggctttgggctttttctgcgcaccttatgttggaaggcgaataacgccccctttcgggtgggccccaaccatcaatgatataccactct

SEQ ID NO: 159926 - DNA, 220 bp, Arabidopsis thaliana landsberg
aaagtaaaaaacatctttttataggtactgcctgattgcttcattctccctccttggctcaaaagtttttgctttttcaaaaaattaaagaagaagaaacatctcgtttccatggctttgcgaggagatgagcatgagtttatgaacttaagagaatggcatcgaagagctcgattaatccgcgaaaacccgagttcaagaagattcttaacttcataca

SEQ ID NO: 159927 - DNA, 358 bp, Arabidopsis thaliana landsberg
gaaaacacagtataaacgaattagtttaccattacagtaatcctgaagattagcaactgcaacttccagtcctcggccaggggtagcatttcctgcagctgtactcgcaccttgccttccaatgtcttcctcagcaaaggatcctgatattgacaaggagagcatgcaaataaattgcagcataacttaactgtaaactttccttgtttttttaatagtaaactttcattgtcgtggaagcaagagggttaaatttttaattgttaacaaataatagataccccgtcgcctctaacactccagagactttcaaaaaaataaatgcaatcatatcatacgtaccttatgagcgatagag

SEQ ID NO: 159928 - DNA, 290 bp, Arabidopsis thaliana landsberg
ctctgtcttttcactgtgcaaaatgtgaaccatttcttcctctcactccatatctgatctcttttttttggtgtaaagattcttaaatctcattctttgtttaactgtagagtttctgaaaaatcggtgaaacaacagaggaagcaatatggcacttacttggactcataaagacaggggagaaattagggttcatgagaatttggaggaactaagcatagacttggttgattatatagctgagatatcagaagcatcaattaaagaacatggtgctttctgcattgtgt

SEQ ID NO: 159929 - DNA, 74 bp, Arabidopsis thaliana landsberg
aaaaaaaaagcagctgatttagtgtcgcgggctgcaatacgggtttggtgtcactatgttaattaaaaatggtt

SEQ ID NO: 159930 - DNA, 228 bp, Arabidopsis thaliana landsberg
  unsure (1)..(228): unsure at all n locations
cttttcttcttcttcttcttcttaagagatttttctccnnnnnnnnnnnnnnnnnnnnnnnnntctgaacaaaaaagtctcggtttttttctctttgttttgggtactagcgtgatgtcttctgagaatgatttcgttgagttttcttctatgttcgagagaattatacaaggaagaggtgatggtctctctcgatttttgccggtgattgtagctttagccgccaga

SEQ ID NO: 159931 - DNA, 79 bp, Arabidopsis thaliana landsberg
caagaccctatcagcttcactgtatctttctgagccatgtcttcttctggttttttattgatctgatgatagttaaaga

SEQ ID NO: 159932 - DNA, 240 bp, Arabidopsis thaliana landsberg
aatatttctaaaattcctgatttatagtatagtatataaaagagcctatactagaattatgctaatctgttgtttgataaaatatttaatcatatgacgaacatatgatggttatttcaaaatacaatgttagttacattggatgtttgaatcaataataaactgcattattagcttttgttttattcgttatttttttctgaaatattttaaaattgttgtcgtgttgatccaggagaa

SEQ ID NO: 159933 - DNA, 673 bp, Arabidopsis thaliana landsberg
  unsure (1)..(673): unsure at all n locations
ccaattctttcataacaaaacactgctcttccttctctccgccgccgcatcgttaaatctctccgtcatctgtaaccggttaaagtatttccctgaggtcgacctgaaaacgatgggcaaacgaggaccgaagaagcttacaaacactcaaggaggaggaggacctaatctcaaatctgtannnnnnnnnnnnnnnnnnnnnnnnnnnnnnnnnnnnncttccaccggagatactcctatcccgtctcttgcttcattactcggtcgacgtctcgctgccgacactgaatccaccggaatcactactgatcccgatctcgtctcttgtcaaaggtatgggggattttttatatgacttgatttctaagcaacctaaaaaatcgttcgttttgcttcaataggtgctagtggaccatatagttcgcgatttttcaccattgctgcagaataaggtgcattgctctgcgtgcttgcaacgacttttatggccacgtaatgtcaaaattatgtcatgattcaaatggttttgcggcaggtgtgagaccattcttaagcctgtattcaatcgcaatgttagaatagatatagtttctgctacagtatacaaccaacctcctactgcgaagaagtctaacaacatctgtttccctcataacaatgtacactaccattg

SEQ ID NO: 159934 - DNA, 200 bp, Arabidopsis thaliana landsberg
atcctgcgaacccaattctcgtcttcttcaaactcagttttccgaaaccccaaacaccgcgaggattgcatggcctgaagaaccacttaatcgagaattgtgctggaattctcaaattttccctcgcgtttttctttcacactctcggaatcggaaatttccaccaagctcgattctgacaattacacactttcgcgcaa

SEQ ID NO: 159935 - DNA, 74 bp, Arabidopsis thaliana landsberg
ttgtgttccggggatttcttggattttatgaataaaagaagacgttctaagtttgataatgaaagatggtgtag

SEQ ID NO: 159936 - DNA, 449 bp, Arabidopsis thaliana landsberg
gtggaaagagaaaagtgtctatttcttctatttctaaaacaactacttactttgcaaattatttgtagaaaaagtgtctactttccaacttatctcaaaaatatattcatcctcgttaccaccatctctacattcacatttttttcttccgagaatccaactttatgtaccatgattttattttagaaagaaaaaagttgaagtattaagacatatatgtttactgcggtaaatttctaagattgagattgagactgcatcaattaaaaacgaatactgcggtaaatttctttaaacgaggaacaaaagtttatgaaaaagagagggaaaactctaactcaaattttggtaaaaggtaatttaaaactcaaattgaatttgaatgagttcaagttactagttactacatttaatgttgattatatttctattggaaaaacttaaaagtt

SEQ ID NO: 159937 - DNA, 129 bp, Arabidopsis thaliana landsberg
gagataaattcgcacaagcaaatcggagttactatgtggaccgtgaaaccggcggcgatgccggttcaatttcatatgagacccaccgtagcaacttccgtcgcctattcacagccaccaccacataat

SEQ ID NO: 159938 - DNA, 322 bp, Arabidopsis thaliana landsberg
agactccaggaaaacaacatgatcaatgaaaattcaagtgtacatacagaagcatgaatctaagacctttaattagctcataatttaagagtctttaatttgttcgttgtttggtttttatataatgtttttaaattatgaaagcttgtgtttctgagagaccaaagagcttttagtttggtctctgtagggtgtgaagtaacttgtatttgtagtaatccggatgggttggtatattttgcaagtgtgtataggttggaccataatttcaatatctcttatgattttgtttcatatgtttgtaaaacagcttatcttttag

SEQ ID NO: 159939 - DNA, 193 bp, Arabidopsis thaliana landsberg
aaagaagaactcatacgcaaggcagaaagatcaatggcgagcaacggagttaccaactgtaacgcaaacgccaatgtttggcggttcaaaggaaacggtgcaacgagttatgctacggcggtcacgttgagaaagcgtgcttttgggttgtttaaaaaacacaccacaaacagtggaaaggccattttgttcc

SEQ ID NO: 159940 - DNA, 336 bp, Arabidopsis thaliana landsberg
  unsure (1)..(336): unsure at all n locations
gattgccagagatgttttagattaactgaatgctacaccatctagggattttgatggtatggtgggaattgaagctcatttgagagaaatanagtctttgctagatttagataatgttgaagttaagatagttgcaatcgctggtcctgctgggattggtaagactactattgccagagctttatatggtttactctctaaaaggtttcaacttagttgttttgtggacaaccttaggggaagctatcatagtggttttgatgtagtacgtttacaagaaaatatattgaaccaagatggtattaggatacgccattccggcgtgatagaagacag

SEQ ID NO: 159941 - DNA, 402 bp, Arabidopsis thaliana landsberg
gataattaaattagagaatagggttgttcatattagtaatccattcgagttcgggtaggacccggtcaggtttgggattaatgggtatatgatttacccaatagaataattctaaatatttggttctggttcgggtcggatccagttaggtttgggtcagtttggataaaaagtttcagaccttaaaaatacccaaaaaaataaaaacgggaaatttgtacgtagatagcgggtctccaaacaaaaaaaactttcaaatttgttaagttttaataaatttaattatatttgaatatattttactaaatttttacaaacataacaataatttttgaatagtttagttgttttggatatttaggtccaaaattaattaacatatttagatttataattataatc

SEQ ID NO: 159942 - DNA, 303 bp, Arabidopsis thaliana landsberg
gttctatactcccaataacaaaaaatcaattttgaaattttgaaaagcaaacaaacgtaacttttagctttttatgtctcttcatcatatgaatcaaatatgcatgtggaacattaaaatcaaagatgataactccatataacatattcttaagaatctaaaatgactttaacctcaccaaaattagcatattataattttttaactcttttcattttttgttttttaatgactcttctaaatagatgttcgtaaagcaaaaaattagcttctaaaacttataaaggttatataaatcttact

SEQ ID NO: 159943 - DNA, 443 bp, Arabidopsis thaliana landsberg
tccaatcttaaaaacaactttatagctcaaaatgcacattatactattataaaccacgttacaaaacaaaaagaaactaccaaaatcgaaaaaaatatatcacatcaaactcttagcaagacattacatttatctatatatatatatatatattttacaggacaaaatatagttttaaattagtaagttttagcaaaggcattaatcaaggacaaagcgttgctggtttcatgtaccacgttcatgattctagcccgaaccgagttcttgatcctcccatccataacccggcccgagaacccatcggagcaagtgttctcgtcagtcaaagccgcactagtccaagtctgagcattactcgtgtggtacgcaaactggtcttgatctttggcactcccacacaacttcagttattgaacagatttggtcaaacggtcaacggt

SEQ ID NO: 159944 - DNA, 613 bp, Arabidopsis thaliana landsberg
taatcccgattttgtttacttatagaaaaatgaaattttattattatgttaaaacgataatgttcataaaatggaggaaatcaaaatatagcggtgtcattccattattcagtccataattcatagtattcctatacaagacagaaaatgccaaaaatgccctctagccgaacaatatacaccgattcatatcgactcagttcgagctaatcggctcctgctccgatgcttcccacgacggtggccgtgaggaatcccaccgaacgtgaccggatcatagaccctgagacgcttagcctcagccggattcacaacacactccgacaaaaccaccttgtacctcatatgatcgtaacaatacgaataagtcatgtgtttctgtcggaaaatctccatcttgttcctctgagactccgttatctccgatgctagccggagattctgaaccgcttcatctttgcagctcggaaacttctcggtggggtcaacggcgcagccgtggaggatcagatcagtgaattgagagacgtaaggggcatatttgtaatttacaccgtacttgcctccatcagtcgcccatttggaaccatcccatatggttgaatataaagac

SEQ ID NO: 159945 - DNA, 236 bp, Arabidopsis thaliana landsberg
ggaattgaactgaaccacgcttcagcatataagtaggcgtaaaaatctacttatcaatttggcgccgttgccaattcattgttgcattgttacatttaagatataagaaaaacttaagatcaaattcttttacattactcaagttactaactcatcttttcgtctgcttgtttttgtggtacatgtactaatctttgtgcatgcaaacccggtccaaaggttctgcacacatacta

SEQ ID NO: 159946 - DNA, 289 bp, Arabidopsis thaliana landsberg
gtcgaaactcaatccccataaaattgcaacagaatctttctatctctctatagcactaaaatataatctgtccttttttctctggcagagcctcaccaaatatccccactaaaagagaataaacatacgaatgtggtagtccaatggtgtgttgatgtgttcatactgctcttgcaggagaagccagatagtcgtatatccgtttactcgttttctccagctatgttccgtttatatagtccagcagaagccgcccaagctcaaaatgttgacacaaaagtttctgaaa

SEQ ID NO: 159947 - DNA, 1919 bp, Arabidopsis thaliana landsberg
caataattttgcttcattgctatctttgagactaacctattgacatttgagctttgagttctaaatccctacaggagaatcatgagcaattacagtggcagttcttctgttgatcctgactacaacatggatgagacagaatcgtcatcttcaaggccagagagagaacagagagaatacgaaagcttcagaaggaaagctgagatatcccgaggaaagagagcgatgacagagaggtgtgagcttatagacgaagatctggaagacgagtacatgcctgaacagactcgcagagctaccaaacttctgcacaagcccgacatattgcctgctgaggaatatgttaggcttttcaagctgaatgagttctgtagcacgaggtatccttgctcgacctcacttgcacaactcggattgttggaagatgttcaacacctgtaccaaagttgtcatctggacactctgatggcttatccgtatgtagcatatgaagatgagacaatacaattcctctccacactgcaagtagagctttaccaaggtatgacctctgatgagttggattgtgaaggattgggattcttgcgattttctgtgtatggtcatgagtataggctatcaatcaagtgattcgaaggattgtttggtttcccaagtggaacgggtactaagcccaagtatgacagagaagagttgaaagacttatggatcaccattggcagctctgtaccgctaaattcttctagatccaagagcactcagatacgcactccggtcatcaggtacttccagcgttctatagccaatgttctctactccctagagataacagggactgttaccaattctgatatggaaatgattgctatggctctcaaaggcactcttcaccaaaccaagaatggtatgtctcttcaaggtgaaaccaatgacacacctctctttgtacttcttctgatccacatgtgtggataaaagagatgggctgttagcaataaccacaagagagcacgaggcgctctttgcataggaggtgttgtgacaccgattccggtcgcttgtagagtcccaatcacatctgatggacttgagccacgggcaatggatatcgagcatctacatcactgagagttcctggagtttgcaatggttggcgacaggcaccgtttcaagtttgagcattctatagataagaaagccaacatccttcttcccagtcttgaggttacacgcataatagagggagataacattgattttaagcctgagcttgggaacctctactacgaggacgctcagccattggatgaggatgttcttatagaaaaagctacggaggatgggatggatgaagacagagaagtggagtttgaaactagcatgtatcattttagtgagctcacatgaacaacagcaagctgcagaagtggtgcaagaaacaggacaagttactagccaagtgcttaagggctatcaagtttctgaaggacaagctcagctgctcctcttccactacagctattccgcaaggacatctccctcaggacatgccttcgaggagatatgacacgcccgagccaagtcgccgcaggcctgagcctagagagcaggagattccgcatgtccctgcgaggcattcatcattcgagcctcgtgaatctgggaggaagaggaggaccacactcactcgatctagcagtaggagcggacgacttctgcagtctcgtactttacgcgaccgcgatgctggccgcagtagaaggagagaggtcgagtttcctcagagcggtgctggccgccacagagctgatgaggtcgagtacccacctgctggagctgatacagaacaaggaggttcgtctatggcctgggagcaatcgcaggcagccattgacgagcaactacgttcattcttcgac

SEQ ID NO: 159948 - DNA, 282 bp, Arabidopsis thaliana landsberg
  unsure (1)..(282): unsure at all n locations
gaatcatcactactcttacaaacaatggtttccagtatatgtaaaagattnnnnnnnnnnnnnnnnnnnntgagcatgaatcaaagctttacaaagacatggttgattactactttctatgatggtaactcgcatgcggctttaccatctttggacttggactgaccaagcagctcagctacggttttgcagcgacattcttttccaggtcgtaacacgtctccataaaccgccatctcgataacatctaactccttgtctgcaatgtttacaatagaagaa

SEQ ID NO: 159949 - DNA, 246 bp, Arabidopsis thaliana landsberg
gagagagagagacagaggcatttttggtcataaaatccacacagaggtggttcgacatccaggtgaatccaagtaataaattgcaggattctctctctataatatatatagatatagcttgcaatcatttcctgcgtttggatcggtctgggttttgtcgagggttttttggggaagacgaaattatggtttaaatggggctgtggtagctttaccgaaaaacaaaatgcatcacactattgtttg

SEQ ID NO: 159950 - DNA, 354 bp, Arabidopsis thaliana landsberg
aaggtttgcgttaagtgtttttgggtgttttgtttagaaaactatgcacacataagtacattttcttgaaacaatgattctgattttactgaaccattgtcaagaaaggtggttccgtatggccattgcctcctctgtttgcagggctttgaaacgcaatctcgaaagccgcggacttctcatcctcgtctagttcttcctcatccatttcctgatcttcctcttcctccatgttattataattgtgagactcttcaatcttttcatactcacctatcattgattcttgttgttgtagttgctgttgttgttgaatcagctctctcatcacaaggtcttctggcttcaattcca

SEQ ID NO: 159951 - DNA, 212 bp, Arabidopsis thaliana landsberg
tgaaaaaggaaatcaatctgcttttgcttttcttttttgtgattaggtgtttctacgtattcttttaagattctgtctttccctaatggtatagtgcgactgtgaaggacacaattcgtattccatatttctggaatggattctctgacatcagattatgacttatgataatatcagtttatctcactcacacaccaatgatattggattct

SEQ ID NO: 159952 - DNA, 152 bp, Arabidopsis thaliana landsberg
  unsure (1)..(152): unsure at all n locations
nctaatggctttgcggcttcttccattttcgacattatttcactcgcagatcgatgagaagtaaaccgcgtntctttcttacaagttgctgcaaacaacaacacatcaggattagttagataaaacctatgcatgatttagaaaatcaagac

SEQ ID NO: 159953 - DNA, 299 bp, Arabidopsis thaliana landsberg
gtttcgaggtcacttgtttgctcctgctttctccttctagatcgcctagctgactcacgatttgacagcatcctacaaatattaaaaggaagaacaaggctctataaatgtaatcttcaaacgacaagaaattggagaaaaagtaatgattaccttctagattttttaacgtcctctggcttcaaggaaccggtggtttcattctcttcatcaaggtcctcgtcatcagaatattctctagacgatccactagtaacctgcttcattgatacaccagtttttttcgcctcagctggtaa

SEQ ID NO: 159954 - DNA, 140 bp, Arabidopsis thaliana landsberg
tgtgatgctaacaataaagatgtgatcagaagtcactaagtcaagccaagcaataacaggttttggtgtgttctcgcagttctaagtgaacatgcagaaaacagaaaatcaagcagaaacagtaaaacactcgaccaaca

SEQ ID NO: 159955 - DNA, 260 bp, Arabidopsis thaliana landsberg
atcaaaatcaaggttgtatgggggattttcatccttattcatatgaggtcttgtgagatatctagcagaaggtgaatcgcggtactcatttcttctcatgcgccatgggtattgcaattaggggacttttttacgtctagagtcgatggcgtgggtgctccatgggggcttactcaaaattgccgttattgggtttcttaaagtcttcgtcttttgatgttcttcatcagttcaaatttacgatttttgtgagggttttg

SEQ ID NO: 159956 - DNA, 332 bp, Arabidopsis thaliana landsberg
tatccaaaaccatacaagattcttgcttttggtaattatatttgctaggaacaatttaactggtctatataatcaacaattacaaaatccagtcaaaaacacactcatataacaactatctctctctgtttaagcttccgagtctcctctatccatttggaactctctaagttcaaggtgtttctcactataccatttttttgctcaatccaatgaaagaaacataagaaagcttagatctgcatttctctctgctctttaccaatcaaagaaagatgacttcacattctgtagagcatcttgggattttgaggagtttcttgacaaagtca

SEQ ID NO: 159957 - DNA, 90 bp, Arabidopsis thaliana landsberg
cactacaagaaatatgggcgctcttagcacacggaaaacgctacaatatcgtttacatagcggattcataaacgttgtgtttgccggagc

SEQ ID NO: 159958 - DNA, 276 bp, Arabidopsis thaliana landsberg
atcacctcgtaactgaggaaataaaactactcaattaccccatcctcgggaattctttatctgattgaatttattgtttactctactgctgtttactgcatcttgtcatctgttgcgtagtttctgcaattctttcttgttactcgacttgttgtattttgtgtctgttaagaagtttgtctggcaacagactgtgcagtcgagtatccctgttatattttttgtctgttactcgacctgtcactcgaccacacccagtgctctacaacgagctgt

SEQ ID NO: 159959 - DNA, 419 bp, Arabidopsis thaliana landsberg; identical to SEQ ID NO: 32437

SEQ ID NO: 159960 - DNA, 915 bp, Arabidopsis thaliana landsberg
ttgctctctcgtccacaagaaattcgcttctttgatttttttgtttcgtaaatcttcgcataatcttttaaaaaaaaaaagtcctaaatttcagatgattcgatgttcttttcagacatggagcgaaaaaccctagcgattacgcctccttccttcttcttccaccttgggtaaatccttcttcttctttcttcctcactttattttatcttttcccgatgatgggttcttcgattttcgagaaagttttaatttttttacatcaagttcgaatcttttgtagtactctgcttcttctatcacttacttgttctgggttttagttcgatgttttcatagaacagttctaattcaagtttcgcctttcgctatcaataggaatagttccttcctctttgtcttttttctgtttatagaactatttcttgcttctgatttcttcaaatgacattctctcttttgggtactattcaaattttcattttgttttaaccctttttcatttttgggtgattttttttgtttcctagaatgtttatagctttttaagtagttggtgaatccccaaattaatttcattgtttgttaaacctctcttatgtgtttgtgtttatgtgttaacagaggaggagcatttggttcatcaaaggcgtttcattgtcttctccttctctcatgtctattgctttcatcagtcaatacattgcataacttagctgaatatggttacaacactggttctgctgctatggagtttcagggctttattaatggtgaagattctgggagtgtagcaatccataaatctgaccagaatgtttgtcctagttcacagctgttttgtttcctttcagctttaggatcagtgaatcagtctgatccagttgtgttgccttgtcccaaagaatcacggag

SEQ ID NO: 159961 - DNA, 129 bp, Arabidopsis thaliana landsberg
ttcctcaggttagtaagcgtgaggagttatgtgcaatattttgttcgtgtgtgaagtttaaagaaaacattttagcaagatcagatgaataacatgccgttttggcctatatggcgggataggtgttac

SEQ ID NO: 159962 - DNA, 1333 bp, Arabidopsis thaliana landsberg
agtgctattgttcaaacttcaaagtcaacctaccaaccacaaactctttgtaaccattgagcaacctcaaatcgtagtctcttaatgttcctccacacaccatattttattttattttcttcaaaagaaaacagaaatatagacaagttattgtttttcattgcatggaccggagagccaaactgacgaaagtttggtcctcatgaaccccaaaggtagaaccaatctcaaccgttcaatcatcggtggtcatgatcatggctcgattctacaactactcctctttctgctactcctctccagccacggtggatttaaattcgtcgcgggtcaagccactcacggtggttcagacgtttccggagatagctctcggtttgacccaaccatggcaatactcatgatcgtcctcgtcagtgttttcttctttcttgggtttttctcagtctatatccgaagatgtctcgagcgagtcatggggatggactatggaaaccccaacgacgccggaaactggcttgccacgaaccggcaacaggcgcgtgggctcgacgcgtcgatcatcgagacttttccaactttccaatactccaccgtgaagacgcttaggatcggcaaagaagcactcgagtgttctgtttgcttaaacgagttcgaagacgatgaaacgctgcgtttaattcctaaatgctgccacgtgttccatcctggttgcattgacgcttggctccgctctcacaccacgtgtcctctttgccgcgctgatcttatccccgtaccgggtgaatccatagtctctattcaaatacccggtttagttaacgatcctcctggttctgatccgaacggtgatcggattagatctttaggttctcctgatgcgcgattgattgagtcagtggcgttaacttgtaaccagagcatgccacgtaggtctatgtcgaccggatggaatttagctggaatgttcacgaattctgaccggaccggtcaacattcagagaatctcgaccggttcacgcttagattaccacaagacatacataataagttagtgaatcccaacctttcaaaagttcatgtggccttacctcaggtgatgagttcaacgagaggatatagaaccgggagcttagggagtgagagaaattatttttattatgaacggttcgaccaagatggccggttagatcgaagaccattctccataactcctccgtaccggacaagttcgatcaatcacatgtctccaggtggcagtggtggtgatcaggtgcgtgctagttcatccaaaagtttgcttctagctatgcgatcgccgttcgatcgatta

SEQ ID NO: 159963 - DNA, 249 bp, Arabidopsis thaliana landsberg
  unsure (1)..(249): unsure at all n locations
tttatttctctccatgtgtcacgttcataacatgttccatctgcccgagtaaaacgcttcagacaatggattttggtatccgttggcaactctggtgtctccacttgggttccnnnnnnnnnnnnnnnnnnnnnntaaaacattttctcaaatgatccctcaatcttcgccagcttggcactgccgaaaacatcaatgacttcgagattttcgagtttttcgatgtttgggatggcgtctaggttgatg

SEQ ID NO: 159964 - DNA, 132 bp, Arabidopsis thaliana landsberg
gttctttcatatttgttgatgttgtacaaagaaaataatttactctttcaaaaaaggagaaaataaatgttattttcttctcttcactcacatgatgaattgaaacacagataaaatcaaacccattattta

SEQ ID NO: 159965 - DNA, 484 bp, Arabidopsis thaliana landsberg
cattgataagggcaactctagggttcatcagatggctaatacgtgaaaggtaaatacccttgacgatagattcaaaaaccgggtcaatccactgtcgtgacagagaccctcataactcgactacttcctaatctcaactgtcgttgatgaaacatagcagagcagggtttaagaaacaatctaccaaagccaataagcagacaagccaatatcttggtcgagtctacaaatctctggaattcgtagatcagacatccatttgaacgtcatttggacgttggtatgatcgaatctcacattagccagcgaaaaccgcataggggccaagcgaatccagaagggttttaacctaatcttaaccacctggctaacctagagattaccctaatctaatccatcattaagaaccctaatcactactcaagcaacattctcaaaaacacgaacccataaattactgaaatcatatcaaaatgtagatcta

SEQ ID NO: 159966 - DNA, 203 bp, Arabidopsis thaliana landsberg
ttatatgtttgattaaacgtacgaacttagtgaacttacaaataaaaattaggaaactatataatccaatagatacattttgtttgatcttggttaatcaaatcttcagtacaacaaagcagcataaaacaattggttccaagtgtcgggaagacccggaagacaccaatggctacaatcagatgaacggtcaggatttcttt

SEQ ID NO: 159967 - DNA, 124 bp, Arabidopsis thaliana landsberg
aaaatatagggccctcgaggcattcaatttgattgccctcgacaggcctaatgaattgggatttcccatatcggccgggtcatttcggggctagcggatcatttatgatgacaagtgtgagctt

SEQ ID NO: 159968 - DNA, 363 bp, Arabidopsis thaliana landsberg
agaaagaacaggtaggctcataggagggctctggtttagatactaggtgaacttatcaaacttgataataatgcatgctttatttttatggtttctcggcttctccggttatcttagctctaagtatagagagtttcgcggaacaccactagttactctaaaatcatagtttgagtttgagaacggtacgataacaaccctcatattagctagatctacgatttatctatctctcgagacaattccttagacccgatgctttaatcgcttgagtctacaactcgtttacttgctttattgtctttacattaatttactttgtctagcttatttgaatacatcataagtctattgtgtgaacat

SEQ ID NO: 159969 - DNA, 147 bp, Arabidopsis thaliana landsberg
ctttgtatctgtgtttccgcgtcgagaattcgttgcatatgaagttatgtccaaggggcttcgtacttcccaaacggatcctcatagatctatataaagacgctggtttatcaagtatacgcaattgaagcacttagaattgttgat

SEQ ID NO: 159970 - DNA, 144 bp, Arabidopsis thaliana landsberg
atcggtaattttactcattagggtctctctgtttctggccaaattcccttcatctccgccgttttgcttcaatacagatatatgggattttttttaccgatcaaatttaggttttcgttttcactcagaacggtagtaacccta

SEQ ID NO: 159971 - DNA, 262 bp, Arabidopsis thaliana landsberg
cttcctctatggctgcctcgatcgagtgaactggtcgagtagaatgctctgctgcttccctcttggttggatagagtagagggtcgagtagaatccttgtaaactccttatgcacctgaaaatacaccaaaacatgcaatatgtatgcaagatgatcctaagtgtgcaaaataagctaaatgtgatgcaaactgatatgaaacaatgagtgatcactaagctaaatgatgataaatacatgtctaaaatgagtaaaatacag

SEQ ID NO: 159972 - DNA, 300 bp, Arabidopsis thaliana landsberg
ggcagtcattgtgtggccaagactgttttccttggccgtcaagtgtaccagaaccagagatagaaagattgttgatgtacctaaagttgatccacgtgtcttgcttaatgtcgcttggatttgcaggagctaataaagttccatcgatgatgaattcaataggatttttgcatggacccacaaactctacaccaccgaggtaaaatgttccttttggtacatagattttactacttccacttatccttttgcaagcacggctccatagactcgtgaatgcctaatttcatatgcgttaag

SEQ ID NO: 159973 - DNA, 362 bp, Arabidopsis thaliana landsberg
cctggcgtatatatctcaaccatcagcaaacgccaaaagttacatgtttttcaacaaatatgacaagctcatccaggtggttgcttatctcgacactggagcagcatcatatatcatcaagccagacatacttccagcctctcattggaattcctattcagtagctttcaaggcagcaaatggccagatcttccacatctccttagtcagcaagcccacttacatccaactcttttaaggatacatgatcaaagccaaagtatatgagtccgaactccctggaaaatatttcatacttggatttgatgtacttcatagctttaagagagtatcttggcatccaaagggacttaagcacaaga

SEQ ID NO: 159974 - DNA, 247 bp, Arabidopsis thaliana landsberg
cataccatgtatgattgtaacgctcgtgaaccggaaaatcggttagagtttgtgtttaaatcgtccggtttaatcggttggtttaatggaaaccctagagtgtgcctataagagaacgaaactcaaaattagggctttggttagccacttttcgttctgttaaggagaaaaagagagagaaggagaaggaccagaatccttaggggttagaaggaaacagtttcgacatatcaaatcgttgtcaaag

SEQ ID NO: 159975 - DNA, 116 bp, Arabidopsis thaliana landsberg
gtgatgggaaatgcatctgctctgatgaagtctgaggattccccagccctgatctctgacgcgagaggcaaaaactgaattatggaaatggactctcttcccctggatttccccat

SEQ ID NO: 159976 - DNA, 196 bp, Arabidopsis thaliana landsberg
ctacaagaaccacattcaaaaatcagatcatggcctccaaattttgaagtttaggggacagatcataatccttattagacaatacaagatcacatatgcacgagactaaaagaatgggatcagaacaagcaaaaatcacaattgtctcaaatgattcaaaacagatatactcaaaatggttttaaacacacaatct

SEQ ID NO: 159977 - DNA, 335 bp, Arabidopsis thaliana landsberg
agttaaaaggtgtaacgcctgtgaaccggaaaatcggttaaggtttgttttaaaatcatccggtttaattggttgggttaaatggaaaccctaaagtgtgcctataaaagaaggaaactcgaaattagggctttagttagccacttttcgttttataaaggagaaaaagagagaaaaggagaatgagcagaatcgttagggtttgggagaaatcagtttcgtcatatcaaatcgtggtaaaaggtaacgaactttggtagagttattcccaagtcctttttcgttattctccagtttacagaattggatttggattaaaattgggtgatttattc

SEQ ID NO: 159978 - DNA, 105 bp, Arabidopsis thaliana landsberg
acacctcttgctggttggatgtctagtccttactctgtcccacatacagctgtgtctggaggacccattgctcttggtgctccatccatacaaggttatttgctt

SEQ ID NO: 159979 - DNA, 491 bp, Arabidopsis thaliana landsberg
gaaaaaaagacaaaggttctaaggctaaggataaaaaaggggaaatcgaatgaagaaaaaaagtaataaaataaacgaaataataaaagaagagaaacaaagaagaaataaaaaaaaaaaaggaaagacagagaagaaaaaagaaaaaagggaaaggaaaaaaaaaaaaaaaaaaaaaagaaaaaaagaaaatataagcaaaaaaaaaaaaaaaagaaagaaaaaaaaaaaaaaaaaaaattaaaaaaaaaaaaaaaccgataaaaaaaaatagaaaaaaaaaaaaaaaaaatagaaaagaaaaagaaaaataaaaaataaggaaaagaaagatagtaagaaaaacaaaaaaaaaaaaaggaaaaaaaaaagaattaaaaaaaaaataaaaagtgaaagaaaaaaaaaaaaagaaagaaaaggaaaaaaaaaaaaaaatgaagaaaaaaaaaggcaaaaagaaaaaagaaaaaaaaaaaaaaaaaagagaa

SEQ ID NO: 159980 - DNA, 345 bp, Arabidopsis thaliana landsberg
  unsure (1)..(345): unsure at all n locations
tcagatttgtaatgacaagctgcttgcaattagagtgagaagatgcatacgcacagtcataaaacttcgtaagaaatacttgtacaagggtagatgctcaacaagttgattcttcttttcttcttcttcgaaatcccttcatatgaattgaaacgttatatctcagtgcattcatttactagcgtgtcctttcatacttnnnnnnnnnnnnnnnnnnnnnnnnnnnnnnnnnnnnatattccatcctcatatcgaactgcataccttttattagaatcaggtaatcaagattgagagccacattcagtctcagaatcataaacaccatgagatacagaatcaaac

SEQ ID NO: 159981 - DNA, 450 bp, Arabidopsis thaliana landsberg
accaagaatctagtgtattattttaatttggcagctcacatgttgaaatgtattagcttgtgatattgtgcagaagtaaggcttgatgaagaaatggaagccatgggaaaggaaatggtcacacattgtggaggactaccattagctgttaaagcgttgggaggcttgttagctaataaacatacagttcctgagtggaaaagagtttctgacaatattggatctcaaatagtaggaggatcgtgcttagatgacaacagtctcaattcggtttaccgaatattgtctctgagttatgaagatttgccaacgcatttaaagcattgcttccttcacctagcccattaccccgaagattccaagatatacacgcagaattagttcaattactgggctgcagaagggatttacgatggatcaaccatccaagatagtgagaatactaccgag

SEQ ID NO: 159982 - DNA, 1863 bp, Arabidopsis thaliana landsberg
cttaaacaacagttcaatggaggtttccaacagcagaatccaccaccagggttcactcaacaaccacaacaagccccatcagctccagatcctgaaattaagtaactcattcaacagatcatccaaggacaagctactggagccatggcttttgaaaagaagatagttgaatcacataacatgatcgattgttcttacaacgatcaaaatgtcaagttcgaagctctgaattcaaaaatcaaatatgtggagagtcaatttgtatcaacctcgactccgaagcatcctcagcaaattccagagaaagcagttaagaatcctaaggactatgctactgctaatgctatcaccatccaacaagaagatgagtctacaccaagtcattagactcccaatactgaggacaatatgattcaagaaggggggggattcaactcaaattgctgcacctgccatccagcaattcagctggactatagagcacacacctttgatggatactcaccattctgagaagaatttcaaagtagaaaaacccaagtaggatcagaatcatgagatgattagtagtttcatcactcaagaaacttacaagaagaaagtcatccaagaaaagctatatgatcctggttcattcactctgccatcctccctaggaccattgacattcaatgggtgcctttgtgatttgggaccatctggtagccttatgcctctctctacagctaaaaggctagggatcatggaattcaagttttgcaactcagccttactcttagctgacggttctgatgcacatcctcatggtctaatagaaaatatgcctatcaagattggaaatgttgagatacctacagactttgtggtattggacatagatgaagaaggcaagatcccctgatcctaggtagaccattcttagcttcagctggagaagtcatagatgtcaggaatggaaaaattaatctgaaccttgaaaaaggcatcaagatgaagtttgacatcagagaagcttcaaagaactcaacaacaggaggtcagagttttggaattcaagatatggatgttgataaagaaacagaagctgaaacttcaccaaaagttaactatacttctcaacttagcaagctgaagagaacttttgaccacaaaaagagagcaacagaaaggctatctcagatgagaaaaaaaaataaatggcaaagaagagtcatagaaggattatcttcaagggtgatgaagctgaaagatcaactatggatctttgaaaaaagagttaaaaagttttcaaatggtattgacctagagaagatggaaactgcactagccatcaaggagcacgaaaatttcacaacagaatggtttgcaccagaagatcagaaaggagttcacttagaggaaagaagcctagagagcaagttgttgagcgaggaggaaactcctattatgacttattctctaggagtgcctaaacagcctaccaacccctctgctgaagaagaacacttgacacttgattctgttattgaagaacttctggaactcaggatagaatacaaagctcaagaggataccattggggagctaacttacaaaatggaaggactgaaccatgcaatcttggaacttcaagaaatgattaaaggctacctaagttttgaatttaaggattggtcaaaggagtctggttcagaagaagaagactactctgctgatcagaaagaagcttattttgaagaaaaatcaaatgagtacccatcctaccatatctcaagagaggatgcagagtatgatccaagcattgaagattcaaccactgaagatgaggacttctctgttcctctctttaaccttttttctaac

SEQ ID NO: 159983 - DNA, 259 bp, Arabidopsis thaliana landsberg
tctttgtgaagagtgaatgtaagtgatgtgtgatgttatttattataaagagagagagagggtaatggctaggcagtaggcaagaaaaaagacgacctatctttgctttttataccatcggttatggatgagattaggaatttttactaagtgtcgttagctcaattggtaaagactctaggtgaagcttagaggtcgccggttcgagtgatgcttggaacgaaactaatattacatgttgtggtttcgggcctggggg

SEQ ID NO: 159984 - DNA, 393 bp, Arabidopsis thaliana landsberg; identical to SEQ ID NO: 12816

SEQ ID NO: 159985 - DNA, 352 bp, Arabidopsis thaliana landsberg
cgtttgtaagtgtacctgacagaaataatgataaccatcgggtctgtgcagggtcagcgggattaggtgtgtcaagtaaatcctgaataccaacaagaatctgcttcacggtaatggctggtcaatatacaacataagaaaagagagcttgaggatacatttggcttttctgatggagaaatgaaaagaaagaaacagaagagtacttacgtaatcctcgttaaggatagagagacagacagttccagatggatagacattagggtgggaatttgcatttcggaggtttgctcggataatcctcactgaagtgcatcgttaatggaaagaatccaccttcccaatcagtctg

SEQ ID NO: 159986 - DNA, 156 bp, Arabidopsis thaliana landsberg
gcttcttgagagcattcaccttgtccctgaggtaatagagcttggctcttcttactttcttcttgtccaccaccttaatctccctcaggtttggggaatacctgtcaccaaacaaacaccctcactcacatcagttttttcaccatgaccaaagca

SEQ ID NO: 159987 - DNA, 246 bp, Arabidopsis thaliana landsberg
gtagataggacacttgagaggagacactcaaactaatgctgcttatatagtcaaggtaaatgcttctcctgattcttatgattcatctgtgcatagataggatactaacattgcatcaatgtgaggatcttcttccaggtggaactcttggctgctaagaatctaattggtgctaacttaaatggaacatcagatccttatgctattgttaattgtggatcagaaaagcgattcaggttgttacat

SEQ ID NO: 159988 - DNA, 115 bp, Arabidopsis thaliana landsberg
atactttcgttctctatttgggtccgcacattgctttgttcactctaaaagccacgctataagtaaagttgatctaaaatgtgcaccatatgaccaatacagttaaaagggttct

SEQ ID NO: 159989 - DNA, 165 bp, Arabidopsis thaliana landsberg
aaaacttggaaatggctctatggcttgcttaatagatgaatgttgtggagaggaagcctataatgaaacgaaggcaaacagaaaccattggattgttttgctatttttggtataacaaaatttatatagactaacgtttaaagggtacgaaaatagaaaactatt

SEQ ID NO: 159990 - DNA, 101 bp, Arabidopsis thaliana landsberg
tttttttcattttatttatttttaattttttttttttttttttttatttttttttttatttatttttttttttttttttttatgtttcttctatattctat

SEQ ID NO: 159991 - DNA, 525 bp, Arabidopsis thaliana landsberg
attttaagcaaagttagtgctagtcgcgctacacttcgagtctggtctaaaagtggagcgtgattagcactactctaaagacaaaacaactaaagagataaataaaaggagaaaccagaaaaatacggttggattagtttagatttcggtttgacttttgagatccctcgattacatacaacaacaaaaaaaacgcggttggatcattaataaattcagttccaccaggtcttcttcttgcgtctggtattggcagcggtagcggttgtagcggcaaaagcgttttcatggaggaaatcaagaagaacggtgcttttgcatttaggacatttagggtcatcatcagaaagcataacgtacataaggcaacgagggcaacccacaagaaccattgaggttattgtctcgttctcctcctggttagtttcagatgaaacgcatgagcttggtgaagtcgtgttggatcggtttggtgatcgaacaagactcatctggctggcttgagaaggaggcggcgaaagattc

SEQ ID NO: 159992 - DNA, 282 bp, Arabidopsis thaliana landsberg
attactgatacacgaatgctgtcttccgtgtattgttttgtcaacagctggtggcaaataaaatccaggagatgcattcttctagcagtctaaacttctggcgctttgctatatccaagaaaatctcaatcctcttgtggaaatctgaaccactctccttgcatctaaaggatccagaacactcacactgctctgtcaaatgagcggctttcacctgattgcacctattgcacactagatcctgcaactggtacattctttccctctgtctcaccatctgga

SEQ ID NO: 159993 - DNA, 463 bp, Arabidopsis thaliana landsberg
atttgcgcattaactctttaaaaaaaccatttaacaaaaaaatcattgcattctaattcttcactctgtcttcaagtgcttgacaagctcatctaatacattgtatgaggagcctccacctctaatagaggctttgagcttctcttttaaaacaagggttctctccctcatgcttgcaccttctttatccacaatcaacctcttcacagctctctcgacggctcctctttccagttcacctcctacctgaatccctattctccatacactctctagatatattgcatttaacatctgctcgccttgataaggccggcaaatcattggaactccttccacaatgctctcgagtgtcgagttccatccacagtggctccaaaagcctcccactgagggatgtcctagtacttctatttgtggtgcccatttgacaatgtatcctttctctaaaaccatcttactg

SEQ ID NO: 159994 - DNA, 295 bp, Arabidopsis thaliana landsberg
cactaaccttcgataaactcagccatcacagaaattcgttggaaaaaagataaatttttagggaaaaactttttaggtccaaagatcgagagagaagagaagattttgaaatttttttgttttataaagtttcgtcttaagcgatcgattttttgtgcgaaagattgaaactttttggtaagataattgtgttgtgtggttggatcgtggaggtgggtcttctttggaatggcgcaacaagggcagggaagcatggaccctgccgctctcgatgatatcattcgtcgtttgttgg

SEQ ID NO: 159995 - DNA, 606 bp, Arabidopsis thaliana landsberg
attgtttctggaactttttgtgagcctaaggtttatctctctcttctagtcgtcgattctggtcatcgaagattccaatcagctaaggttacattcatctctctctctctctcgttgtcttggttttgattttggcagattgtgcttggaatcaacagtttcggttattcgatatatgagtactgttaattctagggttctatcactttcctcttcggatcttttgcctatgggttccagaataaaagttttagggttcttcttccctttattgcgaattaagtcatatgcattgcctctgattgtgcgaatcatgttgtagttccaatctttctcttaatacgatgagaataattgtagttagttgctaatgaaccttggtttaacaatctgtaggtaaagtgctatatctcgtttcccctgtctcggttcaagctttcaagagaattgtgattgattctataagggctctttgtcagtacaatggaagctaataaggagcctggtaatgtgtcaagtaattcgagcaatgataaagagaagtcgtctgaggagatctttgtcaaccatggtaagctttaacactcttcacaattgttaaggaaa

SEQ ID NO: 159996 - DNA, 345 bp, Arabidopsis thaliana landsberg
ctgggtgtttgctcttctcgtggctctatttcctgtgacatatttgttataagggcaagtcagaaattaatatcattctcaacaaaaatgtcacctggggttggaacacaagggaggaagataaaaaagtcacatccatgttggccattgaaggtgcaagaacatctcttctaggtctctatccagcgatacgtctgcttagagctctccataattaaaagtgaactcacttcgcttgtgcgtaaagaattctctaaaagaagtggtcagtcaataacccaaggaggcgcaatacggattttcccgaacacgaataaggttgatacagcgagcgccgaggccacc

SEQ ID NO: 159997 - DNA, 241 bp, Arabidopsis thaliana landsberg
ttggaaaccacaaatttaagataatgcttaaagaagacagagacaatgaggctttctcagaatccaatcacaaaacgaagaaggcggaagagagaagaaacctatacacttgaagttttcagtttctgttgttatgtttcttggcttccaaggaagttccatcttttagggattcacaagcgtctttatccattccaaggctgaagagagcagcggcctgaagatagaaaaccgttggccc

SEQ ID NO: 159998 - DNA, 394 bp, Arabidopsis thaliana landsberg
atttctctctctcctttcatttcacagctttcaatggaattttattgctactgctaacgtttgtgacagctgacgacaagcttaagggtttttgggtttggtctacctctctgtcattcatgaagtggagctgaaagaagcaatggcgtccatttcttggcgcaagagaagggcatcaatgaacatgtccagattctctccctgcatcatatcctcaatggcatggtgagtgattcccacacggtgatccgttactcgcccttgtggaaaattgtatgtacggattcgtccagatcggtctccgctgccaatctgttcatgggatttagacattgataatgtaagattgactgaaaacatgagaaaaagatttgttgatttgatatgtacctga

SEQ ID NO: 159999 - DNA, 227 bp, Arabidopsis thaliana landsberg
cctggccaagagtaacagggatcaaacgtccagtaggtagaccaggacggctaccacctaaagaccgagaagagaacgcactactatacaacagcctccatttcccttgaagcttatcaagatcatcggttaaatcaaccggtcccccagcagtttcaagttctttagcagccacttcagctctttctaaatcatcaacactcgccacaagtcctctgtttaatccc

SEQ ID NO: 160000 - DNA, 1150 bp, Arabidopsis thaliana landsberg
tgaagaattgatatcttgtttggtgcatatggtgtggatctgatcttttgtaaccaacgtattaaaccttgcatacgatgagtcaacaaaaagaagtaaaaccaaaaaacaagccaatgaaaagtttttatcgacgtaagcaaccatttttcttgttctgtgtgttttggaatttacgtgagatttatatatgctgaaaagtttttcaaaaataaatacttacagattatgtaccataataaatgatttaatttattagcaatttgtcaaacaattcattgttttctttttttgataatttgaccatttatttaggtaagaaaaatatttgattttgatttaacagcaatatgacaacccataagataattttccttccttagatttgaaatacatgatgttactatttgactaagatctaagggcatctcttttaatggatctaggagaaattaaataaatcaaaaacaactaatctatattataaaaaagtcaaaactatatttttttagtacgtctacttaggattttatacaaccaatctttataagtcatctcattaattaacattccctcaagcagtctccatgtcttctccgcatcttctcggtgagcctccctcacgtctcttccggttgtcgctgcaaccttcttcagcttcctctctctcaggtaagcttctcttctcctcttcttggtgtccacctttgaacacctccttctttactttgattcttagaaccatcactttagctttagcttcagactgtttgactcgaaccatcactcgactttctctaaccgtagtctatttggcttctccttgagtcatcaccttagccttagccggttggctctgtagagaacacgaaactgaacggttgcttgtaacagaaacaaacacagaaattgatagccaagttcacggcttaaccgctatgtctgaggagagatctcttgctcccaaagcttcactatatcaaagagattacaaacaccacttgacttgtgatgttgtctttggtttcaggtacaatctcaagaagaacaaagatcaaagacaaagaacaaagaaggagaaagcttcttgaagaataaactctcgtttcttctctttctctctagaactctctgtgtcttgtctcacacc

SEQ ID NO: 160001 - DNA, 234 bp, Arabidopsis thaliana landsberg
atagaacgaaaatacacattgcacatactatacttttatatacatactgatgagaagaataatgcaacgaacatcctttgctttcgatttctatatttacttaaaccgaaactccatttatcagccacgaaaggcttaaatattattataggctctccactttagtattttcatcaaggctagctatactctctgagcttagccaaatcggaaatacaaacaaacccgctaaag

SEQ ID NO: 160002 - DNA, 288 bp, Arabidopsis thaliana landsberg
gcccaaggagaatgggaacaaacggagcttgaatccgtttttactgacaccattgatttttgttaggttgcagagcctatcgaattcatcaaggtggtcgagtagatcctccattggcagaccatggaatttgttaccctgaatcatcgagatgagaccactcttaatctcgaaattgttgttctggttagctggaggtacaatccctttcctctgatggtgattccttggtgcatctcgagcaccaatgtttgtgggtagattctggtcatcttgatcatcagccat

SEQ ID NO: 160003 - DNA, 214 bp, Arabidopsis thaliana landsberg
tccttcttgtgggctcatgtgggtctcttctgttttccttctcaaaagctgatcttttctattggggaggggcagagtcatacattgagagaagagaagagggagagagatagagatatcatattactatcacatatcaagtatagaagtcatataactaatgacagatcttacatggatgattattgaactgtggatattgatgtgaccggac

SEQ ID NO: 160004 - DNA, 140 bp, Arabidopsis thaliana landsberg
tgtgatgctaacaatcaagatgtgatcagaagtcactaactcaagccaagcaataacaggttttggtgtgttctagcaatcctaagtgaacatgcagaaaacagaaaatcaagcagaaacaataaaacactcgaccaaca

SEQ ID NO: 160005 - DNA, 263 bp, Arabidopsis thaliana landsberg
atgttcacacaatatacttatgatgtttttaaataagctagacaaagtaaatgaatgtaaaagataaataagcaagacaaagtaaatgaatgtaaaagataaataagcaagtaaacgagttatagattcaaatgattaaagcgtcgggtctaaggaattgtctctaaagatagataaattgtagacctagctaaaattaggatttttattgcaccgttctcaaactcaaactatgattttagagcaaccggtggtgttcccgg

SEQ ID NO: 160006 - DNA, 320 bp, Arabidopsis thaliana landsberg
taaaagtccaattttttttctcaatgcttcttatagataaacatggctaacgaaatcactaataacgcaaaacacagaattatacctaaatacaaagctgagttttggtttagccactcacagcttgaacggtagcaatcatgtgagccataacgagagcgtaattacgaacagctgtgtgttgtggagtgtagttgtctccaagtccaaactccccaaagttaagatctatgttcacaaacttacgcggcaacgaccttttagccagagcttcattccatatctccaagaactcctccatcaccttttgtgccttttcc

SEQ ID NO: 160007 - DNA, 1297 bp, Arabidopsis thaliana landsberg
acaaaatggtgaccttaacttcatcttcttcaactccaaacgtatcttttgatttcatgatgaacaataataataacagtaacaatctctatggtcctttctcttcttcttctacttctttctcttacttgacaagcaaggaagatgctctcacccagaagaacctaatgagtggtatcaccaatgatgttcttggaattaacaagaaagcttctgaagatttggagatcagtgtgtttggagctgagaagtacttcaatggagacatggattctgaccaaggttctagtgtcctgtctctgacaaatccagaagttgagagaaccgtcgtcgactcgaagcagagcgcgaagaaatctactggaactccgagtgtccggtctgaatcaagctggaatagtcagagcgtgttgcttcagaacaaactggtgaatagctgcaacagttccttcaaggagaagaagaacagtaatggtcagattcaaaaggtgaccaataataagaagagttttctcgcaaatttggggtgtaaatgcgcctgctctgatggggattctgtagatgtcgacgagaaaacctcggtcaagagaagcgctgatccgaatatctctgttatcacaatgagatcttctgcggatatgaacacagaactgatcaagattcagaagcaagaggagttatcacagaggaagtctcttgaagtttttggatctccagtggctattgagaagaagagtagtgttgttcagaagaaactaccattgcctccatggaaatcgagaacagaggaggacgacacacagagtgaagggagtgattcaagctcggatcttttcgagatagagggtcttacagggaaccctaagccttttcttcgaggcaaggaagtgatccagcttcaccaacgtgttatgcgccaagtgaagtaagcgtagagtggagcatagtgacagcaagtgcaccccatccctctgttatgtcagaatgtgcaccaaaaccagaaagaagaaaccgacctactcatattcttcgaatccctattaccgctaaatcagcaccgcagagacggaaatcgagtagcagcagcggagggaatggtttcttgatgagctgcaagagtcataaatctgttatggtttctggtgatttagacagaagaagcagcatgaacaagacacaaccgagttacgttcctagattcccaatggagactactaaacctaagagtttcgaaacacgaagaaggatcagcaacagctcgatttctcacacacaatcatctcttctttatagtcag

SEQ ID NO: 160008 - DNA, 263 bp, Arabidopsis thaliana landsberg
aggagaaaaggtttggcaaaagatggtatcacttaatatatttggggctattacagatttgggaacattttgggccaaaaattagaaaagagacacattctattgggcttataagatgaagcattttttatcatgtcaattgtctattttgcccttgattttctctgcaatgtttcttcttcttcttcttctttcatctctgcatttctttctcttcttaaaatttccagaaattttcaatttctttctttcttgacaaattt

SEQ ID NO: 160009 - DNA, 304 bp, Arabidopsis thaliana landsberg
gttctatactcccaataacaaagaatcaattttgaaattttgaaaagcaaacaaacgtaacttttagctttttatgtctcttcatcatatgaatcaaatatgcatgtggaacattaaaatcaaagatgataactccatataacatattcttaagaatctaaaatgactttaacctcaccagaattagcatattataattttttaactcttttcatttttttgttttttaatgactgttctaaatagatgttcgtaaagcaaaatattagcttccaaaacttataaagactatatagatcttact

SEQ ID NO: 160010 - DNA, 78 bp, Arabidopsis thaliana landsberg
gttcacaggactcagtccacatggtcggttccagatgctcagcttagagaagaactcctaatatcgctatccgagcat

SEQ ID NO: 160011 - DNA, 279 bp, Arabidopsis thaliana landsberg
acaaaagataaaagatggtagcaacggatctattgcagatgactcttaccatctttacaaggaggatgtgggtttattacatcaaattgggttcaatgcctacagattctccatctcgtggtcgcggattttgcctcgtgggaatcttaaaggaggaatcaaccaagctggtattgactattacaacaacttgatcaatgagcttttgtctaaaggaattaagcctttcgcaaccattttccattgggacacaccacaagaccttgaagatgcttacgg

SEQ ID NO: 160012 - DNA, 308 bp, Arabidopsis thaliana landsberg
ctcttcttcttcctcttctatgttctcacaaaaagacttgaactgtgttatcgagattcttctagtaacaaaatcatcttcaggctcgtcgtctatctccatggaagattcagtctcggatgcaacaatttgaaaaacagacctcaccatgttcttcaacagagtgattgaaacaaccgtgttcatcaccagaagtggtagtactccttctgacgctgttggaaaatgcgagagacccatttttttataactaagattatattcacagagatagaaactgagagtctttgaaagttttgagacacgaa

SEQ ID NO: 160013 - DNA, 510 bp, Arabidopsis thaliana landsberg
tagtaatctaaaccatattgagaactagctaatagatatggatatggcctttacgcacgtttgtctatggacgctactcgccttcgtgctgacctggacggtgttctacgttaccaacaggaagaagaaggcgccggaattggcggatgcggcagcagaggagagaagagacagtgctgctgatgttatcatcgtcggggctggtgtgggtggctcggctctcgcatattctcttgctaaggtttgtaaagtggcgtcatagttttgcaaaaaaatgataggaataagtttagtactatatatgactgtttttattgtttcatagtagaattctattgcaatattttgtttttgcataatataaccttattcctaatttccaattatatataggacgggcgccgagtacttgtgatagagagggatatgagagaaccagagagaatgatgggtgagtttatgcagccaggaggacgactcatgctttctaagcttggccttgaaggttgg

SEQ ID NO: 160014 - DNA, 114 bp, Arabidopsis thaliana landsberg
aggatatcctggtttccaacacaattcattaaggccggacctaatctcactgctcttccttttacctcatcaaaacggttagtgttcatagaacttgactctttgttcatacct

SEQ ID NO: 160015 - DNA, 506 bp, Arabidopsis thaliana landsberg
acgaatttaaatccgaaaacacaacatctttatagttttacaacgggtttccagttcgaatcaccatttttacatttaaagttttccgactgcagtcagattgttgtttttccgcttcgtcggaccaatctccggttaatccggatctaataagatccaatttggttacttaagattggatcaagttttttttgtttcctctttctacaaggctttcaatccattatcctcttgcgatctctggatctcttcgtcctaccgtcggcttgcctcctctctttgatcggagtaacatcttcgccgcttcatatgactctgttgtagtcgaggactttcatttggtctcaggcggagcttccaatttaggagattgggttaagggataaagatttcttcaagtcttctttcagcttcttgcagacgaacccggtgagtgttcatcagatgtgcgaggctaaaactgtagaaggagtacggtggtggttgccttaagccatcgcaggtga

SEQ ID NO: 160016 - DNA, 124 bp, Arabidopsis thaliana landsberg
aatcttcccaaggaggggctcgcgtctgagtagctagttggtgaggtaatagcttaccaaggcgatgatcagtagctggtccgagaggatgatcagccacactgggactggaatgcacacccat

SEQ ID NO: 160017 - DNA, 279 bp, Arabidopsis thaliana landsberg
caatcaggtactagaaaggacaaccttttgcggtgtgccttgcaacgagtcttcaacttctgctggtaaagattgatgcataaaacagaatgtttggctcaaaaattcgagaagagtaactttcttgttctcttcctagctactactgaatagacaaacaacgaagatgaagagtcaacagtggcggctccggcttagaaacctaaacccgcagcgaaagcggctgcagtggcgaaaccgctgagacaaatgatggaagaagacgtgattcctccttta

SEQ ID NO: 160018 - DNA, 367 bp, Arabidopsis thaliana landsberg
gggaggtccatatcgttcacctgtacttgttgaatactttccgggaacatattgtagtccaattgttgctcggggtcctcatcagtgcaaagatgaaactaaggatccttactatcctaattgcgtttgtataaatcaagcaagtggacatgattgttcatgtactcattgataagtttcctttatatgtatgagttactgaatcttgagaactaaatctatttaataaaaattagatatttatctttgatttatgtgtcatggccgggtaggaaataaatttgattcataaaaattcaaaataccctaaataaaatatccctcgagagcaatgtaatagtttacaaaaccaatccatttttgagcg

SEQ ID NO: 160019 - DNA, 242 bp, Arabidopsis thaliana landsberg
tcacacaattttcacccattttcatgtctctttctaccaaacgctctactttctccgccgcttctgcctccgacgactctttttacttttctcctccgatgaaaaaggccaaaaactacctccaccattcccctcaacaccctaataccgttcacaaggttggttggcttttattattggaggaaagattccaacctccccgcccgcccggttaaacttcttctctggaaaggaaaagctta

SEQ ID NO: 160020 - DNA, 429 bp, Arabidopsis thaliana landsberg
  unsure (1)..(429): unsure at all n locations
caaaaccattcctctcctcaaaaccattaatctctcttctctctagcataacctctctcagatggcttctaactatgataagcttacttcttcgagagtagccatcatcggtgctggtgttagcggattagcagccgctaagaacttagttcatnnnnnnnnnnnnnnnnnnnnnnnntcggattcagtcggaggtgtttggaggagctgcacttacgagacgactaaattacaatcggctcgagtcgattacgagttctccgactttccatggcccaataatagagatgacacaactttcccaccttaccttgagatattagattacttggaatcttatgccaaacatttgactttaaattcatgaagtggtctaaggcatgagaaggtcatgggagggaaactctaaggtgaccttgggcttacgac

SEQ ID NO: 160021 - DNA, 535 bp, Arabidopsis thaliana landsberg
aaaatctgaaacggaagctcagagagacaaggatgagatttttctcttcctttgataaatcccaatacctaattcccaaattcccttacttttaggcgccgaaagatagagagaaacatagatacgcattggttttttcttttttgaagattctcgcttcttactacatgtgtatcaatcgatctctacccagattctccggaggtacttattattgattcgttttagctcaaagttcgtttaatttctgtcaaaaatttggcatgcgtttgatcttgcttcttacaatgacagatctttttcttccttcttttgctttgttctgtaaagttagatcaatcatgttttagttttctgttttgagtttatcatgttttaaggcagtgtaactcatgaatgagagcaacccttttgtgaaagtgacgattttgttgtcttatgagttttaaaagtctttaatttattcatcagtgggagaatggtggaatccttgtttgaagctttttaattgagttaatggtgtcttcttctacat

SEQ ID NO: 160022 - DNA, 97 bp, Arabidopsis thaliana landsberg
tgtatatatatgattaccctaacataaaagatccatcacgtttcccttgtttctcaagcaatctctgaaaatgccaatttgaggaaaactctctttt

SEQ ID NO: 160023 - DNA, 160 bp, Arabidopsis thaliana landsberg
agaaaaaagtcactttggagatagaacagaatataaaatgattctttaaatgatcttttatcaaaacaagattctgaattttctaataagactgagagaactctaaaacgaagaacaaataagaaccttgtagccatgggtggtgatactttcaaagatg

SEQ ID NO: 160024 - DNA, 392 bp, Arabidopsis thaliana landsberg
ctcgcatcttctcgtctttagtgaagatcttttcttcatatatcttttgccacccattatattcaatgcagggtcagtctttttttttacatccatttgagccttttcctctatgttgggatatatcttttaatgtaggacttagtttggtagggtctcatgctatatgatacgtttagttgcacgggttttacctacaaaagttacataaaacagattgaaagaaaaaacttagttttgaaaagtatgcattatgtgattctaggtgataaagttagtacaacgctttaaagatgttgattagtaagcttaagctctacttctataaatacctaacaaacatcaactttttctagtacttgtgattgttataaagaaaagagggcatatgt

SEQ ID NO: 160025 - DNA, 140 bp, Arabidopsis thaliana landsberg
tgtgatgctaacaatcaagatgtgatcagaagtcactaagtcaagccaagcaataacaggttttggtgtgttctaacagtcctaagtgaacatgcagaaaacagaaaatcaagcataaacaaataaacactcgaccaaca

SEQ ID NO: 160026 - DNA, 579 bp, Arabidopsis thaliana landsberg
tgatcgacttggtcaagccagaacttaagtcaaaaagaacatctttcaacactaatctcccatttacacttcattaaagacattagcaacctccaataataaaaacaatcgaaaacaagtaatcaccgaagctgcgaaagccaaggattctcattgaaattgcaagttaataaaaagttccgaaaatggaaaccctaaattaaaaaccctacacagctccaaaaccccattttgagtacagtacaaaacgcgtgataccaaaatgcagatggtacacccgaaaatcagctcttccaatgaagaaccaaactttcacaaaatccccagctaaggatctgaaaacccttgcttgtgaattacggaaccaaagtagcaaacatggtataaaaaaaaacaagaagaaagctacgaaaacagagcagacgatgaaagaaaaaaacagagatggagcttcaacataccatactacggtaatgcttcttgccgaatgaagtcctaatgttcaaaactcgtcggaaagtttcgatttttgtagctgagaaaaaagaaatggttttagagagagaatggggaagaaat

SEQ ID NO: 160027 - DNA, 362 bp, Arabidopsis thaliana landsberg
atgaagctttcgtagttgaaagtagctgagcctgagtatgctgtgtccttctccttgaacttctctgtcagcccctgcagtttccatcatattacaattcaaattacttaacttctaaataccacactcggatcaccaaaccacaatgtaacaagaactgttgcggtctcagatgcaatcactcgtgagggcaaactcattgctgttctgaccactaaacctcaccacatttgactacattaacaaacttagcataatggatactatggagttcgatattcgggtttagagacaagtttgagttaactcttcccaaggagtaattccttataacttattatgttttaatttcatttgatcaa

SEQ ID NO: 160028 - DNA, 104 bp, Arabidopsis thaliana landsberg
agaaaaaaaaaaaaaaaaaaaccaaaaaaacggaaaaaaaaaaagagaaaaaaaaacaaaaaaaaaaaggaaaaaacaaaagaaaaaaaaaaaaaaaaaccaaa

SEQ ID NO: 160029 - DNA, 344 bp, Arabidopsis thaliana landsberg
gactaggttaacttgagggtctctggggcggtggcacttagatttggttaatgaacttgttgtctagggttaatttattgagcatgtcaatcacctgtaaactgagaaaacgaaactactcaattaccccatcctcgggaattctttatctgattgaattctttgtttactctactgttgtttactgcatcttgttatgtatcgcttaatttatgcagttctttcttgttactcgacctcatattcgaccacccagttgtctggcaacagactatgcagtcgagtatctgtgttttattttctgtctgttactcgacctcacctagtgctctgcaaagagctgt

SEQ ID NO: 160030 - DNA, 260 bp, Arabidopsis thaliana landsberg
gactcagaaatgagatctctggtttttcacataagactggtgaaagcttatgtgaagcatgggagcgtttcaagggttacaccaaccaatgccctcatcatagcttcaagaaagccactctgctcagcactttatacagaggtgttctaccaggcataagaatgcttttggataccaccagcaatggcaatttcgagaataagatgttgaagaaggcagggaatttgttgaaaacttagttcagtcagattacaatgact

SEQ ID NO: 160031 - DNA, 140 bp, Arabidopsis thaliana landsberg
tgtgatgctaacaatcaagatgtgatcagaagtcattaagtcaagccaagcaataacaggttttggttcgttctagcagtcctaagtgaacatgcagaaaacagaaaatcaaacagaaacagtaaaacactcgaccaaca

SEQ ID NO: 160032 - DNA, 98 bp, Arabidopsis thaliana landsberg
  unsure (1)..(98): unsure at all n locations
gaaaaagtaaggttgtttgtattattagaaaaacatatagtaatgtagttntattagtatcaataataataagaaagcaatgggacaaagactaaaaa

SEQ ID NO: 160033 - DNA, 91 bp, Arabidopsis thaliana landsberg
ccttctccgattccatggaggtcaagatcatcttcatgatcatcatcaaaggaggtaaatctctaccgtccgttaagaatctgactacagt

SEQ ID NO: 160034 - DNA, 328 bp, Arabidopsis thaliana landsberg
gttgaagttctacattataaatgagaccgtagacaaaaaaagaccacacgaacacaaactactttgtttaaaactaaatcctaaacatgaacatattaagagtgtctgtcttaaaccaaaaaaaaaaaaaaaaaaaagagtgtctgtggtttaagacttattttagaccaatgaaatgctgctctcgccaccaggaggtctcctcgcaccaccatagtaatcccgatattccgacttcccgtctgcaaatatattgtgtccgctcatttcccgctttttggctgagctttgcatcttctctgaataaccaggagggattttgtcagat

SEQ ID NO: 160035 - DNA, 368 bp, Arabidopsis thaliana landsberg
gaaataaactctagttctcatttctcttcaaagcttacatttttttttttttatgtttgtacatttttgtgatagcaagtttgagaatgaacatcataaagatacaaagttacagatttttgttgtggaagcaaatactaaaaattacaaaggtacagtggtggctaaagatacacagaccgaactgctctgacttctctgactagttaacaacatatctcttcagcgaggctggtggatgtttctcggagcagcagcaaccctctggtttccccatttcgctggcttttccgcatacttagctggttccacaatcgatctcgggctcctgtttccacttgatttcttaaccatctcaccattctttc

SEQ ID NO: 160036 - DNA, 364 bp, Arabidopsis thaliana landsberg
agtataatcaattatccattatctttagtttcagcattttacaagggctccttgtatttcttatgttgggagccacaagttacaatacctttggtccaaaaaaaaattaaaggaaaaaagacacaaccaagaagcaaccctttggtgcttctttacaaattcatactttcttgagtaataatttcataagaaaataaacctatctctctatattatataaataagaggaaacactccactttgttaaaatgctttccttatttgttggtttttatatgcgtccgtcaaagttgcggttggaccaaaatagtatgtttaaggtcaccaatgtgcagcttatgctcacccattgggattctcctct

SEQ ID NO: 160037 - DNA, 394 bp, Arabidopsis thaliana landsberg
cagctggaagtaaggaggccgtcgggagtatgttctgtccgagccccgacgtagataccaaagccgatgatttcatcgcaagattcagagccggactcaaattggagaagatgaactctgtgaaaagagggagatccaatttaggacccgaacccggacttcatgaatccggatcttcaacgggttataggcccagcccaagcgtatagaggctatttcttttagattttggatttttggattactactgtgttggttttttttaccttacttttgtttagactttcttatacgtaattttgtggtgtatacaattcctagtatccgtttttacagtttttagcccatcttgggatgaaccaaaaaaaatctctatacaactagtttttcttgt

SEQ ID NO: 160038 - DNA, 896 bp, Arabidopsis thaliana landsberg
tcttatgatgcttctgtttctagcattattcttgtgtttgtatatatatgctcttgttcatatggtcttaattatgagatgcaaattcatactattcagataagatcactatcaaagatttaagagtcaaaatagatgatatcaaagatacatcgtactgatctatgaacaacaatcacctctctttacccacacattctaaatagcttttttttctttctttctaaacaacaaatccgagtattaccgctaaggaatgcaactggatcatcatcatcatcttgttgttctgttctcgaccagtctagtttatatatccacctgaaggattctaccaccagcttggacaatcagttgctcaagctgcaaccagagaatgcaagaattattcatgaattcggaagcaaattaaaaccaatacaatagctgttcactcattaatgatatgttaactctataaaagttgaaaatctatatgttatgagaaccatttaaagaaattttttaaattgattcgaattatgtcttttaaataaagtattataaaaaataataaaataatatttaattttacgaaattggattatatgatgaaatgggtttgagtcgatattaaaacgaaacagtgtactactggtgaaatcttatagtgaacaactatgatataattatacaatctaaaacactaaacaacacaaataatctatataacttcaaatttaaaattgtagttataaaaaatgatctttgatgtaccatgatataaaatctagatggcaacaaaaatcagaatataaaaaagagaatttatgaaatttattctacgggaacactggaacctctaaatataatttagaggttaagaaaaaaaaaaggaagattacttttaataatct

SEQ ID NO: 160039 - DNA, 261 bp, Arabidopsis thaliana landsberg
agaaaagtcaaagggttttcactatattgaggatcaaaatgagatataaaaggaggtttagacagagccacacaggggtcataataaagaatgaccaacttcatagagtggtttgccttactcagaatccctttgaatctttgtgtcatctctatcacagatttggtaaaggtttcgtctaaacagttgatgtcatagtctgatcaaagaagaagatcggaacaaaaaaaaaaaaacctatctgtaagcaaatgatggtgg

SEQ ID NO: 160040 - DNA, 139 bp, Arabidopsis thaliana landsberg
ttatacaagtttctaccaagtataaaatacctaagatcaagtactaggtgacgttacggacatatatgcattaagattaaactcaattagaaagaatagtgtaaacgatcaaacaaaaccatagaaaccgccaacctaa

SEQ ID NO: 160041 - DNA, 592 bp, Arabidopsis thaliana landsberg
gataagtaagagtaaatttattattttattgtttatatatagccattaaaaataactcgtgttgcgagttttttaaaatgtaaattacagttaaaagaaaagagctgcacaaacacattagaaagaaaccacatgctatgagagacagcaaatgccatgtacccacttcatcaaaattgttcaaaatattccccattataccctttatagcatttgcgtttttctttgttacattacagtacatgcatttggattctcgtcgctgaacaattgaggcggataagcgtgtggcggcatttccataggcggaatcgccacacgcggtggttggtaatagtagtagtaataaggattctctatctttctcacctccacaactttgccttcttcctccccaccgccattatccgctgcttcgccttcccctttaccaccatccccttctttcttttcttcgtccgtcttcgccttatcatccttcccttcttcgcctttggattctctttctcccttttcttcttccttcttctctccgtccgctgccgcagccgcctcctcaggtggtggtggaggcggtgggtcgattttcatg

SEQ ID NO: 160042 - DNA, 299 bp, Arabidopsis thaliana landsberg
caattgcttagaagcagtaaatagctttattagtgtttctatggtcaaaatgtgtcacaatccaatgcattgactaattataagagttaaagatgaattaggagattttagacaacacttatacccattttttttcaaaagaggctaaaaccaacataacattgcttagaagtagtaaatatctttgttagtgtttctatggtcaaaatgtgtcacaatccaatgaaattgactaatcataagatataaagatagattaggagtgtttagacaacacttataccaattttctcccaaaa

SEQ ID NO: 160043 - DNA, 391 bp, Arabidopsis thaliana landsberg
tcattaccttaaaggtaacaaatattaactttttaaatataattatttatatatttaaacttaataaaacattatcaatatttaaacttataaaaagtttaatatgtcacaattttttaacatcattatataatatatagagtttaaaaaaaattcaaattttttcccttatattttgtgattcgaaattttaaaaatgaacatataataaccaattggcataaaatgtgtgggttcaacgttccgcatcgactaaaatatttagacaataattcataaacatatcatgaataagatcaacattaataaaataaatagtttttttatgggacgggttggcgggacgggtttggcaggacgttacgtaataacaattgtaaactataaaata

SEQ ID NO: 160044 - DNA, 466 bp, Arabidopsis thaliana landsberg
cgaaaatactttttaacttccaggaactcaaaatcaatgattgctttaagggcttaaacccgatcgattcaagattctatgtttcctatttgttgttttcttcaatatgtctgcacaagagttaaaataaaattggttatacaagaatgagagatatcgaaatctaaacaaagatgtctctctttctatgaaggtggctctttctccggtctgtatcgaccttagaacgcccatcttggtgaagaactaacagctctaggtctaggtaccggtttgataatctgttgctctgaactattaatccttttcttcatgatagatgagaccgttgggctgtaatagtcattactcctctgtgacattgctccttgtgaatgcatcttcttcccatggacgaagcttctctgtttctccagcatttctcttctaccattcaaactcttctgaggagttccccatctgctgg

SEQ ID NO: 160045 - DNA, 255 bp, Arabidopsis thaliana landsberg
gatgcaaggaacgaatgtgaccttacggaaggatgcaatgaatggatgtgatgcttcgggaagcatccattcgccccctatataagggaggacgcccaaggcatctcacacatcatccatacaccacaaaacattcttaaaagagtcccaacacatcccgaagttgttggtcagaaagggggtgcggctcggcgagtataactcgaccgaactgatgcgcatgctacctcccggtccaacggttcgatggagtgt

SEQ ID NO: 160046 - DNA, 129 bp, Arabidopsis thaliana landsberg
caatcaagatgtgatcagaagtcactaagtcaagccaagcaataacaggttttggtgtgttctagcaatcctaagtgaacatgcagaaaacagaaaatcaagcagaaacaataaaacactcgaccaaca

SEQ ID NO: 160047 - DNA, 303 bp, Arabidopsis thaliana landsberg
agatcgatcccctctgtattcaagactcaggagtttcattatcttttaacacaagtatcaagagcataagaaggcgtctacttatatggtccccggtgattataaattgtttatatttggctgatctgatctggtaactttgcaggtgcgctcatgtcttctgtgtacgaagagaaaaaggatgatgatgggttcctctatgtcacttacagcggagaaaacacatttggatttggatctccataatagagacctcttgctggatatttcattttactcctctctattttcaccaaatatttc

SEQ ID NO: 160048 - DNA, 140 bp, Arabidopsis thaliana landsberg
aagaccttgtaaggtttgtttaaagacccttctctatatgttttttttttaatggtcagtttgtttttgatatttaaatattaaatattttgattttgagaagttaaaaaaaaatagttcagcaatgaggatgctctaag

SEQ ID NO: 160049 - DNA, 126 bp, Arabidopsis thaliana landsberg
aaagacaaaagcattagagagagagtaaacaacaatgctctttaagaagattcatcattcttgtaaataagactatagaatgtgatgagatatttaaagtttccaaagttgtgaaaggaactgaac

SEQ ID NO: 160050 - DNA, 309 bp, Arabidopsis thaliana landsberg
  unsure (1)..(309): unsure at all n locations
taaattgttcctatcacacagtcaattgaagatttctaaacaggagaatacgatttacaaacgaagcaacatagtcgccaaattccggtttgattcaaganctagaaggaaaaaaaaaaaatcgaaattctaaaaatcaaacggcgttgagaagctaaagcgcaccttgataaagaagncgaaaacgaagaagaagcaggagatagggagncgacgacaaggggaagacaaatttccgagagctccgtggggcagtgactgaaacactcgttttctctttcgtcgtcctccgaattttttttacccagc

SEQ ID NO: 160051 - DNA, 486 bp, Arabidopsis thaliana landsberg
taatttatctcaaacacttactaatccatgaaataactccgcaggtatattacattgcttctcaaaccataacaacagctatcatagccctagctagttttatatatcttacagacatgtgtcttattatcatcatcccagatcctaataaactctctatgtctctcttaacttttggttatttcgaaaacattactaacacataacatccttgagaagcttgtacctacgagtggccggtctaggagaaggcacgccagtttttcccttgtcggctgctggaggaatactactactagtggtttggttaatctcttgctgtttgatttggtgatgaggtgaagaatattccgaccggtacgatctcttagacgatccaccattaacaccgtgttttgctccggttcgactatatgcatcacactgacaccaatcatagatcttgattggatcagcttgctctatgtaatagctactacagtacct

SEQ ID NO: 160052 - DNA, 491 bp, Arabidopsis thaliana landsberg
tgagggactggaacaaggtgttgaaggtgtgaatacacttgttgaagaggggtttagtgactcaagatctcgattcaatttgggacagaaatacaagtttcataaagtttgattccttgacatttgcctcatcgtgatacctgtcacagtaacagtagcaacacccatagtccaacattgttcatttgttcttaaccttgtggtctttgttttgctgataggtaatattgtaacatttgtattctctaagatcaattttgttgatttatattttgttaatgtgtgttatgtgagtttattgatgaataaattccaattcaatcaacagttataaaataattaaatatgaaataaaaattaaccaaattaatccatgttgaaatgatggaatttatttggcctaaacatggatgggtaaaaaataataaatcagatacgtataatggttgttaaaacaaaacaaaccaacgatcagatagattaatgatgat

SEQ ID NO: 160053 - DNA, 337 bp, Arabidopsis thaliana landsberg
ctttggcttgcttgcagaaagctccagagttacggcctgatgttagtgacgttgtgagaatcttgagaggggaaatggacatttcctccactgctttcgagttttctccttcgccaccgggaacagtttacggcagtagatcgaagcggagaagctaaaacaggcaagtgcagagtagtagttcgaggtttgatctgagcttttcattttcgaaattgttggatgtaacttgaaagagttttagcttttgagaatcgtattatgttgtaatttttgtaaactatatatatgatttaagctcttatatataaatatttaaacttttaaactttttcga

SEQ ID NO: 160054 - DNA, 971 bp, Arabidopsis thaliana landsberg
  unsure (1)..(971): unsure at all n locations
gacctcccatatctctttagggaaatgcggattctttctctatctattttatcaatcgaatcttaatattttcacttcttaaaaaagtgattttgattccggaacattctctcattcgttagattctgtgtagctacatctctttactctgttttttaccaatttgattacatttgtaacaattgtcgaaataggaatcggtgaaacagannnnnnnnnnnnnnnnnnnnnnnnnnnnnncctaagggacgaagctgtagcaagattacacgagcttggacaggtattcatcaacccaacaaaaaaaaaattcaaattgcttagctttcacttatactctgtttttaagattgtactcttcaatctgtaatttaatgtcaaatctatacacttttataccttcttatgacatatgccttggaatgtttgttttctcgtttgaccaacatgattaataacctcgtttgatggtgtcgttatctctcagggttgctcttaatttaatcaatactttaaaaattcttttctagctgtttcaatctaatgtttcttccagctactgttatcttaaaagtgaatacttctttattgaacatctcttagattctcatatctgagtttgttttggtttgatttctttacaggtgagtgatgcagctacccacttagagaggacttttatgagtccagcatccataagagcaatacctcttatccgtggatggatggaagatgccggtttatcaacgttagttttttttttacatgtactctctttttgttttatggactcatatacaaaactctcttgagtagatgaagaattggatattctttttttgcagatgggttgattacatgggaaatgtacatggtcgagtgcaccctaagaatggaagttcccaggctcttctaattggttcccatatggaaggtaattcacaattctgtttttattacctgttgttgtg

SEQ ID NO: 160055 - DNA, 260 bp, Arabidopsis thaliana landsberg
aaaaaccggtacgcaatcactctaccggttcttctcctagtctcaaaaagcggttcaccgtcggcttcatgaaccggtctaatccggtcgtctttgtttaccatgtttggttctctctctgcaacggtgccaagtgagaaggtgagagggataagagaagtggtctctcagacaagtggaaaggttaagccttttatacaagaagaaccgaatttagtggcggctataactctggacattgtcaagaacaagtgtggatc

SEQ ID NO: 160056 - DNA, 88 bp, Arabidopsis thaliana landsberg
actatcgtcgtttgtttaatttgtcctgaataaattagcgtgactcatgttatgacttatgactaagttagtggttttttcagacttt

SEQ ID NO: 160057 - DNA, 270 bp, Arabidopsis thaliana landsberg
agtacttttttaattggcctggtgaatcttctgaagttattaaggagctgatgcaaatggagttgtttagtttttggatgaaatgttactctttcgtgtcttgaaaatacatgactcttcaaacctttcaagaagttttagttttcccctacttgttttctcaactctttttatgatatcccaaatacactgttctgatttaacaactatcgtttctgtttttaacttttgggaacgttttcatttgtaaaacttaaacagtgttcctca

SEQ ID NO: 160058 - DNA, 358 bp, Arabidopsis thaliana landsberg
aaagatgaaagttaatctttagtatttaaagaaacatctgataaaactagaaattatacataatatgccgagcaagtcatgtttaacaaacagtgagggatcacaaaacatagttcattccttggaccggcattctaaagtaaccaccaccaaaatacgggttctggtgatgagcagcaaacatcaccggtctcggtatcggcatcggtatcgggatgtaacatctagtcatcataaactgctgatgctgttgctgctctagttgaaattgctgatgatcaactcgtcttacactctgctttctactattaagcaaatcgaaagtcaacttagtgaagacacgagccgtcaattcact

SEQ ID NO: 160059 - DNA, 898 bp, Arabidopsis thaliana landsberg
  unsure (1)..(898): unsure at all n locations
tgacaagtcctcccctttgaattagggtttttggacaattcttctcttcttcggctgcaaaaggtttattgtttgctccttgtcctgcgattgaattagtcttttgttatttgtatctctcaactttgattttctcctttttattattgtagntgattcctcttgaacctctgaaacattgtaaatcagtttctgggttttgattgctctgttgataaaaaaaaacgtttttttttccgtttcttcttatgtgttgtacctgaatgtaaaattcaattatctgggctctgtctctgtgctttgtctattgaatggaatgcatgttatttcagatactctagggcttaggtttgtagaaaatctcagaatcgtgtatgctgaattttgatgtcattactcagaatttgagtcaatttactaacttgattctagtttccggtgtagctatgacttgaaccggagcttactcagctcctacttattgcttctttgctcaatttttgattcacatctattcttttaaaaagtccttgaggcatagtatgaatcctacgccaaattagatgaggaatagatagagcctcatacatacatgggtctgttttctgatcacatgtttgggtcttcttgatggcagattcttgtttgctatatacactaagtagagtccatgagattgttttccacactcagttttactcagggacttgatcattcacatatgagttgggatgaaatatggctagctctgttggtgaggaaactgagcctgattggattaaaacagtgaaattagagggctctgctccatgaattaagccataccacaactgcaaagatggttggacaacaccatctgctgacacatttatgggtacctggaccaaattcttttttt

SEQ ID NO: 160060 - DNA, 140 bp, Arabidopsis thaliana landsberg
ctacgatgcgatctgagtttcaacttgaggaggcttctagacctttcagatgatcctctatggactgatgggtggctttatcttagggtgcaaaaccaactcgcatttgcgtttaatggttagttccgagaatctttaga

SEQ ID NO: 160061 - DNA, 357 bp, Arabidopsis thaliana landsberg
cctcctctatggctgcctggatcgagtgaatgggtcgagtagcatgccctgctgcttctctcctagttggatagagtagagggtcgagtagaatccttttaagctccttctgcacttgaaaacacaccaaaacatgcaatgtgtatgcaagatgatcctaaatgcctaagtgtgcaaaataagctaaaatggtgcaaaatgatatgatacaatgagcaaatgcacaactaaatgatgataaatacacacctaaaatgagtaaaatataatgttatcaactcccccaaacttatctcttgcttgccctcaagcaaacaaaaaattttaagttgaaggagaggtttgaaggtggggatt

SEQ ID NO: 160062 - DNA, 276 bp, Arabidopsis thaliana landsberg
acaaacaaaggattcaacgaccgattatatttcggcgataatcttctcaccgaaatcgatgctcaacggcgaaggttgatgtcggaaatctttcgattactcatccagcatgtgtcgtggttgtatccagttgctgacacgtgggcttaggtggagtacaaacaaattttcttatgcagtatgctgtaaacttttcgtggggcttttagtatagcctgtgtatgatcgggttacgtttaatacaatactacacttgagaaaaaaaaaaaaaaaaaa

SEQ ID NO: 160063 - DNA, 289 bp, Arabidopsis thaliana landsberg
gatgagaacacaccttgaattaaagacacaagtccaccgataagaaatatattactggactggtttgcaaattatacacaataatgtctacactctttgatacatcaactaatgggcgggggatctcaagtcaataatctagtggaattagtaaataacagctactggtttgctctctcttccgatgaataatttgaattagggaacattgttatgttgtggattggtttcttaatcaaactcctaaattgccatagagattctgcacatgagagtcccacagcaagga

SEQ ID NO: 160064 - DNA, 433 bp, Arabidopsis thaliana landsberg
tgtatgtatctctggttttttactcgttctccattattaatttatgacgtttaagaaagactcacaaacaagatgaataaatgatacaaggggattttatggcatatgcagattttgttttgaagtaataatgtaacaaatcgacattgaagtaccttccacaatgcgcactatgcacaagaaaagactcgtcaaaagcaaagcaaaaggtggggatggctcttaaggtcaacagcttaagaatcttgaggagtctcgaatctagtcggtgtatcgatacccgccatacagcaaagtccactgatcaagatgagaagaaaaacgattccctgcaaaaagaaaaagaaaaggacgagacataatcaaaggcttttacgaaattttaacacattgaattaaattatcttccagctagatatgaccaagatgctca

SEQ ID NO: 160065 - DNA, 172 bp, Arabidopsis thaliana landsberg
caacaaagaaaaagtctgtctatcatcttcttcaaatcgagatcgaagaagaagaaccaaaaaaaacaaaaatggagacgaagcctaaccctagacgtccttcaaactcagtgctaccatatcaaacacccacgattaagagatcattaccttcttgggaaaagctaggcca

SEQ ID NO: 160066 - DNA, 545 bp, Arabidopsis thaliana landsberg
cttcttcttccttccttccttctctctccttattaagaaagaccaacacagacacggaagaagtagcttggttcttctctttgtgaaggtgaatgcgggagatggggactggagattctgcttcgagactgattctctggttctgcttagggtttatgattctaggtgttggatctgtgcaatgtggagttacttatgaccggaaagcacttctcagtaatggacagagacgaatcctttactctggctccatacattaccctcgtagcactcctgaagtaaatgattcatacactcgttagttaaagttgttttatctttaaattttgttttacttacatttttgagaatatgtgatgtgggttttgctcagatgtggccaaacatcatcaagagagcgaaacaaggcggtttgaacacgattcagacatacgttttttggaacgttcatgagcctgagcagggaaaggtaatttgaaatattaacaaacaaaaacctttagaaaagattaaatcactgttttgaagagttttttattttgttg

SEQ ID NO: 160067 - DNA, 613 bp, Arabidopsis thaliana landsberg
gcgtttgaacatatatatatctaaacgtctgagaaaagaaacaacacaaacatagcttcaagtatggacctcaagctaaggcctagcttcttcatctcttttctgattctcattttacttctcaaaaatcttaattacggatctgcagctagtccgaaatgcatatccaccgagcggcaagctcttctcaccttcagagcagcactaactgatctttcgagtaggctcttttcttggtccggacctgactgctgcaactggcccggtgttctttgcgatgctcggaccagccacgttgtcaagattgatctcagaaacccgagtcaagatgttcgctctgatgagtataaaagaggttccttgcgagggaagatacatccgtctttgactcaactcaagttcttgagctatctggacttgagttcaaatgatttcaatgaactagagattcctgagtttattggccaaattgttagtctaaggtacctgaatctttcttcctcatcgttttccggcgaaatcccaacgagtcttggaaatttgtcgaagctggagtctcttgatctgtatgcagagtcgtttggtgactctggtacattatcattgcgcgcaa

SEQ ID NO: 160068 - DNA, 344 bp, Arabidopsis thaliana landsberg
gactaggttaacttgagggtctctgttgcggtggcacttagatttggttaatgaacttgttatctagggtcaatttattgagcatgtcaatcacctgtaaactgaggaaacgaaactactcaattaccccatcctcgggaattctttatctgattgaattctttgtttactctactgttgtttactgcatcttgttatctgtcgcttaatttctgaagttctttcttgttacttgacctcatactcgaccacccagttgtctggcaacagactgtgcagtcgagtatctgtgttttattttctgtcttttactcaacctcactcagtgctctgcaaggagctgt

SEQ ID NO: 160069 - DNA, 67 bp, Arabidopsis thaliana landsberg
accgttgaacttaccctctctctctctctctctctctctctctctctctctctctctctctctctct

SEQ ID NO: 160070 - DNA, 308 bp, Arabidopsis thaliana landsberg
ttaaaatcaaaaggaatggttttatttatatgaatgttgttctgttaattaaaataccgggaatatcctctttttctttttattattacaatactttgcataaatgaagtaaaatccggtaggtgtcaaagagacaaccatatgaagagttaggtatttccggcagcttatgtacgacgaagtaataaaacaaaccaaaccatgtggtcaatatgaaaaagatagttcgcatttggtaccaacccattgatgactggagatgtgatcgttttattttaggtttcagtccttgagaagctccaatttct

SEQ ID NO: 160071 - DNA, 505 bp, Arabidopsis thaliana landsberg
attgaaatatgtgagagtctggaccaaatattgacttttcttttctggttttgaggagtaccatttttgtttgtgagtaccatggaatttttgaaggtctttggtaatagacgcagcagtatccaaattgccttcaaatatatttccaatcaaacccataatttcaacatagcattccataaaaaaaacaaaagctcaagactgcaaaggattataatcccgctatatgaaaaacaaaaaagctatgctggaaaaaagaaaattcatatcctggatgtaagctttttcatctgcatagaacaaagtgtgtttattacaccaaaaccgattgagacctcatttcccggtaccggaggatcctcaggcttagcgttttggctatgaaactgatcaagctcctcttgagggaaaactctagattgaagagaaggagagatcttattaacgtgaagccacgttagatgccagaaactgacacttgcgatatcatcacctggggataaaa

SEQ ID NO: 160072 - DNA, 327 bp, Arabidopsis thaliana landsberg
taatttctatggcacttttggttgctgaaatctctttcgggttttgtcctaatcctcattagtttgggtttcgtgagtctcgttttataaggtatatttttggctaatttgcttccgaattctgctttgttttagctcaattttgcccttaacattggttgatgaacagaggatgatgtggttgtgtttattgtcttcttgcagaacatgggacaaaagagattgttgttcttgctggcagtttttacttttcttgtttcatcttcatatggtagaggtggtaatgcaacttctataatgattctatgtctgtttcctttattggga

SEQ ID NO: 160073 - DNA, 134 bp, Arabidopsis thaliana landsberg
gagggggggggggagggggggggggggggggggggaggggggggggggggaaggggggggggggggggggaggggaaggggggggggtgggggggggggggagggagggggggaggggggggggggggggaggg

SEQ ID NO: 160074 - DNA, 1367 bp, Arabidopsis thaliana landsberg
atgactacactcaatctatcaatttttccatcagttaaaatatccagctccgcatccatacccggattcatcaaaatccaacctttccttctccgtcggaagctctctaccgttatatcggtcaccgccagagacgaaggtattcatccacaaccctttcaatttcacgttatacatgatcggaaaagctaatgccgtcaatgaagctctcgactccgtcgtctcgctccgagaaccaatcaagatccatgaagcgatacgttactcgcttctcgccggaggcaaacgagtgagacccgtgctctgtatcgcagcgtgtgagttagtgggcggcgaagaatccgtggcgttaccggcggcgtgcgcagtggaaatgatccacacaatgtcgttgatccacgacgatctcccttgtatggataacgacgatctccgccgcggaaaaccgaccaaccacaaagtgtttggtgaagacgtcgctagttttagccggagacgcgcttctctctttcgctttcgagcatttagcttcggcgacgagttctgatgttgtttctccggtgagagtggttcgagccgttggagaattggctaaagcgataggaacagaagggttagtggcgggtcaagtcgtggatattagtagtgaagggttagatttaaacgacgtcggtttagagcatttggagtttatccatttgcataaaacggcggcgttgcttgaagcttctgctgttttgggagctattgttggtggaggaagtgatgatgagattgagaggttaagaaagtttgcgagatgtattggtttgttgtttcaggtggttgatgatatcttggatgtgacgaaatcgtcgaaagagttagggaaaactgctgggaaagatttgattgctgataagttgacgtatcctaagattatgggtttggagaaatcgagagagtttgctgagaaattgaatagagaggctcgtgatcagcttttagggtttgattctgataaggttgctcctttgttggctttggctaattacattgcctatagacagaactgatttgtgttcgattccttttgtcgggaatcattattagattggaattgtagaaatctcggacaggttctctagagtttgttggtgtaatcatctctatgttttcatgtactaaaaaatttggatagtaatggatgaaatatgaagaggttcatgtgtctgtaatagagtccctggttggtttcagtctttttgagtattaaactctctgttcttttggctcgtatttgtaatgatgaacaatgtgttttaggacaggaactctggttggatctgatagattcgctagttcttgccttattggtgttcagatta

SEQ ID NO: 160075 - DNA, 155 bp, Arabidopsis thaliana landsberg
tatgatacagacaattttaacaaaaagtaaacgtttgaggcggactcaaagaaagaaatcaagaagttgcagcggtatagagacctcagatcaagacatggattcagtccagtgagatcaaagataagaaagtcagtggtctttatcttcaacgc

SEQ ID NO: 160076 - DNA, 253 bp, Arabidopsis thaliana landsberg
tgcatgtatacggcagggttgggtggctcaccaacctgccaaactgggcatattcaccggatacatgggatttataatagaacaagcacttgctcacatcttgctttattagttctacttggtgaaaatcatcatccctgcgttgggaccacttcacttcatgctcatatgttacacttgggcccaatatacatcctattgtgaagcactcaaaggatcctttgacaggcgaccttatatatactatagaaag

SEQ ID NO: 160077 - DNA, 277 bp, Arabidopsis thaliana landsberg
  unsure (1)..(277): unsure at all n locations
acagagagaaatgattctcttgcggaggaactatcagagtgccagtctaaactctatgctgctacaagctcaaacacgaaccttgaaaatcagcttcttgctacagnnnnnnnnnnnnnnnnnnnnnnnnnnnagatgaatgagttgcagcttagcctagaaaagtccctgttggatctatctcagacaaaagaaaaattcattaatcttcaggtagagaatgatccgttggttgcggttatatcttccatcaatgatgagagaaagggccttttta

SEQ ID NO: 160078 - DNA, 177 bp, Arabidopsis thaliana landsberg
  unsure (1)..(177): unsure at all n locations
ggggggggggggggggagggggggggggagggggggggggggggagaagaggggggaggagngggaggggggaaggaggagggggggagggggcgggggggaaggggggaggggggaggggaagggggggggacgggggggggggggggggggggaaggggagggggggggggaggg

SEQ ID NO: 160079 - DNA, 93 bp, Arabidopsis thaliana landsberg
caagttgattcgacaattcctgctcacttagagatcgcaaatgggaattaggtcactgtctagctttgcttgaggatttctttcacgggagtg

SEQ ID NO: 160080 - DNA, 190 bp, Arabidopsis thaliana landsberg
atacttcctacgatctttaaataaaaatgctcagaggtacagaggacacaatccaaggtgaaataaaaaagtgaaccaaaaattaacgaaatagaagtgtcttaaaattaagcagatagagatagggaacgaagaaataagatcgttgaacagaaaaaacttgaaacaatctagttttgctcttgggctt

SEQ ID NO: 160081 - DNA, 234 bp, Arabidopsis thaliana landsberg
  unsure (1)..(234): unsure at all n locations
atttccattttttatacatcgaatcgaacgcgttatttataataataaaataaaatggagccttttaattcgctaccttgtccgaaaacctcaacacaaaaaggatttcaaaaggttaaaaagaaaaagaaatcttcgccggtttcttctttcgncggcgttttgacaagccgtcgtcactgttaccgtctcaaaagcttactatttcagttaaaaaaaaacaatcaaagagct

SEQ ID NO: 160082 - DNA, 149 bp, Arabidopsis thaliana landsberg
  unsure (1)..(149): unsure at all n locations
gagtcggagaaaatcaacgtgtcgtggctaaagacagcggtaacggaactggcggaggcggtggaatttttcggtcaccaccacacggngaaggtggagaaagaggtgtgcaatacatatctcacagcaaaaaagggggagatggagga

SEQ ID NO: 160083 - DNA, 95 bp, Arabidopsis thaliana landsberg
agagagagagagagagagagagagagagagagagagagagagagagagagagagagagagagagagagagagagattttttgttattgtgtctct

SEQ ID NO: 160084 - DNA, 108 bp, Arabidopsis thaliana landsberg
tacattgtgcataaaggtgagccagtggagaatatgttaaaaataatgagagaaaatttaatcagcaccactacttatggtggcaaaactggtttctctaattctgtc

SEQ ID NO: 160085 - DNA, 119 bp, Arabidopsis thaliana landsberg
ataccttgaattcataagtcaaaccagcttgttgaagaaaaggaagagctgcttgaccagcttcgaatagtacagccttttcatcaatgccatgaggccacaagactggtgtctgcata

SEQ ID NO: 160086 - DNA, 125 bp, Arabidopsis thaliana landsberg
attgttgatttagtaatcaaacaatgaatttgttctaagggatttaggcaaattcacttctctcttaaatcacccctaatcaaagaaaaagaactaggttgcacaataaaaagctagggtttgct

SEQ ID NO: 160087 - DNA, 144 bp, Arabidopsis thaliana landsberg
taatctttgacatatttattcttttctgctttcattagatcaaagcgataagaaactgatatggtgaaactgtaaacttttacatttcaccaacaatgattaacatattatagaaagaaaacaaaaaggaaaaaaaaaaaatct

SEQ ID NO: 160088 - DNA, 685 bp, Arabidopsis thaliana landsberg
cgttcttcacgagatatattataaattttatttatttagataattatttttatgaagcttcccatcaattatctagtttttccaaatacaagatctcttgttcactcgtgagtgatccacaaccgaagtcccacttatcttcatttattttagtgataacacaatcaaagtctagcgttttttatttttattttacttattgactattacttgttcgtttacctttaatcattacacaaaccattatacatgccaagattcaaacatttctcatcagaaactgactaaaaaggcttgtcgctgcagaagtcgcagaagcacttaagaccgtcgcattttccacctttcgcgcccttgtaagaacgacaatttcgataacacaacgacggataaatcctagccatacaatagcttaaaggcgcatcaatgtatccttttagacattccttatctttcgcttctatctcagatatttctgctcacatatcatgtatatacaaataaattagttttggcaaataaaattcacatataaagaaacttgcagcaatcaccaacagaaataattaaatcctctatggatcgtatgaatcacaaattttaataagtatgtgagaagtacggagttaaaatttaccagaggtgaccaaaaagaggattaaaaagattgcgaagttagaaactg

SEQ ID NO: 160089 - DNA, 1489 bp, Arabidopsis thaliana landsberg
cctcctctgtggctgtctggatcgagtgaactggtcgagtagaatgctctgctgcttccctccgtgtttgatagagtagagggtcgagtagaatccttgtaagctccttctgcacttgaaaacttactaaaacatgcaatatgtatgcaagatgatcctcaatgcatcagtatgcaaaataagctaaatgtgatacaatgagtgatcactaagctaaatgatgataaatacacacctaaaatgagtaaaatatagtgttatcaacttccccaagcttatctcttgcttgccctcaagcaaacaaaaaatcttaagttgaaggagaggtttgaaggtggggattcaaaaaccgaggcatgcaaataaatcgggtaacctcaatatccaggtagctaattatagattgcaagatgatagacccttacttaaaaacgttagccatactcgtcacaatgcaacctaacaactggccttaatctattcaagcattcacattaattaattccctttaacattcattaagcataaacagttgatcaagcaatgcaatggttatgaactcacttggtttcggggttaggctaagagacaaaaatggtccctctaatggtttggtcgagtaacaggggactctcagagaaaagattgagcttcagtagaatgctaaaggtaaaagccaacagacacatacaagaacagactcccatctcccaatgatatagtatgatagctcataagatgatctcattcccatagatgtcttaactctaccctttttctcattctttttctctttttggttcaagttttaaggggttctctttgaaacgatttaagagtctagcaggtttggttctatactttgacaaacttaaggcttttcttctattcttagcacatagggcgttttacccttttctttgaatcacaatgcctaacttctttgaattccaaaccctttactagactaatactttcttttgcatcccccttaagaactctaaactcttactcttttttttcttttcattcccattctcctttcactacaagaaaacacaagatttttgcgagaaaattttgagagggataacgtgcctcgcaaaattgctacggttttgcaagacatgtgcgaggacggacccacaaatcgctaatccgtcgcaaaatttgcgagcaacaaattcctcgcaaatttggtagagataagtgtgcagttttgcgataattacgttttcctcgcaaaacccttgcaatttgcgaggaacttacgagttccttaatcaatcataaatcaaaatcaaatagattatatataaaaaaaaacttcttaaagaagtaactagaaagtttgttcgagttcgcctgatctatcttcttgaaggatcatcagatcaacatgaaagcctaactacattgctagaattcatgttatatattggaaagaggtttacctccttgcttctatggtataatcctctacccgcgg

SEQ ID NO: 160090 - DNA, 139 bp, Arabidopsis thaliana landsberg
gtcggatagccttagctttgtagctctaagaaataggtcgggatctctcatggaagatgcaatccttttttgtcggagcttgatctgatccgtaaaaatgttggtaattgtgagatacctgagatcattttaaaatatt

SEQ ID NO: 160091 - DNA, 282 bp, Arabidopsis thaliana landsberg
aaaccatccaagtactctacatgcttttgtaagtaccctttatctgtctgttgattggatgttgatttttcgattgcacttgtaggcctattgctactgtttatttgaatctttctatctgaccaatatcatattggccatagtgcactacagggcatggaccaaaaactcgcagcacaaatttgaggatacatggcatgagcagcaacctattgaattggttcttggaaaaggtatgtggctgtcgaatatgtactctacacctccatttcgttagatgaa

SEQ ID NO: 160092 - DNA, 232 bp, Arabidopsis thaliana landsberg
ctcatggggaagtatctttggctgcttcacaaccttttatttttttgctctctagcttcctgtctgtgtaatggtaattgcaaatgtcatgacctgagctttcctctttgaatgccagataaatctgcgaagatatgtctaaggtttgtgatatcattgctgcaggagctcctgtacattgctatcgctttgatactgatatttcctttcgatattttctacttgtcaagtc

SEQ ID NO: 160093 - DNA, 276 bp, Arabidopsis thaliana landsberg
attgataatggcttgtaacaaagtctcagcctaattgaattggcagagttgtaatttctttgaaaagatgtattttttttttaagttggtcatgtaaaaaagcaagcaaggatattgtgtagaatgttgttatttgtaattttctgtggaaggatgtattgttacagttttttaatcttcttgtattttctggccagtttgtatagattcaatgactgaagaaaacgattatggaggtaatcagaagatacttcatcaaggaagtggaactatgcc

SEQ ID NO: 160094 - DNA, 384 bp, Arabidopsis thaliana landsberg
cgatgtatgatataagagttgatgagtgaaaataatctggtgtgaggtaggtgtggacaagtgatgagtattgtagtgctcaacatagagtggtcgtgattgcaagcatagagagattctcaagaccattctccttcttcccatcacatgaagccaatattgagccattgtaggagtttataagtgaggaaaaccctgccttgttataaaaagtacaattggggaaagttctttgtttcaagaaacagaagtgatttcaagaaactcgaggttgagaatatccagattgatcacttcaaggcttagttaatcacattataattaaaccttatgttgatttctattcgttctttttatataagttagccaagttcatatttccca

SEQ ID NO: 160095 - DNA, 117 bp, Arabidopsis thaliana landsberg
atcgactttcatcttcttcacaagaaaacctctctcagtcgctaaaacccttgaaccatctcttgatcgctagcttctaagtaagtgtatagttgaatcatttcgatcaaagtttag

SEQ ID NO: 160096 - DNA, 321 bp, Arabidopsis thaliana landsberg
ttttattaaaaagaacttgtgtttgagactttattgaaatgattgagagcaaacttgaaatcagagtaagtattacaatgcaagtcctagtcgatgtgatggatcaaaatctttgcaaataaaacagagacatgtattgatagtgtaaactgagaccaccaggcttgtgtaaattacttgctcacaagaaaataaaagcaattcactcttctgatggcaggcattcatcaaccatctccacgaggtttggattctctagtgcagccgccacacgttctttatcgtttagttgtttattcactgcattttaaacaccaagaa

SEQ ID NO: 160097 - DNA, 221 bp, Arabidopsis thaliana landsberg
  unsure (1)..(221): unsure at all n locations
ggttatttcgtttattaattagtttcgacactctaacaaatgttttgtcccttacctaaagagaagacggtcatgaacaaagcaaagaaaagagtcnnnnnnnnnnnnnnnnntcccatgactcatattggtaaaactatcttctctctttcacacttcttctttttactttggactaatgatttaatcaaagatgtcattttaacatatatgtataaaac

SEQ ID NO: 160098 - DNA, 85 bp, Arabidopsis thaliana landsberg
ttattttattttttatatttttttttatttttttttttttttttttttttttttttgttttttttttttttattttttatttttt

SEQ ID NO: 160099 - DNA, 181 bp, Arabidopsis thaliana landsberg; identical to SEQ ID NO: 19081

SEQ ID NO: 160100 - DNA, 180 bp, Arabidopsis thaliana landsberg
  unsure (1)..(180): unsure at all n locations
ctcttctcatctttcttttgtcaacaaagaaacatttccattgagtctctctcaatgttcttcttcttcttctaagattaattcaaagtgtttaatacttttgaaattttaagtttctttttcgtcagtttcaaatgggtgacatncatcgtcacaaggataggcaaatatggtcaccct

SEQ ID NO: 160101 - DNA, 371 bp, Arabidopsis thaliana landsberg
  unsure (1)..(371): unsure at all n locations
attccttttacgttttattttattgtcaaaatccttcgcgttttcttatttgataattcgactaagaacatcaattagaccaaactcgacagtactagattggactggcctgtctaaccgggttttaaacctaattaaaggacaaggtaagagaagagtagcaaaaatcagatcttaaacagaggcacagattgggatgaaaaagattcagcagagtaaaacaaaatttaatgtctggaaaaattcaataagaaaatcaccatgaaaggtaatagttcagctctatccacaaacacaagctgcgtcnntcnncagcagcagaaaaaatagagtgggtgccttctttacaaatgaagcagaagacccagctg

SEQ ID NO: 160102 - DNA, 490 bp, Arabidopsis thaliana landsberg
cattgataagaacaactctagggttcatcaggtggctaaaaggtgaaaggaagataccctagacgataaattcagaaaccgggtcaatccactctcgtgacagagacccccataactctacaacttccaaatctccactgtcgttgttgaaacatattttagaattgtttaagcaacaatctaccaaagccgataagcggacaagcttatgtctttatcaagtctacaaatctctggaattcgtagatcagacatccatttgaacgtcttttggatgttggacgtctatgatcgaatctccacattagccagggaaaaccgcataggggtcaagcaaatccagaagggatctaacctaatcttaaccacttgactaacctagagattaccctaatctaatctatcctcaagaaccctaatcactactcaagcaacattctcaagaacacaaacccagaaattactgaaatcatatcaaaatgtagatcta

SEQ ID NO: 160103 - DNA, 73 bp, Arabidopsis thaliana landsberg
tcctctttttttctttttttaatgaattttgattttttatcataactctagagaagcttaaactaatctctga

SEQ ID NO: 160104 - DNA, 308 bp, Arabidopsis thaliana landsberg
atcttcttcccggagaggttaaggaacggatgtgacatttcggaagggtgcaaggaacggatgtgacctttcggaaggtgcaaggaacggatgtgacctttcgggaagcatccattcgccccctatataagggaggacgcccaatcaactctcaatcatcacaaaaccatccacacaccacaaaacattcttaaaggagtcccaacacatcctaaagttgttggtcggaaagggggtgcagctcggcgagtataactcgaccgaactgatgcgcatactacctcccggcccaaggtttgatggagtgt

SEQ ID NO: 160105 - DNA, 374 bp, Arabidopsis thaliana landsberg
gcccaaggaaaatggaaacaaacggagcttgaatccatcttcattgacaccattgatttttgttaggttgtagagcctatcgaattcattaaggtggtcgagtggatcctccgttggcagaccagggaatttgttcccctgaatcatcgagatgagaccactcttaatctcgaagttattgttctggatagcaggtggtgcaattcctttcctctgaccatggtcccttggtgcatctccagtaccaatgttgggagggccattttgttgattttgtttggcagccatttcgactggttgttgtggtattaggttggctgtgtttctcctttctctgatgttgcgagctatgcggtcgatgttgtcgttgaaaa

SEQ ID NO: 160106 - DNA, 114 bp, Arabidopsis thaliana landsberg
  unsure (1)..(114): unsure at all n locations
gggggggggggggggagggggggggggagggggggggggngggggagagaggggggacgagggggggggggggggggggggagggaggagaggagggggggggggggggggggg

SEQ ID NO: 160107 - DNA, 128 bp, Arabidopsis thaliana landsberg
tgttgatgatgacctagtgaaagtaggaggatgatcttattttctttttttgtttcagcacaaagtaatggctacactaggcaccttgcaaaactattgattcatctgtcctggtgtttgcaagagct

SEQ ID NO: 160108 - DNA, 104 bp, Arabidopsis thaliana landsberg
ctaaatcattcatagaaggcttaatcctccaacaataccaagcttcccagtgattttctcgaaatcattttctatacaaaggcaataaagacgtgtggggaaac

SEQ ID NO: 160109 - DNA, 101 bp, Arabidopsis thaliana landsberg
gccattggcgaagaacaaagtttgaaccttttcttcatccatctctctccgtcgcttcttcctaacgattccttcactcgaatcaggtaaactatttactc

SEQ ID NO: 160110 - DNA, 121 bp, Arabidopsis thaliana landsberg
gaaattagcaacaaaaaacttattttacaatacatgtctacaaagatgaaaaaattatcttcttcaattaatctataaaagtacaacaaggttgatttcgggtgaagaaaaactacggctg

SEQ ID NO: 160111 - DNA, 432 bp, Arabidopsis thaliana landsberg
gtcgtcccgacttcaaccgggggcggcagagtctgctggtcagaggcttcctgtgaattttggacactcgggctgacggtgcccttaaaattgagtcgcttttgagctccagtagtccgcgtggttaatgcagaaagtgaatcgactcgctccgcgtacgcgttgttggctgatctgatttcagaatggttcgccgccaatgctgcgagctggccgttgcattgctcttggaaggacacgaacttgtcggagagggacgtcacggcaagctgttgttggtcagtcttatcggacaattgctgaagaagttgcttgatgtcgtcgagggtggaggcttggtcgccggaactttgactgtcgttgctactcatggtgactttgatcgttgttctgaagtaaaagacttaaagtcccctccttctagcgccaaat

SEQ ID NO: 160112 - DNA, 402 bp, Arabidopsis thaliana landsberg
actgaatcaaatataattattgaatcagatatgatttaattggttaaaactttgcgagggatttgctaagagctctcgcagttccctcgcaatgtaagctgcattttgattggtttaaaagacggttcgttgcaatttcctagcaaggtttgcaactgatttgcgaggaaatatagtttgagcggagctcaaacctgccgcctcaaaccctaaacctaattttttttcttcgattatcttcttctccgatctgtctcctcgccggcttctcttcttctccgatctaatttcttcgccgccgcctctcttcttcttcgatctgattacgtcgccgcctctcttcttcttctctgccgcgtctcttattctccagcagccgccgcaactcttcttctccagctt

SEQ ID NO: 160113 - DNA, 82 bp, Arabidopsis thaliana landsberg
tttttttatttttttcttttttttttcttttttttttttttttttttttttttttatttttttttctatttttttttttttt

SEQ ID NO: 160114 - DNA, 288 bp, Arabidopsis thaliana landsberg
ggtgagtaatcataatactataaatatgaaaatgtacgtttgggatcattaaattattcattaaaaaaaaagttacactctagtaaaattctatgtttaatagtgtagaagagaggaaaattcagacaacgtgttagcttgtaacatctatctaggtgagtcacctcgagtgaccaagcaaatctatccaattagcgtctaggttgactaggtttcaagaacttcattttctttctcattagctaaggtaaacttaaaaaaacaatcccgaagtttaattggcttttg

SEQ ID NO: 160115 - DNA, 262 bp, Arabidopsis thaliana landsberg
accaaaggatacaaggaacggatgtgaccttttgaaagaatgcaaggaacggatgtgacctttcggaagggtgccaggaagggatgtgatgctttgagaagcatccattcgccccctatataagggaggacgcccaaggcctttggaatcatctcacaacattcaaaacaccacaaaacattcttaaaagagtcccaacacattctgaagttgttggtcgaaagggggtgcggttcggcgagtttaacttgaccgaactgat

SEQ ID NO: 160116 - DNA, 476 bp, Arabidopsis thaliana landsberg
gatagaactaatagcctcccttgagatcgttgacgacatcgtacgggattggagtgacagtctccaaggtcattccttcgaccatgaatcctggtttgggtcctttaggctgtctcttggtgctgatggtctcaccattggctttggctgcagccttgagctcatcgtttttcttcttcctcagcttgaactcctcggcacatcttgactgctgcacatgctccacacgaacatgaatcctcttccttatgatcctgttcccaatctgaaacaaccccaccatcatatgtcagtcataatacccaatataagtagtactagcaaaaatgtttgtgttctggtcataggctaatcagcattacacaataacatctctaagacacttatagaaacaagattaatatacgaatgttggtggtcatttaaagcaaaactagagcaatgcgatagtcatgaaaccaaacatactagcagtt

SEQ ID NO: 160117 - DNA, 177 bp, Arabidopsis thaliana landsberg; identical to SEQ ID NO: 62943

SEQ ID NO: 160118 - DNA, 114 bp, Arabidopsis thaliana landsberg; identical to SEQ ID NO: 78891

SEQ ID NO: 160119 - DNA, 392 bp, Arabidopsis thaliana landsberg
  unsure (1)..(392): unsure at all n locations
tgtttctgtgtcgtcttgtcagtttcatttcggcttccgtgaggtttctcctccgtcggtaacttcttatcctagacgattcgaggtaaattcttgtcatgtgttttcttcagtgacagtagtgtgtgatcggtcatttgaagtcagatgttctgaattaggtctctgatcggagatttcctgcgattccgattaaatgttcttcatctgagccggaaaacggtgaggattcggcaccgtcgctgtcttcctctcctcatcgtctacaagtgaagtatctactagtnnnnnnnnnnnnnnnnnnnnnnnnactggaatcggcggtattgggatgtanacactgcgtatttgcttcctcaaggcactggctcgatgcgtttgcgtattgtggt

SEQ ID NO: 160120 - DNA, 382 bp, Arabidopsis thaliana landsberg
tcattttctaaaaggcaaaaaatattaattttttaaatattattatttgtatatttaaacttcataaaacattatcaatatttgaaattataaaaagtttaatatataaaaaaaattaacatcattatataatatatagagtttaaaaaaatctcaaatttttttccgtcatattttgtgattcgaaatttaaaaaatgaacatatattaaacaattggcgaaaaatatgtgagtttaacgtcccacatcgattaaaatatttagagaatgattcataaacatatcataaataagatcaacgttaacaaaataaataagttttttttttgcgggacgggtttggcaggacgttacttaataacaattgtaaactataaaata

SEQ ID NO: 160121 - DNA, 142 bp, Arabidopsis thaliana landsberg
gttggtttgtcatatcccttttcagaggaaacaacaacaacaaaaaccattgatgagattttctgattatggattcacttttactaaactgtatctactgttagggtttctgatgggaggctcaaacctgatctgtcgaacc

SEQ ID NO: 160122 - DNA, 93 bp, Arabidopsis thaliana landsberg
gacacccgactaaagacatttctaaaacatgaatggtttatgctcaaatgagcttattaacataaaaatctaagattaaaactgcaatagttc

SEQ ID NO: 160123 - DNA, 231 bp, Arabidopsis thaliana landsberg
agcccatcctcgggaattctttatctgattaaattctttgtttactctactgttgttaactgcatcttattatctgtcgcttaatttctgtagttctttcttgttactcgacctcatactcgaccacctagttgtctggcaacagactgtgcagtggagtatctgtgtttcattttctgtctgttactcgacctgtctatcgacctcaccatgtgctctgcaaagagctgt

SEQ ID NO: 160124 - DNA, 272 bp, Arabidopsis thaliana landsberg
tgtcaaaatgctgacttttagttaacatgtcagtatctcttccgcgacgccgttttatgactacttactatccccaccgacctcgacttactgagcctcatcgctgccgtcgtcaccggtctttctttctcaataagtaatctcattgtaaccaccgtctcatcaccaaacccgtcgtatggatccggtccaactttcgctcctactgatctcgatctcagcacaaaattccgacgacgaaacggcagcgtttcctccggaactaatctctc

SEQ ID NO: 160125 - DNA, 300 bp, Arabidopsis thaliana landsberg
aaattgcttagaagcattaaaaagctttgttagtgtttttatggtcaaaatatgtcacaatccaatgcatttgactaattataagagttagagatggataaggagtgtttagacaacacttatacccattttcttcaaaaagaggataaaacccacaaaaattagcttagaagcagtaaatagttttgttagtgtttctatggtgaaaatgtatcacaattcaatgcatttgactgattatataagttagagatggattaggggtgtttagacaacacttattcccattttctcccaaaa

SEQ ID NO: 160126 - DNA, 347 bp, Arabidopsis thaliana landsberg
  unsure (1)..(347): unsure at all n locations
acttggcttcttcaaaagatcaccatctgcgctcgggttcgagactaagtaacttccgctgtggatctgtttcaaagtcgcggttatcggatgcttcgaaaggcgagaaccagaatgctagaaaatcaagatggtaatatgatcaagaaattttattcannnnnnnnnnnnnnnnnnnnnnnnnnntaaagactttacatctacattttttctctgttcgcccgttttgtcaagagtgattctctcatctgtaagtgacataaaacatgaatttgaactggtaatgatccaaacatgtaagagcatgaatttacacgaaatcgtcttttgatttatatcatttaaga

SEQ ID NO: 160127 - DNA, 339 bp, Arabidopsis thaliana landsberg
attatttacttctataaataaatataattattaagtatgaatgactctattatgtaatttgatatgtttaaaaatattaaattgtaatatctaataatataaatattatattgataacttatcaatagggatatctcactaatgaaattataattttagtatgagttcttctaaataaattttagtatgtattttcattggtgtcagatcatataatatggatcatataacctgactgatggatatctccaatggtgagatatcgaatcgttggatcatataaacatatggatatctccaatgatctgaccgacaactttagcatttttctgttttcag

SEQ ID NO: 160128 - DNA, 305 bp, Arabidopsis thaliana landsberg
gttttatactcccaataaaaaaatatttaatttttaaattctgaaaaacaaacaaacatagcttttacctttttatgcctcttcaacatatgaatcaagtatccatgtggaacattaaaaatcaaaaatgataactccatataacatattcttaaaaatctaaaatgactttaacctcaccagaattagcaaatggtgattttttaactcttttcatttttagtttcttaatgactcttctaaatagatgttcgtaaagcaaaaaattagcttccaaaacttataaaggttatatagatcttact

SEQ ID NO: 160129 - DNA, 359 bp, Arabidopsis thaliana landsberg
atcacaatgcctaacttctttgaattccaaactctttactagactaacacttttgtatccccctttagaactctaaactcttactctcttttttttcttttcttatcattctcattctcattctcattcaatccatacacaatcccaatcccaaatacaagtctccacctagtcctagccaacccaaaaagcgtgggctaggtctacatgaaagactgcttttgtcggctcatacctaacaagttataccaagctcaatcaaaaaagacctcacaatcacacacatatgatttttggcttgaaataaggctaggctaagggtatgggaaactcctctaaaaatgatagtcagctacttg

SEQ ID NO: 160130 - DNA, 755 bp, Arabidopsis thaliana landsberg
gatcttacgtgtcttgcagtttacagataaaatcacttcaatgttgcccaaaaagcattcccagcttgtgttagttcaaaatttccacttttctttgaaggctgtcatcctggcaaagcaaaactacttgctcacaagcccaaaatgaaattattgttttctcaagtgctgagaaattgctagtatattcaccatcgggttattaataattgatgcaggaatgatggattgcttacattcactgaaaactttgtgaaggaccatctgttaccgacaatgtttgtggactataggaaaggcgtacagcaagctatatcaagtaaaccccatatactatagagatttgatcatagagttttttgctattttagggtaattattctctaaatgtataacatagaattgcatcttgaaaagtgggctgttagtttggccccaaagacttggagttttgccatcacaaagtcgtaatagaagcatttgctctcaaaactaattgaattggtctgccaatatagggtatggcagttttatgaaaagttaaagcatctttgagaattattgcagatatctttaagattcttggcatgaaatattttataggaatatttacatttcactaatttatttaaaacaaagtaccagtaatgtcggtgtgtaattctgtataaattcaaggttagaaacccatggttctgaaatcattttgcaggccgtgccgcatttcggccgcgtgcacatacaactacttacac

SEQ ID NO: 160131 - DNA, 138 bp, Arabidopsis thaliana landsberg
tgtgatgcaaacacatgagatgtgatcagaagttgctaagtcaagccaagcaataacagttttagggtttctaacagtcctagtgttgatgcagaaaacagtaaaaagtcacagaaatgaccgaaatactcgatcgca

SEQ ID NO: 160132 - DNA, 125 bp, Arabidopsis thaliana landsberg
cttgtacaagtctttgttcaggtgccaaatatctcttacaagttgtacatggtgagatccctcacacgttttttgactcaagctaaacgatttccgctgctgagattgttgttcatgttcttgat

SEQ ID NO: 160133 - DNA, 439 bp, Arabidopsis thaliana landsberg
  unsure (1)..(439): unsure at all n locations
gggggacgacatcggggaactaacgcctcaacacatatttcttttaggcgcagagaagccaaacgcagggggcggggctgtttataacaaacaataaagccnaaaccaactctaagctctgcaaaacccatttttttaagctgaacctagaaatcctaagacctgagctaaacgaattcagtggagaaataaaaaggtataaagcggaagaacctgaacaggcttgctactgtaattaggctgcgtaggaagagatatccatctcgcggcggaggcaaaaccgatgatttctctcgtatccatctactccggtgacgaatacaaaaatggaggtaaagagagaaaaagcgtggttggtgttggcgagagtgataaaaccagtctagggctccgttgagccttctcgggagggaagacgaagagaggaaacactgttgaa

SEQ ID NO: 160134 - DNA, 650 bp, Arabidopsis thaliana landsberg
  unsure (1)..(650): unsure at all n locations
caatcagaaagttgatcccaatctaaatggtgtgtaatatgtgcaggtagggttcttcaggagatccaaaaccataaagggtaaacgcctgccttcgtcttgtaaagaggtataaccaatcttcttgaacagaagagagtgtttgatttcatgggggaaaccactgactaatctcttatttgctcttgtttaatctgacagaaagaccaagtgaaagaaggtcaaattctgtgctannnnnnnnnnnnnnnnnnncaatttccaatcgaggttagataatattccattttaattcctgatttagtaattactatcacttgcttcaaccaactcagttaaattgcttctctgtttatcgatcaatcttctagtctgatgttaccggcgaggtagtcaagatactccgagaagatggaggcaagtctctcgtcttctttaacctttcttcgtttttcttaaaacctcggtgtaatgatttttcttatcgctttctcattcggaacagagcctgtaggatacaatgatgctctcatctccatccttccatccttccctgggatcaagaagcttcagtaaaaccaaattcgagctggttttgagttatgacactgtgccttgtgtatgcttttagataatgaaacttcattcat

SEQ ID NO: 160135 - DNA, 100 bp, Arabidopsis thaliana landsberg
acctttcgagcagaagagtgaaaatccgaagaacggcgacgaggagatgtatcggaggaaaccgatgatggaaatggttttttagtcggaaggaggaatc

SEQ ID NO: 160136 - DNA, 362 bp, Arabidopsis thaliana landsberg
catatagcttaagctgctcagacaccattcaacgagacacttagtgagagagtagcaaatgacttactcttcctgggacggcaaatctagcttcaacttaagaaatcattggtctttgcaatcttcacaatctcctcagcttcttctctcttagaccctttcaccaattcatcaactaactgctgcaacgttgtttgaccgacaagataccgcttactgaatgtctccttgaagagctcaatcgcagactcaaagtcacctgctttacacatagcaggaagcaataaagcaaaggtagctttatcaggacgataaccatgcttcacaatttctttgtaccacgcttcagcttcgtccatttt

SEQ ID NO: 160137 - DNA, 163 bp, Arabidopsis thaliana landsberg
caatcaaaaagaagttagtcaaatgagtcctgtggccattctgttcatagtgtttggggcatttctcatgtttttgttcatcttgtggctcattcactttctctaccacaaagctaagaaggatggcaaggaaagcatcgcctgtcttggcagcggttacggt

SEQ ID NO: 160138 - DNA, 225 bp, Arabidopsis thaliana landsberg
ccaaaataaacggagaaaaagttacttccgaaaccctaaaaaaaacacgatgatgctcaagcaagctgcgaagacggctctagggcttacgtcacgtcaatcaacacccgtggtctagcgctaccgtcccgaacctacccatgagaacgtcatcgaccactacgataatccccgcaacgttgggtctttcgataagaatgatcccaacgttggtacgggactcgt

SEQ ID NO: 160139 - DNA, 129 bp, Arabidopsis thaliana landsberg
tattttcttccttttctctagactgatcgcaaccataagtattatataactcttttacccaccgagccttggtgacaaacatgcatatacataatacattaatggtatgcacatatgtgtatattcatt

SEQ ID NO: 160140 - DNA, 284 bp, Arabidopsis thaliana landsberg
atctttttgaagccgtcataacttgcaagtaaagaatggtcagtctaatgttctttagttcggcctcacctttatgctcttctccatcaaaaattcccaaggctaggtacttgtttacaattataatgcaagacatggattcaaatattttacgctattaagtagtctttctcttataatcggcttcttgatacacttaacttcactctttcttctacagtttggacttcgagatgaagaaacttggtaaagttttctcatcttgactctcaaaactatgaaca

SEQ ID NO: 160141 - DNA, 127 bp, Arabidopsis thaliana landsberg
tataactgtaatacctaaaaacttaaaaggaagttgcatttaatcctcagagaatgttacaatctgtagcttaaacgaacagtgaaggaaaaaagaggaaagaagagtttaagctgcaacaagatca

SEQ ID NO: 160142 - DNA, 374 bp, Arabidopsis thaliana landsberg
gccttgttcttcctaacatcacctaacctgagtgagtttttgttgtcctatagatagatgctcagattaagcttttagtttcctcagctaacttgttgctgatgaccaccgtacattggatagtaaggtgcagcgggatacattctcgggtcaggttgagggaccatgtatccatacccattgtaaaactgtcctccatagtacggatcaacccattgatttccatacttctctctaggctgcaagacaacacaaaacttgaaagaatcagagatgtgtcaatcagagccattcaaaccttatcacatcaatgagggaaaccacagcaaaccaaactttctttcaaagagaaaccataacagtagtcttatacc

SEQ ID NO: 160143 - DNA, 140 bp, Arabidopsis thaliana landsberg
tgtgatgctaacaatcaagatgtgatcagaagtcactaagttaagccaagcaataacaggttttggtgtgttctagcagttctaagtgaacatgcagaaaacagaaaatcaaacagaaatagtaaaacactcgaccaaca

SEQ ID NO: 160144 - DNA, 171 bp, Arabidopsis thaliana landsberg
tgagtttaaaagaaaatgctagttatatctcaatctcaatacatctgatagtgaacaagatattcggatttggaaaaatcacttcgcttggctcatttctcacactacaactttcataacctcctctcctatcaaaattaacgacaatttcgaaaaaagaaatttcatgag

SEQ ID NO: 160145 - DNA, 198 bp, Arabidopsis thaliana landsberg
tggtttgtaaagaaaccaaagttccatgtccataaggtcttggaagtggaggtctctacaaactgaaagaaaaatcaacaaacaattttttgatgtccataataacgagtctatttatatatatccattcaaaaaccttttattgattcatatccattctatataccatgttcataataacaagagattcgattaacc

SEQ ID NO: 160146 - DNA, 373 bp, Arabidopsis thaliana landsberg
tgttgattttggttggaatgttaagcacctggaagaaggaggtctgtgaagggtcaagaccagtgttgcctggttgcacgaccacatcaattggagcgactaaacctacacgagcaggagctccaacctgtcaaaaaaaggacaatgaatttctcatcaattaacagtacaagactaagttgaaaaaatcaatcaatccaacaacatgaaaggacgctacaaaaatgtgagcctaggaaactagtagactctcaagtaagtttcttgaatgtggttgcgtttcaagacagaaaatagaggttttgagtccaatttaaccaaaatgcaaactttatacctatccacctacaagttaatacctacaggataggtt

SEQ ID NO: 160147 - DNA, 370 bp, Arabidopsis thaliana landsberg
attgaacaggttaggcctgttaaaatccccaagagtacgacgtggttccgcaactggaggaatagctgcaggaatctggtgttggtgtcgatcgacacctctattgtgtcgttcgacaccaatcgcgtcgtcgtgctgctcccgatggtgtcgatcgacacctctgttatgtcgatcgacagcgagccctactgcgtctctggcagctatttgcgcattgaggcgcgcttgatcctcattggcgtcctcaggtaggatgagtccatgatcatccaatctctgaccagcctcattgtaggcttgcccatcctcaactctcaaaactccttctacatcagctctgatgactctgtcagtcattgctaatttc

SEQ ID NO: 160148 - DNA, 94 bp, Arabidopsis thaliana landsberg
aatagattagatgattttattcttatttgaaatttgatacaatttggttgatatatatatatatatattatcaaatcatcaaaaaccacaattt

SEQ ID NO: 160149 - DNA, 374 bp, Arabidopsis thaliana landsberg
tctttttttacagtgaaggcagtgacatcctcaatatccgtaataagtttacacgtttctgacaaagatctacattacaaacatatattttgagtgacactctctctctcactaaattacacaaaacggaccatatttacatacttgaagaatcttactacctcttaggatcttcagattcagctatgttctcaagcctgcgacgtttctgagggctttcacatttatcgtcttcggtttccgacgctttgttctctgcaggtaatggcggctgaggcgaagatgctttggttttggacatgttttgagaatctggtatagagtcatcactaggtgataacactgtctgcgaagaagaagaaatccaccttcct

SEQ ID NO: 160150 - DNA, 77 bp, Arabidopsis thaliana landsberg
tttttattttattttttattttatttttttttatttttttttttttttttttttttttttttttttttaattttttt

SEQ ID NO: 160151 - DNA, 360 bp, Arabidopsis thaliana landsberg
atcagaatgcctaacttctttgagttccaaaccctttactagactaacactttttgtatcccccttaagaactctaaactcttactcactttttttttcttttcttttcattctcattgtctttttcaatcattccatacacaatcccaatcccaaatacaagtctccacctagtcctagctaacccagaaagcgtgggctaggtctacatgaaaggctgctcttgtcggctcatacctaacaagttataccaaactcaatcaaaaaagacctcacaattacacaccaatgatctttggcttgaaataaggctaggctaagggtatggaaactgctctaaaaatgagagatagctacttg

SEQ ID NO: 160152 - DNA, 399 bp, Arabidopsis thaliana landsberg
tcagggattccagacagagatataatagccagagaatgtcagcacatatagcaaagtaagctagaccagaaactgttgagcttacattcaaagcaaacttggacaacaaaagattaaaggtctactgagagaaacacaacagaagcaaataaaagatttgggatcaatactgaaaccttgttgagtatcggagaaacgaagttattcagcagccatgtcgtcctcgtcatcatcgtcttcttcctcaaagcttaggtcaaggtcagcaagcaactcttcaattggaacagatggtgcaccttctccatctgtcattgaagcagtctcagaagcttgataatccttgtccctgtacaaagatatgttgaaccttagctcagggttttcttcaagatccct

SEQ ID NO: 160153 - DNA, 239 bp, Arabidopsis thaliana landsberg
tagatctacaatttgatatgtttttagtaatttctaggtttgtgttcttgattattttgcttgagtagtgattagggttcttgaggatggattagattagggtaatctctaggttagtcaggtggtaaggagtaggttagatcccttctggattcgttggccctaatgcttatttcactggctaatgttggaatttgacatagggtatccagcgtccaaaagacgttcaaatggatgca

SEQ ID NO: 160154 - DNA, 309 bp, Arabidopsis thaliana landsberg
attttcatttaacaatatatttgaaaatatataaaaaatatattttcaacaatgttttggtttctaaatatttttgtggatttctgtttttttattaattattagctctatgcgtttgggtattcgggtcgggtatttcgggttcgggttttcgggtttagaagtttaggacccgttcgggtaatttaagattttgggtcgggttcggtttgggttcgggtttgggttcgggtttgggttcgagtttatttatatattgaaatatgaaattttgtgtgcaaatttattaaattacttgaaaatttcaaa

SEQ ID NO: 160155 - DNA, 308 bp, Arabidopsis thaliana landsberg
acctttcggaagggtgcaatgaacggatgtgacctttcggaagggtgcaaggaacgaatgtgaccttacggaaggatgcaatgaatggatgtgatgcttcgggaagcatccattcgccccctatataagggaggacccccaaggcctttaggtcatcccacatcgatcacaacacaccacaacacaatccaaacccagtcccaacacatcccgaagttgttgatcgaaaagggggtgcggctcggcgagtataactcgaccgaactgatgtgcatgctacctcccgatccaacggttcgatggagtgt

SEQ ID NO: 160156 - DNA, 339 bp, Arabidopsis thaliana landsberg
agacgaaagaaaaaaaaaagaagcaaaacaaaatagagaaagagaaagaaagagaggatggtgataaagaaaatcgagctatgcatagagattacgaagataacaatggagttcttggtggtggtggctgacgccgtcacaatcttcttaaggcaatcttctccacctcctccggctctactccgccatggtctctactcatactctgcctcccctaatcaatgataagttatcatccgtctaaccgtctttcctaagtttgtaatcttttgttttaatgctttgtaatattcatgtatcttcttgttctttattttgtaataaattagggagagtccc

SEQ ID NO: 160157 - DNA, 754 bp, Arabidopsis thaliana landsberg
gcataaaggaatcagcatttggctagatgtgcctctagaagcattagcccatagaatcgctgctgttggaactgattcacgaccactgctacacgatgaatcaggagatgcatactcagtggtactgattctgactgttgtacaatcataagccttggatacttcaaacaaaacattcatctttttttctgtttgtgcttgtgaatgaattactcgtaggctttcaaacgtctctcggctatttgggacgagcgcggtgaagcatacacaaacgcaaatgccagagtctccttagaaagtatgtcttcttcatccatcttatctgccatagcctttgttcaatctgtgtaacttcttctggaaattttgctctccttccttgtacgcgaatcatcagatatttcagcaaagcgtggctataaaaatgtctcacatctcacaccaactgaaattgctatcgaggtaagccaggtcctttctcagttacttcatcattaatcatttcaaatcaaactcaacaaagcaaatgactcatcatcaggcctttgagcaagttcagagctatttagagaaagaagatggtatggctagaccagatggactctagttccagaaagttatgtttccccgcaacatctcatgaatttgtgcctagttttgaatgttgtatataaatgaataatactctgtttgagcacattgtcttcttttcaaattgacccaaaaaatgaaaaggagccatttgcatttttat

SEQ ID NO: 160158 - DNA, 156 bp, Arabidopsis thaliana landsberg
aacgttcttggcacaatcagccgggaaagaagaccctgttgagcttgactctagtccgactttgttataatgtcttgagaggtgtaggataagtgggatcttccccccaagacatataccactccttttaacctccctttacttactacttgaata

SEQ ID NO: 160159 - DNA, 363 bp, Arabidopsis thaliana landsberg
agaaagaacatgtaggctcatagaagggctttggtttagatactaggtgaactaataaaacttgataataatgcatgctttagtatatgatttctcggcttcttaggttctcttagctctacgtatagagagtttcgcagaacaccaccaattactctaatatcatagtttgagtttgacaatggtgcaataacaatccaaatattagctagatcggcaatttatctatctcccgagacaattccttggacccgacgctttaatcacttgaatctacaactcgtttacttggttattcgtcttttacattcatttactttgtctagcttaattgaaaaaatcataagtctattgtgtgaacat

SEQ ID NO: 160160 - DNA, 2042 bp, Arabidopsis thaliana landsberg
atgatactaaattttgatatttgggttcgttcgattttatttctttttgtcgaatctcttctctattatagcaatatctagggtttttggtttgcaaattcctcgcaagtacctcgtaatattgcgagagatatatttgcaggttcaagtgaaaccaatagttggtgttaattctcatgaatatgaccacttagtttcacaaaagaatcctaaagacaaggatctgttacatgtttttgatcttgtgatcaaagggtacaaaatgagcaagaaggattggagtcaaggatggattgaagtggaacaagtacatgaaggtagaattgtttgtgtaatgaaacctgcagttgaaacacttgtgtatcgcagaagaaaaaaaaaatcagtgtcctttggtgagaaaataagacttgtttatgaaaactgtgaagttcttaggtacaaagttggaaggatggaggaatatttagggatcgaacgagttccttccagttctgctagagaagaagaaaaagaagaggaagaaaaaaaaattgcgagggatatattcctcacaaattttgcgacgatttagcgacgttctcatatctgctcccaaagtccttacattgtccttgctattttgcgagggatatatttgaaggttgaagtgaaacccatagttggtgttaattctcatgaatatgaccacttggtttcaaaaaagaatcttaaagacaagaatctgttacatgtttttgatcttgtcattaaagggtatataatgagcaacaaggattggagacatggatggattcaagtggaacaagtacatgaaggtagaattgattatgtaatgaaacctgcaattgaaacacttatgtatcgcagcagaaaaaggaaattaatgtcctttggtgagaaaataagacttgtctatgaaaaatgtgaagttcttaggtacaaagttggaaggatagaggaatatttagggatcgaacgagttccttccgattctactagagaagaagaaaaagaagaggaagaaaaaaaatttgcgagggatgtattcctcacaaatttacgacgatttagcaaggttctcctatctgctcccaaagtccttacattgtcctcgctattttgcgagggatatatttgcaggttgaagtgaaaccaattgttggtgtcaattctcgcgaatatgaccacttggtttcaaaaaagaattttaaagacaagaatttgttacatgtttttgatcttgtgattaaagggtatttaatgagcaagaaggattggagacatggatgaattgaagtggaacaagtacatgaaggtagaattgattatgtaatttaaacctgcaattgaaacacttgtgtatcgcagcagaaaaaggaaatcaatgtcctttggtgagaaaataagacttgtctatgaaaactatgaagttcttagatacaaaattggaatgatagaggactatttatggatcgaaagagttgatgccagttctactagagaagaagaaaaaaaaaaggaagaagaaaatgttgcgagggataaattcctcacaaattttgcgacgatttagcgacgttctcttatctgctcccaaagtcctcacattgtccctgctattttacaagggatatatttgcaggttgaagtgaaaccaatagttggtgttaattctcatgaatatgaccacttggtttcaaaaaagaatcttaaaggcaagaatctgttacatgtttttgatcttgtgattaaagggtatataatgagcaagaatgactagagacagggatggattgaagtggaacaagtacatgaaggtagaattgattatgtatgaaacctgtagttgaaacacttgtgtatcaccagcagaaaaaagaattcaatgtcctttggtgagaaaataggactggtctatgaaaattgtgaagttcttaggtacaaaattggaaggatggaagagtatttagggatcgaaagagtttctgctagttcttctagggaagaagaaaaataagaggaagaagaaaattttgtga

SEQ ID NO: 160161 - DNA, 499 bp, Arabidopsis thaliana landsberg
ggaaaacaaattgaaacttcctctctctcttctctctctaaaaaatctttcagagaagaggggaagctttgtcttttgtttcgccggttggatatcattccaacgcttatctgtcccgatttagtcgggtcttatgtctagcatctctggcttttttagtagtgttggctggctcttgcccggcagcgttgtttccatgagcgtcgttggccggatttggtttgtatccaacgttgttttgtttttctttcaataatctcatagatcttatgttggtgataatggtttaggtgatttttcgcttaaagatctttattatccaattcgatcttttgagtttgagatttgcaggaatcaatttagagatttgcatcttaagttgaagaaaagaagaagttttcgttgcatattaatattgcccttagctgctaagtttttatctggaagttcgattggtttgtttaaggtgaaacccagaagaatcaaacttgctttcatt

SEQ ID NO: 160162 - DNA, 479 bp, Arabidopsis thaliana landsberg
gtcgctccgacttcaaccggtgtcggcggagtctattggccagatgcttcctgggaattttggacactcgggctgacggtgccctaaaaattgagtcgcgttcgagcttcggtagtccgcgtagttcctgcagaaagtgaatcgactcgctctgcgtacgcgttgtgagccgatctgatttcagaatgattagccgccaatgctgcgagttggtcgttgcattgctcttggaaggtcacgaacttgttggagagagacgtcacagcaagctgttgtcggtcagtcttcttggacaacttttgaagcagctgcttgatgtcgtcgaggatggaggcttggtcgccagaactctgaccgtcgttcctactcatggtgagtttgatcgttgttctgaagtatgtcggaatccacaatcagaatttcgtgatttactggcgtcctcttctccactgaaactgcaattctcttagttcacaaat

SEQ ID NO: 160163 - DNA, 283 bp, Arabidopsis thaliana landsberg
gcaaaaggatttgatctatttctcttgtgtttatacttcagctagggcttatagaaatggagggtggtgcgagtaatgaagtagcagagagcagcaagaagatagggagagggaagataaagataaagaggatagagaacactacgaatcgtcaagtcactttctgcaaacgacgcaatggtttactcaagaaagcttatgagctctctgtcttgtgtgacgctgaggttgctcttgtcatcttctccactcgaggccgtctctacgagtacgccaacaacag

SEQ ID NO: 160164 - DNA, 366 bp, Arabidopsis thaliana landsberg
  unsure (1)..(366): unsure at all n locations
caaatctagtaacctattatttcttatgttaacatttctcatttatttttgcaggagtcgacgacgagacacaggaaaacaaagaatcgtttggtgatataataaaagacacaagatcgttgacgggagaattgaaacggatacatatgtcaaaagagaaagtttcccattttaatgtcttttctttatttataaatacgttactgtaataaacttcaaacatgttaatgagtgtgatcccttcatgcatgcaaatcagttatatgtttgtannnnnnnnnnnnnnnnnnnnnnnnnnnnccttcaatatcaaagtttggttgttcaattaaataaaagtatgagtttcttttcatttttcctgct

SEQ ID NO: 160165 - DNA, 400 bp, Arabidopsis thaliana landsberg
tttcaaaacaatatgtacgaaattgaatataaatattcaaattatgacctagtactcagtagaaagttttcttaaatctatttttgacccgttataatatttttttcatgtattaaacagtttatattcgtttttaaaaatccaaattagggcatatgcgaaaaattctaattacttttataacgatggtattattttttcgcaaaaatagaatcatataaagatgagaggtgaactataataattaataaaaaattaatatcataatttagatagcaaatctaatttgttgattttaattggttacttttttggaaattaataatgtatttcgttttttaattaaatttaattaattaaattagtatttgactttttaattcttaaagagatgaattaa

SEQ ID NO: 160166 - DNA, 259 bp, Arabidopsis thaliana landsberg
tcaatcagatcaaatctgggaaagacaattcaaatcttgcagaagttgacattatgtatttggataaacacaccacacgactcgagacttatggaatcaaaataatgcatgcaaactacagacggaattatatgtatagataagacgatagaaaaaacagtctccccccagcaaaagtttggttgactatatacccagcaggacttccagctcacagaatagtacagcatgaatttgttttcttcgcttgcttgtaaaa

SEQ ID NO: 160167 - DNA, 85 bp, Arabidopsis thaliana landsberg
gtaaaagcagaggagaagagaagagagacggcgcagagtagcattgacatgcgaaatgtgcctctcagaattcatatcgcctcta

SEQ ID NO: 160168 - DNA, 354 bp, Arabidopsis thaliana landsberg
gactaggttaacttgagggtcaatcacctgtaaacttagatttggttaatgaacttgttgtctagggataatttattgagtatgtcaatcacctgtaaactgaggaaacgaaactactcaattaccccatcctcggaaattctttatctgattgaattctttgtttactctactgttgtttactgcatcttgtcatctgttgcttaatttctgcaattctttcttgttactcgatctcatactcgaccacccagttgtctagcaacacactgtgcagtggagtatctgtgttatactttgtgtctgttactcgacctatcactcgacctcacacagtgctctacaaagagctgt

SEQ ID NO: 160169 - DNA, 344 bp, Arabidopsis thaliana landsberg
ctgaaaattatttggtcaaaatcacattagattattgatatatatgatgaagatatataaattgtacataaactaagtttgcaaggaaaaagttttataagaaaggcaaagcattggaatgatgataatggagatgaaactatgaaagcatgatgttgtttgtgaaaagagaaagagggactagaaataggttgatattccccaaaatccaaaactactaaagtacacacttacaagtgacaacaccaccaagcttttatttcttttctccacaaccactattgtattttacttcaccaatcaatttattaaaaaaagactcatatataaatgttcacatcatc

SEQ ID NO: 160170 - DNA, 110 bp, Arabidopsis thaliana landsberg
ggggggggggagggggggggggggggagagggagggggggggggagggggggggggggggggggagggggggggggggggggggggggggggggggggggtgaaggaggg

SEQ ID NO: 160171 - DNA, 552 bp, Arabidopsis thaliana landsberg
cagtttttgtgtctctctatttcgtcaataaaaaaaaacttatctcgatcccttcttggccatgaacatcgtacattgaaaagttgaatgtgttcagtaatctataatgatatgaatcaaacgagtacatggtatcataacatctaaaactcactctgattcagacaggtttaaacatggatttgataaggtcttgttacatgacataactaataatacatgtttctgctccaaacatcttgagctatggatttaaccaagttggttcacaaaagtttccctctagtaggtggggaagttggggttgacattggctgcccaagcttccagtcctccaattatatccttagccgaatcgaaacccgactcacgaagatattgaacagctctttgtgaatcattcccgcgtctgcatacaacgaagacactaggatttgtgcaagattcagtgttcgcatggccattttccttttctttaagagctgaagtaagctcgtttaaccgagtctctaagtttgcgagagggatgttgagtgaatccgggagagagac

SEQ ID NO: 160172 - DNA, 250 bp, Arabidopsis thaliana landsberg
ttgtacatataccttcgactttggcttctgttgcgttggtttcagtatttcgttctaaagtgttcctgctaccttctaccactacaagcaaaaatattacatacaccaaacgtgacattacaaaatcagaatattttcttccccacgaccgttgggatattaataaaaaaaataaaaaaaattgaacagtatatttatagattcttttttctttttctttttttcttttttttttcttttttttgatttt

SEQ ID NO: 160173 - DNA, 802 bp, Arabidopsis thaliana landsberg
atgaaacaaataagaaccgcattagtccttgaaagttgaaactgtgtggtccgcattttatataagaattcaaaattcaagaacttaatgcatccgagatccacaggaaaacaaaaaacctccgttgtagcgtcttagcatagtttcagatcaactcaaaaggaacaaaatttaataattaggtactaaggaacaaaagatgaactgagttccatacatacctagagataagtatatatatatcattaatcaacgaaacctataatattacatataattcgatctaaggcggtacggcctcggcaacagatggagcaccgacgttacaagggtctccgtcactttgtctcgaagaagcgacgtcaactctaacggtggtgacagttggcggccgtttccgtttctttttctcgtaaggaatcccacgagcctttgcctgactctctctgacttccctcaagtaaatccgaaccgcacgtgcggcgaacgggttagaatccggccgtccaccgttctcctcgtaggcagctctcaaccgtccgatcaaagcatcgagagatccccaagcttgcttgagagggcatgagcaaggaccaggtggatcgggttgtccgaagaagacacaagcttgggatgtactttggtcttaccaaactgatctaagtaccttaggaaacttagcacgtgcgtgtagtcgaattgagacatcatcaacggtggattttgtgattttaggtattggacgaacgtgttccagtcgcggcgtttctgcgattcatagcggctgagtggttgctgcggt

SEQ ID NO: 160174 - DNA, 311 bp, Arabidopsis thaliana landsberg
gactaaaaaatgagatttctgccttttcatagaagactggtgaaagcttttgtgaagcatgggagcgtttcaagggttctaccaaccaatgccctcatcatggcttcactaaagcctctctgctccgcactctttatagaggcgttttaccacgcataagaatgcttctaaataccgccagcaatgggaatttccagaacaaagatgttgaagaaggctgggaattggttccgaatctcgctcaattggtaactacaacgaggaaagcgataggactgtcagaagcacaactgactctgatgacaaacaca

SEQ ID NO: 160175 - DNA, 278 bp, Arabidopsis thaliana landsberg
atcgaacccacggccacgtggttaaaagccacgcgctctaccactgagctaagacggcttcgatgactaattgattgattagtcttttttatatacgcctgtctttttgtttggttcaaaatataaatccaaaaatatgtattttagataattcagtgattttgatccccaaaaaaaaagataagtcagtgatatgtatacttagatagttggattggatctaattagcacaatgccattttttggggttgtcaacatttcatattttattagagaga

SEQ ID NO: 160176 - DNA, 218 bp, Arabidopsis thaliana landsberg
ggcaatggcgtcgtcgctgcaaagctcggggatgttgacgaaagagcaaatggtttatctctttgatcgattcgattacttgacttcacaatctggtaattgtgtgttctttgttaaggtttttgaattcatttttattgattgattcattgcaaatgtttggtttctcagatgtgaagaaacgaatctccgacgctgtggatgacaaacaggtttag

SEQ ID NO: 160177 - DNA, 174 bp, Arabidopsis thaliana landsberg
cgccatctttcagtccccatttgcttgtctacgttttgtatatggttcttctattaaaacgaattgtaatacttttggtttcttaacttcttctagatctctacttttctagttccccattgcttcatcttcttgttgtctggttgtttacgtttttgtgtaaatcttttgttt

SEQ ID NO: 160178 - DNA, 340 bp, Arabidopsis thaliana landsberg
tgattaaaatgaatttatattgcttcctgaaaataacaacacaatacagtagcttgtcttactaagggagaagaaaggctaaggcccaattgttgttgaaaagcccaatgaggtcacttctggatcagctagcgggtttcaagacggctacccgacacgtgcgaaaacagacagtgatagtttccactttccactaactctaatcgcacgtgacaactcagaaagttccctgcctaaccacaagtggatcaagcgtcgtcgaccacatctgattcccgcccaatagccgtgacacaatctcgttatcggcgatggcatctacgtaattaaacggaaaatc

SEQ ID NO: 160179 - DNA, 256 bp, Arabidopsis thaliana landsberg
aagaaaaggaagagcaagagacagagagatggcccgtataaaggaataatatgaacatggtaagagagacctaagaggagagacatgacatagaagagtagagagaactcctttcgtctatctctctgctttgctttctgttgttgtctctccacccaaaaaatatcctttttatgttcctgagttcatgaaagtttgatgaaaagaagaagagagatatagagagaataagagagataataatctaagaagaata

SEQ ID NO: 160180 - DNA, 279 bp, Arabidopsis thaliana landsberg
gcaagaaccctggtactgcttcagctccaagtgcttctgcaccactgagccacatgctagcacttacaaaccatttccgagaagggttctgcttatggttcttggacatcctgttcttggttacatgccaatccatgtgcttactgtgctcttcttggcacttgaagcgtagaccacaggttgtgcattgcctcgggagatccccatataaagcactgattgcagactcattacgtatcttgagcatgtctgcatcaaactccaaccccaatggtccct

SEQ ID NO: 160181 - DNA, 149 bp, Arabidopsis thaliana landsberg
atccaaaagttaatggtgaaacaacggtttcaaacgctgttacagaagtagctgcgatcatgggagagaatgtaaaatttaggagaggtttaatgatgtcaaaatctacagcaggcgtcctttctgcatatcttcacgcaagtcctcaa

SEQ ID NO: 160182 - DNA, 476 bp, Arabidopsis thaliana landsberg
aagaagcatgctctaaagaacgaggagtatgactcaatgctcggaatagtgagagaacttccaccagagcttaacctccctaacaacatactgcctgataaagaaaccaagcgtccttctaatgtgaactgatttttcaggggtatgttttctggccgaagccctacagggtgagatactcaaggggattatgtttcggtctctggtttgaatatggcaggtagagtacattagggtagacggatttacagcttttgaagaagctatgttcaacattttttcatggtttcttagggagtattattgtctaatcaaactttgtatgttatcacttcggtcttttgaacgtaagaatcaagttcatgaaacatgagtgaatattagtctgatgcatgtgcgtatgcaaaaatccatgtgcgcctatgttgctaggcaagcatgaagaataaagatccaaactggatatatcatatatt

SEQ ID NO: 160183 - DNA, 409 bp, Arabidopsis thaliana landsberg
aaggactggatgagatgggtggggaacgataggcacttgatatgcatagagaatccgtttgagacgagccatgatctgggtcgggtggtcgtcaagtttagtatcagagagtgttgagggaagagttcgaacaaggtgcaaggattatgcatcaagatcctaacccatgtgccaagtttttggaaccatattttcctgaagataataatggacaaggccaccactgaacttttacaacatttgaatcgcggattggtgtggcttgtatatatttatgggtagaagattcatgctctgttctttttgcttttctggtttgatatggaatcttgcttgtgacccaacaaaaaaaaagggtcttgaagatttttgaattatggtgtgtggatggattaaacgtgtcgtgtta

SEQ ID NO: 160184 - DNA, 365 bp, Arabidopsis thaliana landsberg
gtattgggatatacaattatacttgttgtttacaattgtatttacttaagatcgtgtctagaaattttgtaagtatatacaccttgtaagtcacatcacgattcccatttcatatatagcattaatgaaactcattagattataattacgaattagcatgttttcttgtaaattgtaatgcattgatatgtgaatcttacttttctaaaccaaagatatatcagccatgtttgtttgtggtaaaaccaacatattttggtgataacatcttgtttcgatcgtaaattcatgtttatttcattgctgctgattcttcgaccaaatttcaaaaatttatgtgatcattaatcaccaaaactcattgc

SEQ ID NO: 160185 - DNA, 372 bp, Arabidopsis thaliana landsberg
  unsure (1)..(372): unsure at all n locations
aggagatgtacgaggagaaaatcaaacgattgaaccttatacatgttgtattccgtacaatgtggctcgcagctgaagattacccattgcttttaggttctgcagatcttggtgtctgcttacacacttcctcgtcgggtttagacctnnnnnnnnnnnnnnnnnnnnnnnnnnnnnagctcatatgtgtaataaggttgagaagactaaaacttgatttccattgtgtcaacttgctaccgatgtttggcgtttaaggttgtgatatgtttggatgtggcctaccagtttgcttcgtttcctactcatggtaatttaatcatngcctttcaatactttcacgaacaaagactataacgtataaacctttac

SEQ ID NO: 160186 - DNA, 131 bp, Arabidopsis thaliana landsberg
gcttattctattttgcaattggacttctttaaaatgacattcatttcagattgtaaagagttggtattggattggatctaacaaaggacactaattggaccttcacggccttcctaagaagtaagaacggt

SEQ ID NO: 160187 - DNA, 386 bp, Arabidopsis thaliana landsberg
gaggtaatttacaagagattttaatatctattatggtccaaaacaaagagttatttacagaaacagttacacactttttattgttcatccaatatacattttcttgcttcaccatttgcttgattcttgtgagttattataaaaaggaagcgagtttgatcctgaaaacagttcaaaagaactaagagatcaaatgcgaaaaaggcatacgattcgtatgggcccatagtgttaagtcactgatgatttcgggccttttatcttaacatccatgtagatatacatactgactgggctagtctgtagtttatctccaactccagcaactatcacaccatcccatttgatgcgtaatatatcgttgacctcgagcatatacacgcgga

SEQ ID NO: 160188 - DNA, 132 bp, Arabidopsis thaliana landsberg
aaaaaaaggatcttggtggtaccggtccgggataggtctctgtaaatatgttcatatacggtcctttaaaagtcatgtaatgttaaaaacatgttttgagtagaaactagttcaataaaagtcttctatgag

SEQ ID NO: 160189 - DNA, 634 bp, Arabidopsis thaliana landsberg
tttcagggaatccagattccgatcagagcatctctggtgagaactgatgattgcttttatcatctgaaatttcgattttagatcttagtgtttaggtcgttcattgtctaacaagtgattcgcaagctgttgtttggtcttttagaggaggaggaagagatcatcaatgttagtttgggagaaaatgatatgtggccaagcgagaatgcaaaggaagaagaggtcatgtttaatctcaactgagcttgcataaagctctctgggaactcctgagaatttgtctttgagaaagaacatgggaacttttgattttgcccaattcctgattgttgttggcttgactagttttgaggagctatagggtgaatttgattgtggtttgaccatagttggcttgaatattgtagggaggattaatacttcaaacaaagctcgaaaaactcataggtatatattttgcgatcaagccttttctatgactatcttaacttcagtcaggtttcccgtaccttcttgcagttcatagattaactgattaaggaaagtgttttcataaggagcttatgtgttgttttcaggttgtggtgcgctaaattatgctagggatcccggtgatgtaacggtggaagcaact

SEQ ID NO: 160190 - DNA, 539 bp, Arabidopsis thaliana landsberg
  unsure (1)..(539): unsure at all n locations
gtggctagatatgaagaaagatttgagactttttttttccttcgcagacgaacacaatagagtttcacagaaaaaaaaaaaaggattcaaacataaaattctacaaacgacaanaaataaacctaagcttaacatgatgaacaagacaatgtccgaaatcacgatgataatttgaaattcattagtccattaaaagcttttctaacctttcttcactctcgcaaattcttcgccggaaaagcttctccgccggtatatatataatgattatcaatatatacacatcagaaaggacctcttccaccggaattccccggccaaccttccaccggaagttgcacatttggttgcatattcatcggtaaattaaagaacggaagtcctcctcctcctccagctgccacctccggaaacaaattacctccgccgttagatcctcctccaagctgttgctgctgctcatcttcttctaaaggaagtctctcataagcaacattagtaaacgaagctgcaatcacaatcaccggtccagccgccgt

SEQ ID NO: 160191 - DNA, 152 bp, Arabidopsis thaliana landsberg
gtacgtttgctgttgcgtctgcggtggaggcggttgagattgtggtggaggtggtggtggttgattaatatcgcgttcggaggtttgacccggacccgtatcgggtttgggttgggtttcttcttccggaggagaaggcatcgttgtgtctc

SEQ ID NO: 160192 - DNA, 105 bp, Arabidopsis thaliana landsberg
cttcttctgcaatgcctcttgcctcgcgttatgaagaaccttgtaaacttcctctgctgccttttgcctaccactctcagttgtgttccgcgcctatcattaaat

SEQ ID NO: 160193 - DNA, 212 bp, Arabidopsis thaliana landsberg
ttcctttttaaatgacttctcagactgataagagaaaaaggagaaaactttgaaataagatctttgggtgatgcaaaagtgctaaacaacactgtcaaaatccgctgtttctttgttatttttttggtcccattgattttgagcctggctcgtgttgccagtcaaaacattaaaaaaaaatcttatattgatatacagtgatgctaccgctc

SEQ ID NO: 160194 - DNA, 553 bp, Arabidopsis thaliana landsberg
caaacaagatatcattggctaagtttcatacagattatgaaacatatcaagtacattatatatataccacgttgcttcattttcttctacttcctactaaagaaactttttaatttccctttctcaatcctttcaagaagcttcttcgaaccaggaacctccaactccgacaacttcttcaaataaccaacagctccatgtgagaccatcagcttcttacactttctgctcgaacacaaagccgccaaacccgaaaccgcatacttctttgccgagttacccggactcggctcaagcaacatcacaagactcgtcacacttttctcatctctcttcacttctctgcaattccttggaaccgtaaccagactcgctatagcttgagcagcaacctctctagctccactcgctttcgcctccaacattcttatcaacaacgggatacaacctgattcaccgatcattctctttgtctcatttgaggtagcaatcctgcaaatagttgacgcagccgcttgctgagctccgattgaacctgatttaagaacatgga

SEQ ID NO: 160195 - DNA, 417 bp, Arabidopsis thaliana landsberg
  unsure (1)..(417): unsure at all n locations
tccaggtgctcctgggagctatggtagtcagtctgggtatgcccaaccagcagcttcagggtatggacaacctccagcgtatgggtatggtcaagcgccacagggatatgggtcttatggaggatacnnnnnnnnnnnnnnnnnnnnnnnnnnnnnnnnnnncgggtctgctggagccactgctggtggtggtggtggtacaccagcttcacagagtgctgctccacctgctggaccgcccaaagcatccccgaaaagttgatatgtgtattgataaatttctactgttatacaaaacatgcttccatgctcttatctttttcttgaggatttatcaatgtttcccctcccccttttagctcttgtctgtcaacaaactatattttaaagataatgttcgttcttagcccgttattc

SEQ ID NO: 160196 - DNA, 596 bp, Arabidopsis thaliana landsberg; identical to SEQ ID NO: 19298

SEQ ID NO: 160197 - DNA, 217 bp, Arabidopsis thaliana landsberg
  unsure (1)..(217): unsure at all n locations
gatctgagcactgtcaatgtcatcaccaccgaagtagagttgactccactcaacagaaactgaaactggaaagtttgagacttttaaggtaagctcatcttgtattcattgtctatgttttgcattctttcaaaggttaagttcttagggttttgcanacttgaattctcngaaagacgaataacttgtaactcgatactatagactttttctggga

SEQ ID NO: 160198 - DNA, 103 bp, Arabidopsis thaliana landsberg
tgctcagctactactgtaagtgttggaggcattagcttcagaggtggtccactgcggttatgggcaagtgggtttgctgccgggtggtcaaagtcgaactctt

SEQ ID NO: 160199 - DNA, 122 bp, Arabidopsis thaliana landsberg
atcggatcaacaaggacggtgaacttgtgatatcttcaacgaaaaccagaacgcagaagtaagtaacctaagaaacttctctttcatataccattttcaagaacttctccgttaatgacaga

SEQ ID NO: 160200 - DNA, 74 bp, Arabidopsis thaliana landsberg
tttttttttttttttttttttttttttttgtctctttctttctttttttcttttcctttttttttttttttttt

SEQ ID NO: 160201 - DNA, 369 bp, Arabidopsis thaliana landsberg
  unsure (1)..(369): unsure at all n locations
gtttgttctcacttctcacttctcacttctcagatttttataaacatgaatgaaacctgaatcgttccactaactctcagcaaaaatgcgatcactttacttaatcgtcttcatcgttnnnnnnnnnnnnnnnnnnnttagattcttctcaagttcttttgagtatactgtgaaactaatcagaactttcttatttgttatcaaaggtcttgttaaagcttcgaaaagcgatgatgggttttgttcagcgccttcgattgttgaatcggatgagaagacgaaacccatttattggaaagccacgaatccaacactctcttctttacacctccaaggcaagtgttttcttacagcttcgtgttattaaaa

SEQ ID NO: 160202 - DNA, 258 bp, Arabidopsis thaliana landsberg
agtataagtccaagcattataatctctcaaaagctcatcgaagcacgaatccttcgatcagataggtaattctccacccatgtttaaatttaaaaactcaagctcaccgtcgtccattactcaaaacccagtaacaaagaagtacccttttcctcctttgattgaatcttaaccaaaaagtttaaaacttgttgttctaaaaccattctactacctaattacagagtaaaatcacaatccaagcgattcagaacccat

SEQ ID NO: 160203 - DNA, 665 bp, Arabidopsis thaliana landsberg
  unsure (1)..(665): unsure at all n locations
gcaggtctatgagtctgatttgacaaaactcttcacttggacgtgcgaaagatgcaatggtttgacaaaggtaaaaaacacatgttgaagcagatcactgtttgaactttgaagccgcaattattgagttgagctctaacgtttgttaggatggtgcaggatttcgaagtaatagaggtcatatttgacgttgaacactgcttacaggtctgctctgatatcataagctacagctggtcatgaactcatgatgtttcttcattgaacaattattaatatcagtacatgtaacttgtaacgacaggcgtatgttggggtggctaaggatttgaatgctatcattattgcatttcggggaactcaagaacacaggtattaaccctcctcatgtaatctaaannnnnnnnnnnnnnnnnnnnnnnnnnnnnnnnnnntcatccaaaaacttgtgcagcatacaaaattgggtctcagacttgttctggaaacagctcgatctaaattaccctgatatgccagatgcaatggtatgctttaacgacaagtatttgtcattgagttggtcaagtactacggtagaatttaatagttatctaaattggcaggtgcaccatggcttttatagtgcttatcacaatacaactgtacggcctgcagttttggat

SEQ ID NO: 160204 - DNA, 402 bp, Arabidopsis thaliana landsberg
aggttgaagtggttcatcaaatataccaaatataatagtaataacaagcctaaacaaaaggagtagtttcataaattaaaacgaaaagtaggcattatttactaaacaataaagatcattcagacagttgggattctgttttttttttttaataagaccaaacagctttgctttttcagttttgtgtatgaaaaaaaggagaaaataaaactaggtaccaaatcctttatataggttgaagttcttgctcagctactatagcttcatcaacaggcttgtatggaattgatgtttgtttccgtttccatatcaaccaagctccataagctgataacccgacgattacagcgatgattccaatcgcgatcacgacaatgttgttattcgtcctaaaaaacgaat

SEQ ID NO: 160205 - DNA, 149 bp, Arabidopsis thaliana landsberg
  unsure (1)..(149): unsure at all n locations
agacacagacagcgaagaatcagaggtcagtggttctgatggagaggacacctcgtggatatcttggttctgcaaccttcgtgggaacgagttcttctgtgaagttgatgatgaattaccatccagggatgagctttnnaacttgtgtg

SEQ ID NO: 160206 - DNA, 1600 bp, Arabidopsis thaliana landsberg
gttggtttctaacggtttgatggttgtgtgagtgaatgaaacaaagtatttggttagcgataattaattaacccgggtggttaaaacattcagggtttagagatcagatgatgcgagcattatcaccggttcatagtacaccgtcgagaggattgttcttagactcgtgtcacgctcattgccaaggaggaagcgccgcctcttggtccggtgacaaaggcccccaagtcgccaatacggtaaattcaatcttccaatacttttgaaaccttttcaattcgattttagttctgattttgattatttggttttgcagagaattgcgaaagcagtcggaaactggttttatggccggagtgcatttcagaagatagattgtccgtcgccgacttgtaatcctacttgtcctgctatctctactgaagactagaatcatgttcaatttttttaatttgaaattgaaagagctcgcaaacattttggatttgttttccaaatcggatcaataataatcactgcaatttgaataaagagtatatctttactttgatttaagattaatctttgtattataatcgagtttatctgaaaagtgaaaactttatacgaatccaaagagagaaagagagagagactgtgtactagtcggtgctctgcttctctcatttttagtgaagtgaagaaccctaaaagtcattgctttatcaaagttttcaaaacgcatcgatggattcggcgtttgtggacagagcttgggaaaaatgggttactgcgggtaacgttggctcttcaggtaggttcactctcgattagggtttttgttttcttcttcttcttatttgggagattttgaaaagaagaagaagaacccagaaagagagtaaaagaatcttcctttttggtgatttgattgttggaatttgtgtaggtaatccattgaaggctgctattttgattaactatgatcctacaggaccttctcgtctcttatcaacaatgtaagctaattcatcaagtttcaatatctactgctctctgtttctacttaaaggttgttcttttagattggttatttgcagtaaaagatcgaaactttgatgtatgcttaattttgagttattggcagagctaaacaagaagggattgatatctatccagttgatctaaagcaatttatagatttcatgagccgtgcctatcttccaactgagactttcgttcttggctccaaccaatgtaacagctcgttcgtcgcgtgtaatcttattcgcttggagagtatgatttgtggtttaataatatgatttggaatctgcagacataataacatctattcatgagaactggttcgctgctaggtgtttaaacacttcccagcctgctggtgaaggagctattgttatgcagactgcggtttacgtgttggttgctctgtgagtgcactgaatactttgctcaagtgcatatcttactcttacattttcagttcaaaaataagatggttatgatttgcagatatgatggatcaattggttcagcttcccaagctatggctgcagctgatcagtttgcatcgcagctgagtcggaaaaacttctag

SEQ ID NO: 160207 - DNA, 1610 bp, Arabidopsis thaliana landsberg
  unsure (1)..(1610): unsure at all n locations
gtttatgctgtccaataagcttatcggatacctcaaacatgcaattactatttgtaaaaaaaatcatatacatggttaaaaattgtcttgcaaatccgttccaaccgttacaactttacaaatccaacggacaaggttaatatgcgtaaaataatatgatatcacatcaataaatttgtcgtatctgacttcagttttgaataaaggttatttctagagaacctaaaccgctaattatttttgtgataattataataggagattaattaattattcaaagacatattgctttttgttttaaactagaaatatgattctttccattatatgtggcacacaaaatctctcaagaaaataaataggtaatcaaggtgttggttagtctaaagttggtatagggaaaaaaaagttatattatctccttggtctaaagttcatatcgtctttatcattcttttgctttttataacacaattaatatttattgaaatattaacaaaagttacgaacaatgccaaacatacaactgactgcaacaatgatttgtttgggaaaaaaactgccaccaacagaattttgatttttgaagaccaaatagataaaaggacaagagttaagaaattttcgatattttgtaattttctatgttggtaattgattttttgaatattctttggtaaattttggatttctattattatctgaagttctgaactgtagttaccagagtaactgctggttgaaattgaatacaagtgtttctttcaacgagcttttacatttcttgataatctttttcagcactaaaagaaagtagtttcttcataaacaaaaaaatgaaaaagatacgtacttattatagtcctcataaaagagaatatagtcaaacttataatttagtagtttagtctatactagtcaaaaggaaaaacacttgaacaagaaaagaaaaaaaaaacgaagcaaataataaaaagattcgaccgtttagaccaaaacacaagccaagcacacactcttgaacacgccattctctatatatacacgcatactagctcactcataaatataaacaaaaaattaatacaacaagatcctgctatgtcgtccacggnnnnnnnnnnnnnnnnnnnnnnnnnccgaaagtcgagtaggctgcagcggcgggctccacctgctcttaagataaacccttgcgacgaacttggaaagtggctattcctcttctatcacctacggaatcgccgccacagaaaccaccggcggtaatgaagagggaggagcaacggtggggtaaagaggcggagaagccgcgtatttttaagaagtggcagcatccggcagctccgttttactaccagccagcaccgtcatcgaatcagccgtttgcatggccaaattaacggtctcttaatattaggtctatcacacaaatacataaatatttgaatctttttaattgtatgccgatcatattgacaaatagcatattttatttttatttaacattaccatctttatgcagtatgtatgttgggtttgatgttgttatgtccttgtaaccatgaattaataactaatatatatagtgtattgtttcgtatactgtg

SEQ ID NO: 160208 - DNA, 968 bp, Arabidopsis thaliana landsberg
ttttcagatttggtgatttttttcttgtgttttttgttttgagatgccaggtcgttatgctgggtctggatgcggctggcaaaacaacgatactgtacaagctccacataggagaagttctgtctactgttcccacaatcggtaggtcagattgcttaagcatatttattttttttgcgttttctcatttatcttacaacgggtttactgaggattttaaatttcttacacaggtttcaatgttgagaaagttcagtacaagaatgtcatcttcacagtttgggatgttggtggccaagagaagctgaggcccttgtggaggcattacttcaataataccgatggacttgtaagtctctacttatttttcacgctgcctctagttagatagttaactcatagagtctcttctcttcatgacagatgatttctcatgttttgtaaggaattttcctgattgatattggtcgatgcatttgcagatatacgtggtagactccttggaccgagagaggattggtaaagcgaagcaagaatttcaggtaccttagaaaatttgcacaaaactttgggtcaaattagtttctgcagtgtttctataacctctgcttattgatttcttcaggatatcataagggacccattcatgctcaacagtgtcattctagtgtttgcaaacaaacaagacatggtaaaagttcataggctctagctttccttatttcatattttttcgttctcatttaccaaaattcgtctgaactctttatgaatttcagagaggagccatgtctcctcgagaagtatgtgaagggcttggcttacttgatctcaagaacaggaaatggcatatacaaggcacatgtgctcttcaaggagatgggctctatgaaggcttagactggttatgcgctacacgcgaagaggttaaagccgctggttactggtcagttggtccctcgttttag

SEQ ID NO: 160209 - DNA, 2702 bp, Arabidopsis thaliana landsberg
gatgattatgggttgatcacccactatatgatatttagatacctaatggttataaaagatgcatcgattcaatggacgcattgactcgattgttgcatcgacaagaaggtcatatttatccttgttataaacccgcaacatagagtttgcgagattactttcttgattaaagtacaagagtatttcagtgtttatttataataaccattattggatatccgttgggataagtgtttaacattttgaaattcatgttcatacataaaatggtttagtaacatcgatacgcatcaagccaatgaataattaataattttccccattattattggttttgggtcagaaaccaaatagttttcatctaaaagctttgaatgtgaaaagtgctccaccacagcacgcagagatgaaccctcagaggaggataagaatacatgttggatatgaatgataactaagccatcctagagggatttatataccgctcgttttgaagaagtatcatattatatagtcagctattccaacataagggggagaatgtacacagctgggtgaaaaagataaaaagaaatgaattatcaatgatcttcggagtaaagaatgtatattaagagtccaaaagataattcaattacagaatttagcgttgtaattgtcagacgcatttgctgacccaaataaagtgatgaagtcacctataccaattgtaaattaaatcctccagaatataatgaatgccctgtaaggaccaatttcaaactgctattgagtcttaagatcgcatgaagcgtaatagaccttggttcgaaatataaatatcctcataaaagtgaaggagcacaaaattaaaaatgaccaaattgaggaaataaatattttgatgatctcttgaagagagtgaatgatctctaaaagagacataaacatgacaaatgaaatattcaagtacttgacaatgaagatatctagctagctatgtcttgtcaaaatataatggaatcaaaagcaaatcgacgtcgtaatatatttgcatgctatgagcagttgatattatggacaaaaaggaggatcatgaaagaaggtctattgaaaagtgtacacaaagtaatgattagccaaaaatggaaaagaagaaatagacatataattataatctctagtagagatatttggcacatgatgtgtaaaaccagtggaagataaatgagtctttatgggaaagaatagtgaaattaatgagattttcacaaagataagaaatgtattatgaagagatatattctcttgtggtggatgtaatattttttaagtatctaaaatctggcaataagagacggaacactggatatgacatttatatgaaattcttgaaagatataatctctgaatgattaattatatgagaattatgttctctaaaactctactcgatcgaataaaaagaaatatgtaacatgacatataatcataaaaatgtatatttatgttgagtttgtcaaaatatattgatcaaactaatatttgttttgaaaatcattaaaactcctacagagttatcataagtaatacgatgacaataatgtatgataaaatatcactagataatgatatttataagtctatatgaaaaccatataattttgatcattaagattatggttattaattccaacgagatattgtatttgattgaaaattatctcctgaagaagatgtttccgagggggagattgaatgatatgcgtggatgtaccctttttccttatcatagtttttatcccacatgattttttctatgacaaggtttttaacgagacattaaagaacacgcaaataatacacttgatgaatattaggaaattctatcaatcatccaaatgaatattatacactaatgatatttagagaaataaataagatggtcaagatgaatcatctaaaagattcatgagcagcagaagaatggcgttgtactttatccagaaatttgttcaagagaaaatttggcagacttattctcaaatactgtttattctctgccacatcttctaatcatgcagagattttaccaattcatgaagctagccgcgagtgtgtatggctaagatccatagttcaccatatacaagaagactgtggtatgtatgcagggaaaaagactccaacaattatgtacgaagacaatgcagcatgcatcgcacaactcaaagacagatacatcaaaggcgatagaacaaagcacatcctaccaaaattcttctacatacacgatctacaaaagagcggcgatgtacgagttctacagatccgttcgaatgataatctggctgacttattcaccaaggcgctacctactgctactttcaagaagttagtctatcgtatcggattacgtcgtctcaaagatctcgacgaatatactcataagggggagtaattgtatgttgcactctttttcccttaaccatggtttttcccattgggttttcctggtaaggtttttaatgaggcagcatttcaaatactttacgagttatgatactataatggtcatcaagggggagtgttatgaataaagatggatgcccattataagacccatcatctaagcccatcatctaaatgtttgtagggttttaccttttccttatactcctatataaataacccttttctcaatggaaaacacactcatttct

SEQ ID NO: 160210 - DNA, 1303 bp, Arabidopsis thaliana landsberg
atggcactgtaccgaccccttctcttgcatcatccaacttctccgtctgtaactacgtttctacgaaattacccctcgaaaccgatcaaattctccagcctgcccttccttcatcgctgccgtaagtctcgggtctcctcctcctccgctcggtgttgttcttccatggaatctcctcctgaaggatacagaagaaatgtcggcgtctgcctcatgaattcttccaaaaaggtgatgattgatgatggataattggaaacagcttcttctattttccgatgattagctccttctcacaattaagtgcagattttcactgcctcgaggttggatattcccagtgcttggcaaatgcctcaggtaatctctagattccaatttcttaagattcgaattggtttctccattttcctcatacaaagctgaaatcaatggtactcacttgttcgcatcatactgcttgacttgaataatctcaaactcccaaaacaaaatttgattatgacttccaaaacaatggatgatacgaattcaccaattttcatctttggaattgtgttttatctttcatgttaccaggtttctctactttcgacaattcatcctctaattggattcaaaatgctatgtaatcacttgaataaaatcgtgtgttgttgttgatgttgatatagggtggaatcgacgaaggtgaagatccaagagttgcagtcatgagagagcttaaagaagagactggagttcactctgctgagattctcgctgaggtgtctttagcttcttcttcttcttcgtcttcttaaacattcaacaatttaagaattcgtctaaagaactcttttttgttgttgttgttactgtaggcacctcactggataacctatgacttccctcctgatgttagggagaagcttaaggtccgatggggatccgattggaagggtcaagcacagaaatggtgagtctttctgagattatcaagaatcatgtcatttcattacgggcttgttcaaataatgtgtttcctcaggtttcttctgaaatttactgggaaagatgaagaaatcaatcttcttggcgatggtactgagaaacctgagtttggtgaatggtcctggacttctcctgatcaagtcgttgaaaatgtacgtacagttttcttctctctgtttgaccttcagcatttagattccacgactactctttcactcatattcattctatttctgttatacaggcagtggagttcaagaagccagtgtacaaggaagtcatgtcagctttcgcttctcatctccagtag

SEQ ID NO: 160211 - DNA, 643 bp, Arabidopsis thaliana landsberg
gtagaatttatctaacaacaaattcttactattttatatatttcgagaatcattatttaacgcaaagatagtagttatgataaacgaatgagaaaattgaatgtgcagaaattgaagactcgagttatttacaaaaatgtaaatcctgagtggaatgaagacttgactctctcagtttcagaccccaatcttaccgtcctcttggtaaggaactaccaattctacgatcatatttttcattttttattttcaaatcgccataatgttacaaaatgttacgtaaaaaaaaaacatgattacggtgtcaatttgcctagacggtgtatgattatgacacgttcaccaaagacgacaagatgggagatgcagaattcgggattaagccgttcgttaatgcgttgaagatgcacttacatgatctcccatctgggaccatcgtaaccacggtccagcctagccgcgacaactgcctagccgaggagtctcgggttatatggtctgatggtaagctcgttcaagatatagttcttaggctgagacatgtcgaatgtggtgaggttgaggctcaacttcaatggattgatcttcccggaaagggtctatgatttgttttctgtgtattggttatgggactttaaacctg

SEQ ID NO: 160212 - DNA, 3426 bp, Arabidopsis thaliana landsberg
  unsure (1)..(3426): unsure at all n locations
gtgggagcattgggtggagtgaacccccggaatacattcaacttcaagaaagaagtacaaaaaatatgagattcctcgaatttactggcggagaaagtagtataaaaggtaagaaacgaacacaaaatttgtagaaatgtggaagaaagaatgctataattctgattccaaggaatggtggtaaaagtgaatgattagaactctaatcataagaactgaaatggaactaaatgaagggcagttaggggagactcgtacatctaatggttctagatatagtatgtcttccacaagacagcgttccttctctgaatccgagactgactttatttcaagtaaagcacgatgatcagacatcaacagcaagcaggtaagctgcaagaacagaaataaaaacactactcagtatgcaattaccattagcatagcatgagctcaaggaaaccaaggccacctaaggaaagaagagagaatttttagcaaacacctctgacaatgcaacaacatctgctgagtaaacatccccaaaaatacctgtttgagaactaattgaagccaattcaataaccataaacaaaaattaacacactgaaacagaagaaaggccagtattgaaagattcttcctctcaccatggccgaagaaatcatatcgtttcaaaggtaactcttgacagttttcatctttagctgatctcagaacctgagcctgcaaacacaagtcaaaaatagttacaaatcaacacggcgcagtagccttagtctatctataagactatataacacagaagtaacctgagaagacaaacctgtccttgcaagagaaaataaactccatccacattttgattttcacgaaccacataatcacctctgtctgtgaagcacattgccaaagaagatcacattgtgtaaaaacataaatatctgtctctaaaatcactgctcaagtgcttatactcaagaacacgcactgacactgaatacagatcaacaaaacataacgaaattcccaatcaaactgacttcaagataagaacaaaagcaaaatcccagaatcactgaccataacgtttgaagagaacaacttcagctattctcttcaaagaagaactaggtaatcgctgcaacaaggtcacattcccaaggaactccacaactacaaaaccaaagtaaccaatcatatgaaaaatcatccgaatcttggaaaaactctcagttcaacatctctttcatttctccggcgatagaacaaagaaaaaagatatcggaattacctgattcagtgttcatgacggtgtagagactgtcgaaacgttggccggcaaattcaatcattcaactaaaaatctgctgaccaaacaaataaaaaatgcaacgaggtaattatccagtacccttgggtatacgatagagtctgtggacaccgctcagatgcagtgctgacaaatttaatgggcctatagctaaaagcccaaatttgttggtcctaaatcctaatacgctgtcctatagaaaacaaaagtttcttctacactcagcacagatccgacccgacccgacccgacccgacagcttccgaagacgaaatttctacattgcacgtctttctccgctagtctcgaggatgctaatggaatctttcgagcatctatggtgactggtgagtagattcttcttgcccacaagtttctttcattgtttcgtctttacgaactatggttgacttgaacatttcgtagataacaaattcaacttgtcttctctctctgtaattcgtgtcttcttcagcgccaaaagaaatcacttgattgttaaaaattcttctttttttattttagagtagttggtggtggtttcggacacaaatcttggaacacaagcttgatccgaccagcttatgattattctgtctttattcttagagcctcttgatccacactgactaatctcgtgtcagtgggttcttgtggagtactccgatcccatctccagaaaattcaacagaggatgcttgcttgcttcataggttctcatgtcgatactgtgttgtgttcctgtacttgaatgtgtgtactgcttgggttgtacccattggttgtggaagaaatgtttatactcagcaggtcacgagagtgagaattggggattagctacatctgatgagtttgagcctatccctaggatctgccgcttgatcttagccgtctatgaggagaatcttcatgaccctatgtgggcacctcctgatggttatgggattgatccaaatcatgttattctgaagaaagactatgaccagactgagggtcgtgtgacgccttacatgatctacttggatcatgagaatggtgatgtggtcttggctattagagggctgaatttagctaaggagtgtgattatgctgttcttcttgataacaaacttgggcagactaagtttgatggaggttatgtacataacgggttgttaaaggcggccatgtgggtttttgaagaggagcatgtggttctaagggaattactcgaggcaaacccgagctattccttgacgtttgttggacattcgttaggagcaggggttgtttctttgcttgtcttattcgtgattcagaaccgggttaggttggggaacattgagagaaagaggattagatgctttgctattgctcctccaagatgtatgtctctccatctagcagtgacatatgcagatgtcatcaactctgttgttctacaggtatgatgattgtatatatcagcctctattgactcgtttaggtgactcttctgatccattttacgtgctgctctggataaaccaggatgatttcttacctcggactaccacagctctggagaatgtcttcaagtcaattatctggtaatgaaacagtatgaaattcaaaagcagttattatgttataagcctaagtttagacgatgaaaaatatctcatgctcttgtataaatcttaaaccttcagcttgccatgcttgttgtgtctcacatgtttgaaagatacattcacattcgaggagaggaagctcaaagatgcaaggcgtctatatgctcctggtaggttataccatatcgtcgtgcgcaagcccttgaggtatttatactttatgtttactcatgtgcttcaaannnnnnnnnnnnnnnnnnnnnnnnnnnnnntcaaagtgaaaaccatgcccttggtatacagattaggaagatatccgcctgttgtgagaacagctgtcccagttgatgggagatttgagcagattgttctctcctgtaatgcnnnnnnnnnnnnnnnnnnnnnnnnnnnnnnnnnggaatcacagagagctctcgataaaagtaccttaaaatgtgttttgctttttgtgactgcttcagcttttggagatggtgagttctgacaaacagactttct

SEQ ID NO: 160213 - DNA, 612 bp, Arabidopsis thaliana landsberg
gttgaatacaaatctcctccaccaccgtacgtctacagctccccaccaccaccaacctactccccatctcctaaggttgagtacaagtctcctccacccccgtacgtctacagctctccaccaccaccatactagtcaccgtccccaaaggtagagtagaagtctcctccacccccgtacgtctacagctcaccaccaccaccatactactcaccttcccctaaggtagagtacaaatctcccccaccaccgtacgtctacagctcaccaccaccaccatactactcaccttcccctaaagtagactacaaatctcctccaccaccgtacgtgtatagctcaccaccaccaccatactactcaccttccccgaaggtagactacaaatctcccccaccaccgtatgtctacagctcacccccaccaccatactactcacctgcccctaaggtagattacaaatctccaccaccaccatacgtctatagttcaccaccaccaccatactactcaccttcccctaaggttgactacaaatctcctccaccaccatatgtctacagttctccaccaccaccatcatactcaccttctccaaaaactgagtactaa

SEQ ID NO: 160214 - DNA, 1829 bp, Arabidopsis thaliana landsberg
aatggaggataccaacagcaaaatccaccaccaggattcactcaacaaccacaacaagacccaactgctcaagatcctgaaattaagcaacttattcaatagatcatttaaggacaagctactggagctatggcttttgacaagaagatagctgaattacacaacaatattgattgttcttacaacgatctaaatatcaagtttgaagctctaaattacaaagtcaagtatgtggagagtcaatttgcatcaacctctgcgccgaagcatccgttgcaatttccagggaaatcagttcagaatcgtaaggactatgctactgctaatgttatcaccatccgccaagaagatgagtctccaccaagtcattagactcacaatactgaggacattatgattcaagaagggggggattcaactcaaattgctgaacctgccacccaacaattcatcaggactatagagcacacacctttgctgaatactcaccactttgaaaaaaattcaaaagagaaaaactcaacaaggatcagaatcaagaaatgattagtagagtcatgactcaataaacttacaagaagaaagtcatctaagaaaatcttgatgatctcggttcattcattttgtcatgctctctaagagcattgacattcaataggtgcctttgtgatttaggagcatttgttagccttatgcccctctctacagctaaaaggctaggggtaatggaatacaagttctgcaacctagctctgctcttagctgatggttctgttgcacatcctcatggtctaatagaaaatctgcatatcaagattggaaatgttaagatacctacaaattttgtggtatttgacgtagatgaagaaggcaaggatcccctgatcctagggagacctttcttagcctcagtgggagcagtcatagatgtcaggaagggaaaataaatctcaaccttgataaaggcatcaagataaagtttgacatcagaaaagcttcagggaaatcaaaaacatgaggtcataattttgggattcaggacatggatgttgatgaaaaaacagaagctggtaccccaccaagagttatctatacttctcaactcagcaagctgaagaaaacttttgaccagaagaagagagcaatagaagggtttgctcagactgaagatcctacagaagatgaggaaaagatttaaatggcaaagcagagtcatagagggattatcttcaagggtgatgaagctgaaagatcaactatggatgtttgaaaaaagagttaaaaaaatttcaaatggtattgatccagagaagatggaaactgcactatctatcaaggaggacgaacatttcacaacataatggcttgcaccagaagataaaaaaggagttcacttagaggaaagaagcctagagagcaagttgttgagtgagggggaaatctctattccgacttattccccagaagaacactttacacttgattctgttactgaaaaacttctgaaactcaggatataatacaaagctcaagaggataccattggggagctaacttacaagatggaaggactgaaccatgcaatcttggaacttcaagaaatggttaaaggctaccccagttttgaatttgaggattggtcaaaggagcctggttcaaaggaagaagattactctgctgatcagaaagaagcttactttgaagaaaaatcaaataagtactcatcctaccatatatcaagagaggatgcagagtttgattcaagcactaaaaattcaacaacttaagatgaggacttctctgttcctctcttcaaccttttttctgac

SEQ ID NO: 160215 - DNA, 596 bp, Arabidopsis thaliana landsberg
aaatcagctacaatgtcaatttcaagagtttatctctgtctaatctttctcacattcgtcagttccccacttgtgctctgctctcgcagcccgaaactcgcagcagcatcagcagcaatagggaagaagcatgggaaagaacatgttcattctccggcaatgcttttttctgaattcccgaaggttgattcatcatcctccatgacacatattgatgagcctgcaacaaagtctgcaatagccggttttttcaggtatagactaccattccagggatggcctttccacaagtatgctcctttcccaatgggtacacctacgaatccttccgttcctgtaacttcaacaccgtcttctggagctgctgctgctgaggaagaggaaaccgagaaggtgccttctgcgccaagcaaaggaaacagagatggaggcaatgcgtaatgaatcaatatgttttctactagaaccttattgtgttttaatgactgtggaatctttcctctagttttacatattgtatcaaataaaatgtaccatgtattataaatgctatgtgacatttacatggaaaaatgaaatgaatacagtttctctta

SEQ ID NO: 160216 - DNA, 1661 bp, Arabidopsis thaliana landsberg
ctacccaccaccaaccccacataaatgtgtgtatacacactccaccaatattgacctatatatacatgaatctcaccgaccaatgaataacataatcacccctatacacacatgatagctcgagttgaaatgagacagtacagacaaaatcctgtacttatgcgggtaggtgggttattcagaaaacaatttgaagacgcattggagacaaacaaccccgaagcacattacttggaagggctcaggtacgcttgttgggaaaaagatttaaacatggctaaaaaacacattttcaaagcgataaacaaagtagatgaggcactgtttgtgatggcaatgttgacaatttgtggtggagagaaagagctaggtgagtttttcactgaacagttgtttgcacaaccttgggccgaggtattggctatgggagactctctatttgcagctcttgagcgaatggcggttcgtcaaggtacagcttacaggcgtacatggaatggggcccatcccccatgtgtatcaatccacaacatatataataggtgccaagagtgctacatattcttttgttccaaagaattctgtcggcgctgttagctgttaggagcttctcatcctaatcggccgataacatgatatgaccgggttttacttgttgtatgtctaatgttttagtatctgtggaaacttgtcaccagtcgggtaactcttaaaaataacgtaatgtttgttgacattacatgttgtatgtatgttgtgttatgattgttatgtctaatgtctcgttgtttcatttatattagttaaatattactaaatagtttcatttgcaacagtggagatctaattgtatgctaacagaacatgtcaaaacaataaaagccatcctacatgtatattaatattagttaagaatccttgtttaagatcaaacaatttaaaaatgtatctatgaataacaagttgtacgctaacataacatgtcataaactttacaggcaagcaatttcgattaaacatgattgtttacaagcagttttaggtatgtcgtatgtcgagttaggcagttttagggatgatccggcggaaaagtgacttgattttgaatggcttctcgagacgtgcgagtaggttagttactttgggcgggcaagtcggtgagacacttcggacggacgagtaaacgagctactcaagatagatgggcaaacgaggtacttcggacgggtgagctgacgagctgcttgagacgggagcgctgataagctacttgagacgggccggcccgcgagatacttcggacgggtgagctgacatgctgcttgagacgggcgagctgataagctacttgagacgggccggctggcgagatacttcggacgagtgagctgacgagctgcttgagacgggcgagctgataagctacttgagacgggccggctggcgagatacttcggacgggtgagctggcgagctgcttgagacgggcgagctgataagctacttgagacggaccggctgacgagatgcttcagacgggtgagctgctctttgtctctaagtgtcctcgcggaaccccctacctgacgcgccaactgttgatgcacgaatcacacaagtacgaaaatgggatctctagggaaggaagaagaatctttcta

SEQ ID NO: 160217 - DNA, 475 bp, Arabidopsis thaliana landsberg
ttaaacaaagacgcacaaggccagaatcagtgctaaggtagccaccgcattctagcctcaaaactgcaaaacctctttagacggcggctggttttgcgagagagaaaactaggtttttttttgtttttttgagttacttactcgcttacatgagtaactttttttttcttcgaaaaaacttatctccgctttacgtcgaacttgaatctttgctaggggcaatggaatgcatgatcagcattggcgatacagatacctttgctaccgattgcgcagatttgatctctctcgttgatcccaagacgattgaccaacttttgcaacggaattggcctctttttggtatttagtttgtttaactcttctttcagcattagctcgtagttttaaactcagattgtttagctaagactctcgaaatcgtattgcgtttctctcatgtaacaaattggtcatgaatgcttttgtagaaaga

SEQ ID NO: 160218 - DNA, 737 bp, Arabidopsis thaliana landsberg
taaaaaaaattccaatggcttttgctactctaaccttccccaccactattttttgctaggtattttcctttactttgaaaggccttgatataaaaaaatagaataactacaaaacgtagtaaatagaattggataaatagtgggttccatcgtttctatggttacttctaaaacggtgaggtcctctctatacaccggagctccttcttttaattaatcaatactattggtaacttgtacaattcacattctttggctctaccccatgaatattccagtaataggtctttcacaatgagatcccctttatacagtaacggtatttcattttgaaaattgattaggtcatttaccctgttagtccgttcttttctttcaaaagtggaatcttttttctaaaaaatggaatttcccccgcttaatggatactcatttgttatcattgggggttttctaaaaaatggagttgattggatttgcaccaatgtaaaccataagtttcagacacaatagagtatatgaacgatctatattttgtaaataatgaatcgagttcgtccattctattttattcataggtactgatccgtgatatttcaaaaagaatttcctttttatgtctcagtctatgatctaaacgagtcgcacatacacccgagtacatgttcctcgtcgctgagggcatccccgaagcgctggggatttcgtgacgtttcggattggctgtcttgtatttc

SEQ ID NO: 160219 - DNA, 1029 bp, Arabidopsis thaliana landsberg
gaacaacttccgtgggaattggaggaaagaatactcactttgattccaacaaagtgtctcgctctattcagatctgtttgcaaacgatggaactctctttcaaacgagagaaggtttatcaataatcatttggctcgtgcccatccacaataattcatcttgattgccagatccaagatttgctcggtggaagttaatcttgatgttccatccatagaggtgcatagccataacttaccctcatatattcccggttataatggtttcttcatgacggtcgaatattgcgacgggttagtggtttatgctaccgagaacgggattgggatatgcaacccattgttgagacagattagatggatcaaatccaaagtgaattatcgttacaatggggtgggatacgacaattctagacccgaaaatcattacaagatctttgagtcttgcccctatagcgatacaaccgtgaaagctagtatcaccgagtttgtatccgatgcatggatttcgaaaccgtacgagtttgcatatgattgggattttatgtcgtcctatagtgtatcattgaatggagctttgtattgggttgctttccatatggcgtctgatgaccagtttattcaaagctttgatttttctacggagaaatttgaaccctattgtctcttgcctaataaaaaatgtgatccaagcaatgctaggtcccttgcagtttttaggggagatcgattttcgtatttagagcaaaactatgagacaaggaatatagagatttgggtaacaaaaaaagagattaaaattgagaatggaaaggctgtggagtggatgaacttgatgaaagtgtcagttcctaaatggtcgagcataagagtaataagctatgatccgccaagttacttcattgacgataaaaccctcaatctcgcatttgtgttgtttgaacaagaaggaaaaggcttgcatttatattgccaagggagataagttccatgaaatatttatacacgatttggttgagtatcctaactc

SEQ ID NO: 160220 - DNA, 2009 bp, Arabidopsis thaliana landsberg
cttattccaagtatgaaatttgctcacatttattttaagtcatgttgttagttgctatctactggaatggaataactttttagattactttcgcacgcagtttgtaggaaatgcatctatgagaagatcacggaggatgagatagagacttgtcccgtatgcaatatcgacctcggtagcaccccattggagaagctgaggtaagctattcgtgttctgtatttcagactctaccagttctcatcaaaatatggtttagtttggttaaatttctttgctccttgttcatctaatttgtggactcaatccaattgcttttcttgttggtgaaatgaactgctataacacaatctctggaatcttgttcatttaatacacgtagcacaatggtttttatgagagagagaccatttataggatgttgtaggagaatctaaatagatctcttttgtactttcctttttcttactcgttattgtactgatgggagccacttgtgtgcatggttttaggcctgaccacaatttgcaagacttgagggccaaaatctttgctctaaaacgaagaaaagtgaaagctcctggaattgtgtccttaccaggaaagaggaaggagagatctatatcttctttggttgtgagcacacctatggtgtcagcacaagctggaacaacgagaagaagatctaaagcacaaacaagaagagagttacgtaatggttctttggctgagagaactgtgaagaaggaagaatcttctggggatgagcttctggagagcacaagctcacccgacactcttaacaaattcactcagaataaaagacagtcaaagaaggtgatcactgaactactctattttctcgtaatgacttcatatttgacatgatttggttacatatttatttttgtttggtacacttcaaaagtaaatattcagtaaaaatatttgatactgttattggtctcacattcatttgagttattttgttttttgcagtcatgtaaagagtccatctccaataaagaaaacaaggatggtgatgaaccctgtgattccaaaatggattggaaacctttgaactttctggttgaagtggcaaatgggacaaagcccttgaagtcttctgcttctcaagggtcaggttcaaaatctgagcacgcgaatgtatctcgcaatcaatttcaagggagtaaaaccaaaactaagaataaaaagagaaaatgtaaacgtgaggatgacaacagtaataatggtgatcctacaacatcagaaactgttactcctaaaagaatgcgtacaactcaacgcaaaaggtctgccaccactttaggcgattcaaggaatttgccacaaccagatgagtcaagtgcaaaacaggagaggagaaatggtcccgtttggttctcacttgtggcgtccaatgatcagtgagatttttgctctcatatctgaaactatttcctttcatgatctttctctctttcttcattttgtttctcttctcttggtatattgacaagggcttactggttacagggaaggaggaacttctttacctcaaattccagcaaattttttgagaataaggtaggttgacagtttaggtattctttgttttatatatcctgtgttgtcgctgcatcttacatagtccctcatttttctgttatgaggaattcttttgttggggaagataatccaatgtctcattctgtgatagggatggaaatacaacagtttctttcatccaaaagtacctcatgaggaagctagatctcgagagtgaaaatcaggtaagggtctttatatgcactatggcacgagaaaggatagaacgtttgaatataatggaacttatatgtttggttgataaaaaatggacatacttatggtttatgttcagatacagataaagtgtatgggagaagcggtgatcccaacgctgacgcttgacaatttagtggatctatggctccacccccccccaaaccaccaacggtttgctg

SEQ ID NO: 160221 - DNA, 2760 bp, Arabidopsis thaliana landsberg
atggaagagacttttgttccgtttgaaggtatcaagaatgatcttaaaggaaggttaatgtgctacaaacaagattggaccggaggaatcaaagctgggtttaggtactcaatttgtttacttttttttcaaaatttatatgttttaatgaatttttcacctatatgacttctcatttctataggattctggctcctaccacatacatattcttcgcgtctgcgattcctgttatttcattcggcgaacagttggaacgaagcactggtatttaatcttctcctctgaatagaaaaaaagttatcagctttgtgaatgttagtagcaaaagatcgcaacttgaataagattctgtaattttgtagatggagttcttaccgctgttcagacactggcctctacagccatttgtggaatcattcactcgatcatcggaggccagcctctgcttatactcggagttgcagagccaactgttattatgtacacattcatgtttaactttgctaaagggagacctgaactgggacgcaatttattcttggcttggtctggatggtaatgttttctcctaacttgattgttaatcttgttaaaatgtgaggaataaggtgttaaaatcttgttaaatatgtgtagggtttgtgtctggacttcgttgatactgtttgtgttggctatatgtggagcttgttcatttatcaacagattcaccagagtagctggagaattgtttggccttcttatagctatgctcttcatgcaacaagccatcaaagtaaaagaatttgcaattttttaaggtaccaataaattgtattttgattgcctctaatgctttgattatatatccagggattagtcgatgaatttcgcgctcctgcgagagaggatctgaaacttgtggagtttttaccttcctggagatttgcaaatgggatgtttgctttggttctttcctttggtcttctgataactgcacttagaagcagaaaagcaagatcatggagatatggaacaggtaacgaggcacttagtcaacttttctttaattctcatgatctggaatctccttattctatggatcttgagagaaatcaataatcaattaagcagtcattgcttacaagtggggagatctcagtcaaatattccttgttatggaagaacttaattccttttaaaaaaaacattattcttggaccaggctggcttagaagtttagtagctgactatggtgtgccactcatggttctggtgtggaccggtgtctcctacatcccaacaggagatgttccaaaaggaattcctcggcgactttttagcccaaatccttggtcccctggtgcttatgagaattggactgttgtaaaggtgtgtctttatcttgaaattcaaacacaccccaacaagaacatatgactaatgaacagtgactttgatttctcaggagatgcttcaagttccaattgtctacataattggagcattcattccagcaacaatgattgcagttctttactacttcgatcatagtgtagcatcacagcttgcgcagcagaaagaattcaatttgagaaaaccatcttcttaccactatgatctgcttcttcttggatttctggtaagaatctacaggaactagtaatttcttcttctgcttgaccttgatctactacttactccgccattttcagaccttaatgtgtggtctacttggacttcctccttcgaatggggtcattccacaatcccctatgcacacaaagagtcttgcagttcttaagaagcaggttagagaaaatcgaataatttttcccttagtttttacattgtttgaaatctgaaacgttttttgtatcaattgcagcaaatgagaaagaaaatggtccagaaagcaaaagaatgcatgagggaaaaagcaagtaactcagagatctatgggaggatgcaagatgtgtttatagaaatggaaacatcccctaaggcatctaaccatatctgtctcataaattcactccctctctttctttttagttaccaagaagttaatttctcatcaatcttatcatactgaaacttttcaggctacttcagtggtgaaagagttagaaaacttgaaagaagcagtgatgaaagcagacgatggaggtggagaaacaaaggggaagaagtttgatccagaggtacatatcgaagaccatttgccggttagagttaacgagcagagagtgagcaatctattgcaatcagtccttgttggattgttgatactagcggtaccagttctcagaatgataccaacttcagttctatggggttacttcacttacatggctgttgatagtctccctgggaatcaattctgggaaagacttcagttactattcatcactcctggacgtcgattcaagtactgaaactctcttcttatacatcccaacctcttttaacatgtttataaactttctgatatgttttgctttgttttgtgtgtgtgaacagggttcttgaaggtttacatgcatcatttgtggagatagtaccatacaagtcgattgttatgttcacactcttccagcttctatattttctgatatgctatggagtgacatggatacctgtaggaggaatattgttccctttgccattcttcatcctcattgcgttacgacaatacatcaaccagagactttttgatccatctcatctccaagttttagattcttcagagtatgaagagatggttggtgcaccgca

SEQ ID NO: 160222 - DNA, 506 bp, Arabidopsis thaliana landsberg
atggcacaacctaaagacggatacatcaaaggcgatagaacaaagcacatcctaccttaattcttctacacacacgatctacaaaagagcggcgatgtacgagttctacagatccgttcgaatgataatccgactgacttattcaccaaggcgctacctactgctactttcaagaagttagtctatcgtatcggattacgccgtctcaaagatttcgacgaatatactcataagggggagtaattgtatgttgcactctttttcccttaaccatggttttttccattgagttttcctggtaaggtttttaatgaggcagcatttcaaatactttactagttatgatattataatggtcatcagggggagtgttatgaataaagatggatacccattataaggcccatcatgtaagcccatcatctagatgtttctagggttttaccctttccttgtactcctatataaagaaccctttatttcattggaataacacactcatttct

SEQ ID NO: 160223 - DNA, 2780 bp, Arabidopsis thaliana landsberg
atggcacgaaaaggaagtcatcagaagaatggaatggataaccaaacgaagcaaaaaaagaagactgcttctgattctttgctgtctaataagggacaagggaaaaataatgaggctgagagtgttctgaaagagaattgtcaagatgataagcagactaaaagtagtccagtttgtgaaactttagaaagagatatggatgaggcaaaaggcgctgcttctctcaaggatatagatcagtctgttgcttcggagagcgatttagctggaggtagtagacctcgtaatgaacctggttttacaacagaagaaactagatatattccgtttggtcgtgaacacattgacagtgttatgagaagcttgctggatatattgagcacgaatagcccgtcagagaatattgagttagcatataatgcagtactgaggaaactgaggatatccactgctactgtatcaagggaaatgactaagtgtatggaaagacacaggcctttgatagattctgtcaaattacgagtatataaaggtcgtgatcttgttctaacgaaaatgcggcaagtattcccggttgtcttcaggtggcttatgcactttggcagcataattcttcttctatctctggtttggttggactgtgcaatccggggttttgattcattcattcggatgggaacagcatcttttttctctatcatgtggtgtggtctcttttcagcgttttcgatgttcggcatgaccaaatttatactgatttcggtaagaatctcaaatgtgatttctttatatgtttactctttatgcatatgttaaatattcgataaatacaggttgcaactgttttggtggcattgttcattggcttcgtagttgggtctgttacgcttgccatttctggtttggttttgctatggctctatggtagcttttggacaacactgctcttcctcttctttggaggtaaaagtccttcctgtctcaatcttgtagcaacgaccaatctcttgcattattttgtctaatacagtgtgcattgttcgttaatataaaggtctggcattcatgatgaagcacgagcgcgttgcactgtttataatcacagtgtattcagtctatagtgcattgagttatgttggatggctaggtcttctattggcttttaatcttgctttcatctcaaccgatgctctcatatatttcttcaagaataaaataaatcagcagagcactgctgatagacccactgagcccgtaaatgattcatcttttgaaaatggccctggctttccgggagaccgtggcccaggagtcgcgtcaactagcggaacagactctgagttaacatctgaagatgaaattgctcggttactgaattgtcctgaccactattcagctttgggcttagctcgatatgggaatgttgatatggcttatctcaaacgagaatataggaaaaaggtaatgctgcttatttttctatttgaagtgaatgtttattggatactcctgagcagcaaaaaggtatgttgggtttataagcattgtggatgattcaataggcgatgctagtccatcctgataagaatatggggaatgagagagcagctgaagcttttaagaaacttcagaatgcatatgaggtaatgttttgtttccctttccgtttcatcaatttgtaatcgctgcatcaagaacccgcatctctaatctccttagctggcctttaggtattacttgattctgtaaagcaaaaatcatatgatgatgaattgaagagggaagaactactgaactactttcggaggtttcagaactcttctcaaaaggtatgtttattgttgtcttactctgaagtgcatctttcttgcttaaagtatcaggttttttgtccttcacacttgtaaacaagtaggcatgtttctctctactcggatatatgtgtttattttaagctgcaatgtataatcatgaaccaggacactcggggacacggtttctctgggtcgggttttggaagctcagaaggtgaaggagaggaagcatttagagagtgtagacagatagcgtgtaaaaaatgtggcaatctccatgcctggtttcttacaaagaaatcaaaatctacagctagatggtgccaggttttttccaactcttcccacctgcatctttaagatcctatatattacaccaattatgaaactacttgagagggaagtataatacatataacttaaactgatttacacgagctctgcttttgtatctcaaggattgcaaggaattccatcaagcaaaagatggagatggttgggttgaacaagcttcccagcacgtcttgttcgggctatttcaaaaggtattattttgtattcaaaatttcaattcatgggatagatggtaaattgctctatactggaactagatgctcttcactggttgattctcaagaagacgattttgtacaatcagatgacttgattgatatgcttctcatagtcatatgaaaggatttgttgttttaatgcaggttgatatgccgcgtgcttatgtttgtgcagacagcaaaatatatgaagcttctcagtggtatatctgtcaggtaccaaaaactttcgcttgctttcggcattttcataagagattgtttggtattttcttttatcggaatgattaaaatggttttgtttgatttgtcggaagggaatgagatgtcctgcaaacacccacaagccgagcttccatgtgaacatgaacgcgacagctgccaaacgagggac

SEQ ID NO: 160224 - DNA, 1359 bp, Arabidopsis thaliana landsberg; identical to SEQ ID NO: 9000

SEQ ID NO: 160225 - DNA, 1690 bp, Arabidopsis thaliana landsberg
cccgatatatatggcttcttatattttgtttctattgctcttagatttcatgtttgcaaacggactgtgatgttgcaaacgaaattttcatacatattttagaaatttatacttcgcaataacatttgtatcatttaaataatacaccatctcgttttgatatcacaatgattgctcaccgtcaaatgaatgttttattttgaactattagaataaatattccattggttctctcagtaaaagttgagaacttctctcacggaggccaaccatgtttgtctttcactctcatcaaccttccttcgagaattgagagacattccaaatttctctaatcgatcgggttggatctggatggtaagtagtaagtacccaccaaaggcccatatagctaaattgttattaatgggcctaaaactacccgcccaatatacatctatatacatgtactctacacttaatgaaattttaaaagatttgtaatttgtatcgacgggaagattgtgaaaccctagcttcacaatcggagagaaacaaggcggtggttgttcaagattcgatggatactggattcgcggattcaaataatgattccagtccaggcgaaggatccaagaggggaaattcgggtatagagggtccagtgccaatggatgtggagctcgctgccgctaaaagcaaaaggttaagtgaaccattctttttgaaaaatgtattgcttgagaaatctggcgataccagtgacttgactgctttggctttatcagtacatgccgttatgttagaatctggattcgtgttgttggatcatggctctgataagtttagcttttcaaagaagttactttctgtatctctaaggtatactctgcctgagctaattacacgtaaggatactaatacagtcgagtcagttactgtgaggtttcagaacataggccctaggcttgtagtttacggaactctaggtgggtcttgtaagcgagtgcacatgacttctcttgataagagtaggtttttgcctgttattgatttggttgtggatactttgaagtttgagaagcagggctcttctagctactaccgggaagtgttcatgttgtggagaatggtaaaagatgaacttgttataccgttgttgattggtctttgtgataaggctggcttggaatctccaccttgtttgatgctcctaccgacagagctaaagctgaagatactagagttgcttcctggtgtgagtattggatatatggcttgtgtttgtacagagatgcggtatctggcttcagacaatgatttgtgaagcagaagtgcttggaggaagttaataattttgttgtgacagaagcgggtgattcagttaattggaaggcgaggtttgctactttttggaggcaaaaacagcttgctgctgctagtgatactttttggaggcaaaaccagcttggaaggcggaacatttccacgggaagaagcggcatacgattccctcgaatcattggagaccctcctttcacatggtttaatggggatcgcatgcatggatccattggtattcacccgggacaatcagcacgtgggctcggcagacgaacatggggacagctctttactcccagatgcaatcttgggggactcaactagcaaacataccgagtgtaaaaatggaactgttgaatctttctaa

SEQ ID NO: 160226 - DNA, 3914 bp, Arabidopsis thaliana landsberg; identical to SEQ ID NO: 27680

SEQ ID NO: 160227 - DNA, 718 bp, Arabidopsis thaliana landsberg
aaacattgaacattactacatttcacatgttctttatggatattgttcaacgtcctatctcgaatttatatcaagtcaagagtttcctctcaatacgttatatagggttgccaacagctaccaccaccgctcggcctcttctccggtatcgtgaagaaatggagcctgagaatctcgagcaatgggctaaaagaaaacgaacaaaacgtcaacgttttgatcacggtcatcagaatcaagaaacgaacaagaaccttccttctgaagaagagtatctcgctctttgtctcctcatgctcgctcgtggctccgccgtacaatctcctcctcttcctcctctaccgtcacgtgcgtcaccgtccgatcaccgagattacaagtgtacggtctgtgggaagtccttttcgtcataccaagccttaggtggacacaagacgagtcaccggaaaccgacgaacactagtatcacttccggtaaccaagaactgtctaataacagtcacagtaacagcggttccgttgttattaacgttaccgtgaacactggtaacggtgttagtcaaagcggaaagattcacacttgctcaatctgtttcaagtcgtttgcgtctggtcaagccttaggtggacacaaacggtgtcactatgacggtggcaacaacggtaacggtaacggaagtagcagcaacagcgtagaactagtcgctggtagtgacgt

SEQ ID NO: 160228 - DNA, 2785 bp, Arabidopsis thaliana landsberg
atgcaaagagaagaagtagctcggggaaagagggtccttgaagctgaagaagaacaccatgaagaggcaccctttgaagaagcggtttctgaagaagaggttgagatcatcggggatgatacaccaacccctgttgggagaagaaaccgaccaaggaggaagagagaaccaaccccgagcgagtactatcaatacttgaaagagttgaagtttgagggaactagataccctcataaggaaatgatgcaagagcttggtatttgtggtgatgtggaaaacttgatggaattggccaatctttcaacattcatgagctgccaatgtgggggatacaaagaggagagctgccaactccttgcaaccctcaaggttcatttttgtgttgatgattcggagaaagaagagagaggaggtcttggttacataaatttcaaggttaggggtgtcgagtatactcttgatatatgcaatcttgataccattttcgggttccctagtggagaaggaatccgccaagactatgatcaagaagagctgaaatccctttggaaaacaatagccggtccgaaacccttcttaccaaccaagagtacgcgtttgtcaatttgtaatcccctgattagatacctccaccattgcatcgccaacaccctctttcgcacagaaggccaccggctttgtcagtgaagaggagctgtgcatgatataccaatctttggtcttcattctgagagaaacaacagcttcgaggaagatggcgggtgatagagcggacacttcgttgagtgttgttctcttggatcaccttttgagcttcaaggagtatgctgcaaccatccatcgctcgggaattcgcgggagtctttgtgttggtggtctcttaatgccaatgctgggagctgtggggatggaattcagaacccttgacgtgttgcctaagttcattgacctcgactatctcaaggggaaggattttcttgagaaaacaactccggcggatctctatctcttcaagttcaaccatccatagcttggaccttctctgttacccctaacatgcgagaaccagacttcggtgaagacaagacgcaaaatcaatttcatgccatctccctctgccttgaacatcgacattggaggagctcgagaagatgaactagaatatagtccagctgactatgagcaacatgagtactttactcaagctgattataagcagcaaatcgagtttgagcaacatattgatcaatcggagcatgagaccagcgaacaagagcaagctcattgtaaagaaggtgctgaccaaggaggagatgagtttgctgaagttcacaagaagctcggtgtacttgaagagcttgggaaccttcacagctagacaatgaagggtttcaagaagaagatgagaacaatgaagaagtctctcaagagtatggctgctcaactcaaggacttccatagcaagccaaggccaccgtctccaacccccgaagtaagaagaagcggttcaacgagctcagatgcaaggagagctgtaaggatcgatcaaccccgagcttcatcttttgagcctcgggaagtgatctccgagctgagagagccatggagtaggcagagacgagcttccacacgctcgaccggacagaacgagcaacaccctcccgcctcaacatcagtccatgcttatactcaagagagtatggatgactatgtctccataacatctttttatttttctttgtatgttatgtgtttcggtcttgaattctctttcagatttttattacacaagggaatgtgtaatttaagtttgggggggggttaaaacatgtttaacattgtgttttcttttcttatttcgaatattacatcatctacggcatagaaaaaccataaaaatttgaaaaaaattcagaaaatgatttcatcaaaaaagagtgtcatgtagattgcatttcattttaggattgtatatagagtgcttgcatttaggattgctcatttgcataggggataatgatgatttcaaaccgataagcatgttttgattcaatgaagtaagttcaatgtccaggttgttagttctctgttgtataaccgattgtatctcggaagtaagactacaccctactttgaatttgtaacttgactatactactttgattcgaaacttgcttatctgatgccatttcctatatattagaacctgaactgaatttgcaattataatgtctatgcattatttgtgaactcatggctaccacatacatacttggattatcttattcacttcaccaccatctgttaatccaagtaactgtctctcatttttagagcagtttcccatacccttagcctagccttatttcaagccaaagatcatttgtgtatgattgtgaggtctttttcgattgagcttggtataacgtgttaggtatgagccgacaagagcaatctttcatgtagacctagcccacgctttttgggttagctaggactaggtggagacttgtatttgggagtgggaatgtgtatggaatgaatgtgaatgagaatgagaatgaaaagaaatgaaagagagtaagagtttagagttctaagggggataccaaaagtgttaagtctagtaaagggttttgaattcaaagaagttaggcattgtgattcaaagaaaaggataaatcgtcctatgtgctaagattagaagaaaagccttaagtttgttaaagtataaaaccaaaccctctagactcttaaatcgtttcaaagagaacccctaagaact

SEQ ID NO: 160229 - DNA, 513 bp, Arabidopsis thaliana landsberg
gatacaaaacttctaactgcacaatacggacctaaagcaagaacgaaaaagaacgaaaatgctgagaaggcttgtttgatttcatatggaagccttaaaccggatagattggtaatcgtaaacgcgtttagttttcagaaggaggcttgttttgtatagtacaggtgattcttggtttttagattacaatttcttttgctttgaatattgataggaaaagttgaaaaagagtatgaaacgatactaaaaaggacgctacagagtatttgtgttttgagagttgttccaaataccaccacctcggtgataattcaggtgagtagctattcaatgttgtgtatatatatggtcaacttgagttgtatctgatgttttcattttgtaatatccgtgtaggttgcacatgatggaggttctgtatcgattttatgttccttgcaccttggtaaacatttactaatgctttctgaaacacatataatacggtataaacaatgtatgttcgagtatata

SEQ ID NO: 160230 - DNA, 1085 bp, Arabidopsis thaliana landsberg
aacatgtccttcggaattgttctcccaaaccactcacctaacggaagattctcaaacggaaaatttttctccgacataatcgcacccaaactcaacatcaaacagtttgttcctcctttcttacaaccaaatctcaccgaccaagaaattgtaaccggagtctgtttcgcatcagcaggtgccggttacgatgaccaaaccagtctcacgacacaagcgattcgtgtctcggaacaaccaaatatgttcaagagttacattgctcgtcttaagagtatcgtaggagacaagaaagccatgaagatcataaacaatgctttggtggttgtgagtgcagggcctaatgatttcatcttgaattattacgaggttccctcatggcgtcgcatgtatcctagcatttctgattaccaagattttgttcttaataggcttaacaatttcgtgaaggtaagtcttaagatatttcctcactacaagaaattagggtttggaacggatgttagtttttttttgtttttttatgtattagttttgttaatctctcggatcatttttccggtattttttgcaggagctttacagtttaggttgccggaaaattatggtaggaggtttaccgccgatgggttgttacccgattcaaatgactgctaattccgaaacgctctaaggttctgcttggaacaagagaaccgagactctgtcttatacaatcagaaacttcagaatctattacctcaaatcgaagcatcgcttacaggaagcaagatcctttactccaatgtctatgaccctatgatggacatgatgcaaaaccctagcaaatacggtatagatgatacaatctctttcttgtttggcaagtcatcctatgagataaatattgaccagtgattatatgtgttcattgatgtggaaactaaaacaggatttaaagagacgaagagaggatgttgtggaacagggcatttggagacgagcttcatgtgtaatgctttttctccaacgtgtagaaatcactaaaagaatttgttctttgactcgattcatccatcggaagcgacctataattgatgggcaat

SEQ ID NO: 160231 - DNA, 962 bp, Arabidopsis thaliana landsberg
atggccgttgttcctttcattgacagtttctcagagatgttgaagcgatactcactgctcctgatcaggtgaatcttccagttctaaaccctggtttaaatacatgagttgacaaaaccactgttacgtggttcagattcaatcaccaactctcgatcgcgattgcagagatacttcaatgcaactttcaccatgcgtggccgacgtaccgcttgactcccgttgaggtcaaggcacgatggttttttcccctcatgttaagcatcaatctttgatttaaagcacagtcaataaaccataaaccaaattcttactattttctatctttgtagcgaaaatacacgtgggattcaaggcacactctaacggtgtagacgcagtttaatttggtggcaagaacgttgtaccgagacaatatgttattagtgtgtatgaagaaaaggagagagaggtcgatgagggcgtgacacctccaataaagaagggaagtagaaaggactcaaggccgaagtcataaagacaaggccaaatatctcctcatcaaagactgaagaaggtaagaattgtggctctaaggaaagctaaataagcaaagggaagagccgtgaagatgaagtcaatatctaccaagaagatcaagcctcgaccaagaagaaaattgtctgtctgtacggttaagtcaactcaaacccgttgataataggttttttaatcaattaaacctaaagcactatcatgtcgttgtagtactgagggttgtcaatccaaatgggtgtgattctaacaatcaagttgtgatcagaagtcactaagtcaagccaagcaataacaggttttggtgtgttctagcagtcctaagtgaacatgcagaaaacagaaaatcaaacagaaatagtgaaacactcgaccaacacagctctttgcagagcactgggtgggggatcctctagagtcgacctgca

SEQ ID NO: 160232 - DNA, 657 bp, Arabidopsis thaliana landsberg
aatgagcttgtatgtgtagtaaagacagagatcgtaaacttgtgatttatcttttgtttcaggttgaacatgagacgatgatgcgtaaactctatgagcttatgaacactcatagtttaaataaaaaggtaatgctctcttcttgaacatacttttcgacagagaataacgataggattttcgaggaccttaaagaccgtgtggttgagtgccattacgtcttgatttgatttattctcacattcttatcattgtgcttatgtattggttttgcagaaaatggaggaaactcaaaatgtgttggagggaagagaaacaattgaagcttcatctccttcaactgtaactactaatgatgaagaacattgaagaactcaactttctatgatagaccgggccggttttgggccgggattgaatgggccaaagattggatcttaggtttgaaaattttgaatctatctttacaaagaatctgcaacctatgtacatgtataaatatgtaatttctacatctaaaagcaatcaaataataatgtcataactcataaagtaacatcaattgcttgcacaaagcctggagatcctccaattctcttggtgaacaaaaaattcctcaccaaaagtttccatcttttctcatctttcctggtctgt

SEQ ID NO: 160233 - DNA, 2132 bp, Arabidopsis thaliana landsberg
cagaagcttcatgatgtattacttaaagcggagttgtagctcctcccaatttattttccgaagtctatccccagcaattggaggcaactgttgaaagcaaaaactcgactgaagccaagaaagagagaggaaaagatttagagacaactcaggaaggaagacaccaaaacggttttggtccagtgaggtttttgcctccattaccaagagtgcaatctaaaacaaatgcacatgatcaacgtgataatggcaaagttgtaagtcagtctgattcttcacattctgaagcatcttcgacagaatatgccagaaccgtccctgctgctgtagctgcagctgctgttgttgcatcttccatggttgctgctgctgctgccaagtctgcaaactcagactcctcccccatagaacttcctgctgcagctgctgccacggccactgctgctgcagttgtggcaacagctgcagccgtgtccaggcaacttgaattaggctcgaatagcgacggggatgatggttctggtgggcatgagcctcaaggtagtggggactctaatcatgggccaaattcaggaggggaaagaatatctgacaaatctattggcaatgaaagttctaagtcagactgtgatgatgtatctgactgtgagattttgtgggaagaaattactgtgggagaacgtattggacttggtacctgacttatcatcatctgttatctgctttggtgtaactacatcttcaaataattaactactttacttcttttgatacaggatcttatggagaagtgtatcggggagattggcacgggactgtgagtattatatttgcttttccaatttatactgtgaatttgaactcgatgaaaaaagagtttagaaattccttagtttgagttccatatcgtcgaaactcttgaactttaggaagtggctgtcaagaagttccttgatcaagatttaacaggagaagcattggaggaattcagaagtgaggtacgagcctttcttctaatcttttcttttacctgattttccatgttgattagttctatatcaaacccttcttatatattcttgtgatacaaggtccgaatcatgaaaaagctaagacatcccaacattgttctcttcatgggagctgtgactcgcccaccgaatctttcaattgttacagagtttcttcctaggtaatactatgatctttgcaagattcagttactttgatatgattctcatggctacaacgatttccatctccttattcatgatgcgcatgcctctgtttttatctattttgtgacctctaaatgccaaaatcttctttgcatcaatgagtgttgttcaagtatttgctttaagttctaaaatctggatggtttgaacaggttcaatccggttgtgcttcgtttttggatctttacattataatatttttttccaaacttgtgcagaggtagcttgtataggttaatccaccggccaaataaccaattagacgagaggaggcgcctgagaatggcccttgatgctgtattagtcttttcttctcttactatatcacctgtttgtaacttcttgattctttcagtagagtgttgaggtaacatattacttgtattcaggctcgtggaatgaactatttgcacagctgtaatccgatgattgtccatcgcgatcttaagtccccaaaccttctagttgacaaaaactgggtcgtgaaggtcagattctctccataaaatttattgtttcttaccaagtggataatgttatatcgtatgtaacagctataagtttgcataacaaatactggattttcatatatatcaggtgtgtgattttggattgtctaggatgaaacacagtacatacctctcttcaaagtcaacagcagggacggtaagaagcaagttatagtctcccctgtcttaatcatctctttttacagttattgtaattgccagttcgttaatctaattatgtgttggtcttataaaggctgaatggatggctccagaagtgctaagaaacgaacctgctgatgagaagtatgctcttagatcttttgctactagatattcattttgttcccttttgtcagaagcaggcctaatgtcaggaaaaaac

SEQ ID NO: 160234 - DNA, 780 bp, Arabidopsis thaliana landsberg
gaaaactgggaagttttctctaacgaacaaaacattcgtgacctttttttttatatggagactcaccaaatactctacgcgttgtcttgactcttacacttctgatcccttttcttccggaggaagaagctggtacgtgtgactttcttcctcttgtatatatataacaatacgtacaagatgtgttagtttagtaatgtgatggttgtgtattgtgaaggtcattgaaagtgtatccaaatggagttggaaatgctacgggtaattcgttgtcactctatttgttgagtgatcagtcaactgataagggttatcttgaagccaagttacaaattactgaccagatccaatcaaaccatttcgtgaaaaaaggtttgacgatctcctttctcatcgatcatctactactagtactaatttagacctaattattggtgaccctttttcttacaaaaaattaactttggatttgttcctatatatatagtggcggcatggcccaatgcaacagagaatggatggggtttcgacaggtttatgtctttttcagatcttagaaacgcatccaaaggttacctcgtcaacgataccctcaaatttcaagtacagatattgtccttctcgaaaaccgactactactcttataaatcgtctgttgctcttcctatttcaaatggagatagtacttaggtgactagtcttcgcttaaactggcccatatcactttgcttaattgttttaattttcttatgtttctgttcaaaaaaatgagtacgagct

SEQ ID NO: 160235 - DNA, 686 bp, Arabidopsis thaliana landsberg
  unsure (1)..(686): unsure at all n locations
agcgcttgactggattcatcgttttgagcagagaaactcatcatgactccgttccgatcctaaatctcaatccattgatcaaactcaggttattttctctctatttgtcacaatcgttacaaatccctatattattcaatttccccagaattctgttagatttctggattgatgagaatctatatcctacgttagctattcaattttgaaatgcacgacactgattgttcttgagatttgatgcagtacattgatatagagtaataagcttcaggtttttacttttgaaatagagtagttggattttgtagggttcttagatgaacttatggttatggtttagagatatattggtgtagtagctttgagttgaagtttaggattctttgtttttccaggtgagtgatcgtattttcgggaagaaatatcgtatggnnnnnnnnnnnnnnnnnnnnnnnnnnnnnnnnnnnnnntttgaacctgcgattgagtatcttagttcacgtaaatggtagagatggataagttctttgctgaaatatgtgcctcgtgaattcgattgttgtcgtgttcttgatgaaaaccttatctgaatacagctctgttcttgtttttgctactttcttgagaaagaaaattgttgtgttgtactgaaaatatgaagaaaagcttcttattgtttggct

SEQ ID NO: 160236 - DNA, 2096 bp, Arabidopsis thaliana landsberg
atggtgtcgatcgacaccacacctgtgtcgatcgacactcttattgctgccaagggaattctcgttagtctttgagaagccctgaaatcttccttatttgcaaagtagtccctgcatgtttttagtcacgaatatacctaattgtttggtcattgttagacctaagttttgtttttagagattgttacacattttgagagaagaatccaatccttttagagaggattctgaactcctttacttttattcttaattcatcaatgcaaactattcagattatgatttgtgtttctgttatcatgtctgagtaatcacattgttgggtttaaggagttaatagggatttagattgattagtagatcgaaaaccccttaggattattcttagagttcttcatcttgattattcttattgctagttttagattgatcacctagaacttgatattagataataggtatacccaccataggtacttgttatttgaactatcatagatgagcctatgcatttaagaaagaacatataggctcaaagaagggctctggtttagatactaggtgaactaataaaacttgataataatgcatgatttagtataggatttctcggcttctccggttatcttagctctaagtatagagagttttgcagaatgccactggttactctaaaatcatagtttgagttcgagaccggtgcgataacaatcctaatactagctagatctacaatttatctattttccgagacaattccttagacctgacgctttaatcacttaaatctacaactcacttacttcttttattttcttttacattaatacactttgtctagcttaattagaatcatcataattttattgtgtgaacatcgagagcttaagtgctaacgacgatctctaatttgagggagtaagcttaaggcaatttgagctatttcacatataaaagataaatagtaaatagacagcggtttcacacaatatccagtagatagaaggagtcagaatattggtgtttattacgaggctacggcaatctgtaggtctggtgctaaggatacgtcaaaggtggtggatatggtattatactatagggcaataacatacattatcttgttggggtacaatgtattttttgtccttttattttggtgtaaataggcagtgaagggtaatggagtaaaggaagaagatggtttcacgcttgttaacatgagtcatagtcaagttagtttttcaagagatccttacatattagcctctctggcaaagcaagtgttttactcaagggaagacgagtcatcaaactggcatgttgcaatgagaggtccttttagaagattcagtcagaaagagtttgaagctggagatggagacgttagtcctttgtctgcaaatattgacatgggtgttgacttggatgaaacggaaaatgaaagagctgattgtgtaggcatatatgtgtggttataaatcattttcatgcttagtgattatttgtttaaataaatgtctgatagggaattgttagtttcatatgtattgtttttcttaagtaaatgacagatagggaattgattgtttcatatatattgtatatgttttaacgttttgttttttttctcttcttatccaggatatttgaaatgggagctagaaagaaaaagagaggaagaagacctaagaagaaagatgatgaggtcgaatatgtgtgacgctcaacaagatcttgaggtagaaacatagattcttgctgcgcctgctgttgaattagacaacgaagaagagcatgaaggtgaggtgacacctattgatggtgacaaaggtctgattgatgacgagcctgaaggtgagatatacaattctctgaagatcatggcaatgttgagagaaagagtaagagacagcgagaaccaacatgcataaaagacatcgccaaggatccaaataccatagtagatgtagatttcaatagcctttcagaaccttatggtgaagggtctattaagatggcatcttacattggaacagtggtacgggaaaacgttcctatcacatttgatcgttggacaaaaataattaagagat

SEQ ID NO: 160237 - DNA, 1777 bp, Arabidopsis thaliana landsberg
ttaatcatcacatatctcctttggtaacattttgactatgtgtatgttttcaggctgtggtgaaccatttataggatgctcatgaacagatcgacaaggcgatagcaacagctctgagagagagcaagcctgtgtacattagtatcagctgcaacttagctgcaactcctcatcctacatttgctcgttatcctgtcccttttgacctaactccaaggtaaattaatataactgatcaatcctaatctcttcaagaatcaagctcacaaacgtatggattgtttcttttattaggttgagcaacaagattggtttagaagctgcggtggaagcaacattagagtttctgaacaaggcggtgaagcccgttatggtcggtggtcccaagttgcgtgtggctaaagctacggatgcctttatggagttagctgatgcttcaggctaccctctcgcagtgatgccatctgcaaaaggctttgtaccagaagaccatcctcatttcattggcacttattggggagcagtaagcactcttttctgcaatgagattgtcgaatccgcggatgcttacattttcgcaggtccaatcttcaatgactacagctccgtgggttactctcttctcctcaagaaagaaaaagccatcattgtgcatcctgatcgtgtcgtcgtggctaatggtcctacctttggttgcgttcggatgagcgaattctttagggagttggctaagaggttgaaacgtaacgagacggcttacgagaactacagtagaatctttgtccctgaaggtaagccattgaaatgcaaaccaggagagccattgagaatcaacgcaatgttccaacacattcagaagatgctctctagtgaaaccgctgtgattgctgaaactggcgattcttggttcaattgtcagaaacttaagctgcctaaaggatgtgggtacgtatctagaaaaaggaaactaaatcttttaccttttaacattgttgaagcagtcaatatataggtcatctagtaaagtcaacatctagaaattgctggttaaagagtggtggtatatatgtacttggtaggaaacgatataaaatgccttggtatttagcctgagatgatttatgggcctatatagatagccccagaactttttagtaattctctggaaaagaaaaaacacacaagatttttaaaaagtcgttgttctctatattgtaggtacgagtttcaaatgcagtatggatcaattggttggtctgttggtgcgactctaggatacgctcaagcaacaccggagaagagagtgttgtctttcattggagacggaagtttccaagtgacggctcaggacgtttccacaatgattcgtaacggacagaagaccatcatcttcctgatcaacaacggtggctacaccattgaagttgagattcatgatggtccttacaatgtgatcaagaattggaactacactggtcttgtcgatgctattcataatggtgaaggcaaatgctggaccacaaaggtaattgatgtttacagttggaaattaaacatatgagtccagggttgaagagtaacattatgaatgttgtgtttttggtaggtgagatacgaggaggagttagtggaagcgattaacacggcgacattggaaaagaaagatagtctttgtttcattgaagtgattgttcacaaggatgatacgagcaaagagttgcttgagtggggctctcgcgtctcagctgctaatggtcgtcctcccaatcctcagtag

SEQ ID NO: 160238 - DNA, 995 bp, Arabidopsis thaliana landsberg
atgtggtcgaatttctatgtactggttgatacggctgtgatgttatatgaagaagaaaaacaacgtcgtaagattgtctctgaagaagaagaagaaacacagaagagaatcttttgtctcttcccgagaaaaacaacatcgtctttggtaaagagacaacaaaagcttagtggtttttaacttcagcttcttcatcgcttatcgatcttaaccagttcccttctgattctgagatcgaagacacactaaaccatcatcagttgctatcttcttcatgtttcatcgccgctgatttcgagacactacaaaaccctagttccgaaccttgttcctcactcgtactctttgattgcaagacggctgggtccgagaagacagagacgaaagacccaccaaaccctaatttcccatgtcctctgtctttgtgcctaacggagaacaaaaaccgcaagagacgtgctgtggaacagaggaagcgtactggtggagtcaagaaagcaaaggttgctcctttttcacaaacggcgagagagacgcctaagtggcttgtcaaggtgatgagagacatgaaagaagccaaagatgctaaactgatctttgagaagactctgtttgtgactgatataaacccaacacagaaccgtctctcaatgccgttcaacaacttactccaaaacgatttcttgacgtctgtggagtccagaatcataaaggaagacatcatcaacaataagaagattggagtgggagcgattctcgtggatcaacggtctgtaaagtggggtgtgatgttgaaaagatgggagctgaagaaggaatcaggaaaaggaagctggaactacaatctgatttgtgggtggaacgatgtcgttgaggctaacggattgaaagaaggcgacaacattagtgtttggtcgttcaggtgtcgtggagtcctttgctttgccatggaacagagtagctcttctcttgctctctgtctctgctaagtatct

SEQ ID NO: 160239 - DNA, 1172 bp, Arabidopsis thaliana landsberg
  unsure (1)..(1172): unsure at all n locations
ataaactataaaaagcacttctatttgtgtctgctctttggttcggttcaaagcagaagtacaaaaccaaattctaaaatttcattgaatgccttcgctatcggacaagttcgaagaatccaatcaccgattccatctccattgccgataacaccaccaccttcttgtcttcttacttgtcctacacgaaaaacaagaggtactcgagccctaacttcaaaaaattactagccatcgtagcggcgaaacatgtatctcatgttcaggcaacagtggtctgcgcaaagaccaatggtatacaactgcgtatccgaagcggcggtcatgacctcgaaggcctttcttacaggtcgtctgtgccatttgtcattctcgatatgttcaatctcagatctattactgttaacgtattgagcaagaaagcatgggttcaagctggtgcaaccttgggagagctatacgtaaagatcaatgaggcaagccaaacgctagcatttccagctggcgtttgccctactgtaggagtaggagggcacataagcggtggagggtatggaaatctgatgagaaaattcggaatcacagtggatcatgcattgaccccccaattaatggttgtaaagggcagctttttgattcagcctgccatggaaaaaaattttttttggccaattcggggggggggttaaggttttggagttattttattttgaaaaatcaacctcgtcgatgttccaaagatcgtgacagtgtttaaggttaacaaaacactggaacaaggaggcactgatgttctctacaagtggcagcttgtcgctagcaaattccctgaaagtcttttcgtgagagcaatgcctcaggtagcaaatggaacaaaacgcggggagagaaccatcactgttgtattctatgctcagttcttgggnnnnnnnnnnnnnnnnnnnnnnnnnnnnnnnnnnnnnnnnnnnnnnnnnnnnnnaaaacatgaagattgtcaagaaatgagctggcttaactcaacgttgttttgggcagattatccagccggtaccccgacgagcattcttctagatagaccgtcgagtccaggagattttttcaaaagtaaatcagattatgtcaaaaaaccaatccccaaagaaggattggagaagctttggaagacaatgttg

SEQ ID NO: 160240 - DNA, 1297 bp, Arabidopsis thaliana landsberg
aaaataaatttgtatttaaccactctttaaattcatgctctggatctggtgcactcgcatagagaaaaaacggcgtatcctgagagagatctcattgttgatcctagaagcggtttctgcaaatcaaactctacattctatagcaagcgaaacccattatgtctcccgccaaatccgtcgcttgacgtcacaactttcatatcatctcaaccgcaacgcggcaccaccgccttcatcgacgcctccacgggccaccgcttaaccttctccgatctctggagagtcgttgatcgcgtcgctgactgtctatatcatgaagtcggaatacgaagaggcgacgtcgtcctcatcctctctccaaattcaatctacattcccgtcgttcgcctctccgtcatgtctctcggcgccgtcgtcaccaccgccaacactctcaacacctccggcgaaatctccaaacagatcgcccaaagtaatccaactctcgtcttcaccacgagccagctggcacccaaactcgcagccgcaatctccgtcgtcctcaccgacgaagaagacgagaagcgagtggagctcactagtggagtcagagtcgttgggattttgagcgagatgatgaagaaagaaacgagtggtcaacgagtcagagaccgagtcaaccaggacgacacggcgatgatgctttactcgtcgggaaccacagggacgagcaaaggagtgatctcgtctcaccggaatttaacagcttacgttgcgaaatacatcgacgataaatggaaacgagacgagatattcgtatgtaccgtgccgatgttccactccttcgggttattggcgttcgcaatgggctccgtagcatcgggttcaacggtggtgattctccggagattcgggctcgacgatatgatgcaagcggtggagaagtacaaagccacgattctgagtttggctccaccggttttggtagctatgattaacggtgcagatcagctcaaggccaagtacgattggacctccctgagaaaggttaggtgtggtggagcaccgttaagcaaggaggtcacggatagcttcctagagaagtatccaacggttgatatttttcaaggatatgcgttgagtgaatcgcacggttcaggagcttcgacggaatctgtggaggagagtctgaaatacggtgcggttgggttgttgccgtaaaatgtggaggtgaggatcgtggatccgaatactggtcggttcatgggaattaaccaaacgggagagctctggctcaagggcccttctatttctaaag

SEQ ID NO: 160241 - DNA, 1671 bp, Arabidopsis thaliana landsberg
aaataaattttttcttttttgtacttactgaatttggcacgaaaaattcgtaccaaacgcatattgtcgcctataaacaatattcaatctaatatatttgtttgaaagaaaaaaaatgcgtagcggagggaataagtatttagcgagtctcttgcgttgttatagagatgaaaggtgtaaactttctgggaaagttatacatgggttcattgttaggatgggaatgaagagtgatacttatctatgtaatcgtttacttgatttgtatattgagtgtggggatggggattatgcacgtaaggtgtttgatgaaatgtctgagagaaatgttgtttcttggacgagtatgatttgtggttacgcgaggcgggattttgctaaagacgctgttgatttgttttttcggatggtgagagatgaagaggtgactcctaattcggttacaatggtgtgtgtgatatcggcttgtgctaagctagaggatcttgagacgggcgagaaggtttatgcttttatccgtaattctggtattgaagttaatgatcttatggttagtgcactggttgatatgtacatgaaatgcaatgccattgatgtagcaaaacggctttttgatgaatatggtgctagtaatttggatttgtgcaattcaatggcatcaaattatgtacggcaagggttaacgagggaggctttaggtgtttttaatctgatgatggactctggtgttagacctgataggatttcgatgttgagtgcgatttcatcttgttcacaattgagaaatatcttgtggggaaagagctgtcatgggtatgtattgaggaatggatttgagagttgggataatatatgcaatgcgttgattgatatgtacatgaaatgtcataggcaagatactgcgtttaggatctttgatcggatgtcgaacaagacagtggtgacgtggaactcgattgttgctggctatgtagagaatggtgaggtggatgcagcctgggaaacatttgaaaccatgcctgagaaaaacattgtttcttggaatacgattatcagcggtctggtgcaaggaagtttgtttgaggaagcgattgaagttttctgttctatgcaaagccaagagggtgtcaatgcggatggtgtgacaatgatgagtattgcatctgcttgtgggcacttgggaactcttgatctagctaaatggatatattactacattgagaagaacggaattcagcttgatgtcagacttggtacaaccttagtagatatgttttctaggtgtggggatcctgaaagtgctatgtcaatttttaatagtttgacaaacagagatgtctcagcttggacagcggctataggagcaatggctatggcaggaaacgctgagcgagcaattgagcttttcgatgatatgattgaacaagggttgaaaccagatggggttgcgtttgttggagcactgacagcttgcagccatggtggattggtccaacagggtaaggaaattttctattcgatgttgaaacttcatggagtttctccagaagatgtgcactatggatgtatggttgatctgcttggtcgagcaggattgttagaggaagctgtgcaactcattgaggacatgcctatggagccaaacgggggatcctctagagtcgacctgca

SEQ ID NO: 160242 - DNA, 1402 bp, Arabidopsis thaliana landsberg
aggttatgcacacttaccccctgctgagtttcttgttccgccacgcaaaccttttttgtttttaaaccgagatctctcgcagtaggttttgaaacacatgcatattggcttcacagcatctgcgggatccattagagctctccattatatggtgctggtgtacacatatcctgaagcagtctaccaaccgttagagttcggcagagtccccacccttcctccatatccgaagaaaccgtctgacaggttaaggacgattttgacgttctgcttaacgctagccttgttcgctgtgtttgtcgcctcgggaatcggtttcgtcttctatttgaggcataagaaggttaaggaggttcttgaggaatgggagattcaatgtggacctcataggttttcttataaggagcttttcaatgccacaaagggtttcaaagagaaacaacttcttgggaaaggaggctttggtcaagtctacaaaggaatgcttccgggttccgatgcagagatcgctgtaaaacggacttctcatgattcaagacaagggatgagcgagtttctagccgagatatcgaccattggtcgtctcagacatccaaatctagtcaggcttttgggatattgtaagcataaagagaatctctacttagtttatgactttatgcctaatggaagccttgacaggtgtctaacccgtagcaacacgaatgaaaatcaagaacggcttacttgggaacaacgtttcaagatcatcaaagacgttgcaactgctctactacacctgcatcaagaatgggtacaagtcatcgttcatcgagatataaaaccggctaatgttctactcgaccacggcatgaatgcgaggctcggggatttcggattggcgaagctgtatgatcagggatttgatcctcagacatcgagagtagcgggaacattcggttatatcgcaccagagtttctaagaacaggaagagcaactacaagcacagatgttttcgcctttgggttggttatgcttgaagttgtttgtggtagaagattgattgagagacgtgcagcagaaaatgaagaagttcttgtggattggatcttagagctttgggaaaatgagaacattttcgatgcggcagaggaatgtatacgtcaagaacaaaacaggggagagattgagctggttttgaagctaggtgtgttgtgttcacatcaatctgagtcaataagaccggatatgagtgtggttatgcagatattgaatggtgttgtgcagcttccagaaaatctttttgatgtagtaagagatgagatattgaaaggacgtcctgagacatcaatggaaatactacttgatgtgaattcatttgctacattgacgttcacaaattcctttatatcccatgggaga

SEQ ID NO: 160243 - DNA, 859 bp, Arabidopsis thaliana landsberg
ttataaagttcaaaacttttgtttggtttaattgagattttgacttgcttagacgaagtcatgttgcaatgaaatgaataaagttatatcggggttaatggtttgacaggttcgatgttaaggattatatcacaggatttggttgtccacaatggaagaagactcatgaggctgctgagaaaactgctgtggttgtcacgacgctcttgaaaaatggagctacttgtgttggcaagactataatggatgagctgggttttgggtatctctccactcctaccattatgcatatgaaatgacctttcggtagttggtctaaagaaagtttgtgttttgaatgtgattttacaggattattggagaaaacaagcactatggaactcctattaatccattcatgccagataatgttcctggaggatgttccagtggctcagcagtttctgttggggctgaactcgttgacttttcacttggtattgttaatctcttcgttttctcttggtaatgtgtttcttggattacgtttggttctttatgctaatcaaaagatgcttgatttgcagggattgataccgctggtggtgttagagtcccagcagccttttgtggtattcttggttttcgaccatctcaggggactgtttcttcagttggagttttgcccaattctcagagcctagagactgttggtacgttacattcccctcccttttagtgtttttagtgtagtttcaatggtacatgctgctctaggtgtttgccttcctgattattcctctaaatgattccttctgtaggatggtttgcctctgagctatcagtttgtgctagaaaacaaacttcaaaatctagtcag

SEQ ID NO: 160244 - DNA, 2890 bp, Arabidopsis thaliana landsberg
ccttgttatgttagtttgctgtattgttcttctttttacctttgatcagttcctatgaacaaggttcttttttttacgattcaatagcttagtaacttgcttatgtggtttacttcatgcagtaaagaaaaaactgggcacattccattcagagattcaaaactgacacgcatacttcagtcttctttgggaggaaatgcaagaactgccataatttgcactatgagtcctgcgagaatccatgttgaacaatcaagaaacacactgttatttgcaagctgcgcaaaggaggtgacaacaaatgcacaagtcaatgttgtcatgtctgataaagctttagtaaagcacttgcagagggagttggctaaactggaaagtgagttgagaagccctagtcaggcttcaattgtttctgacacaactgcattactgacggagaaagaccttgaggttgaaaaggtagctggatgtactccaatcacccttttgaaatcttagaaaataggtagtaccatgaattcactattatagcaatcatcttccttggtattgcagctacacttaccttttccttgcgtttatcgttttttattgctcccaatccaagtgatctatagtttggaggtttgagttatgatctatcctttttcctacagcttaagaaagaggtattccaactagcacaacaactagagcaagctcgttccgagattaaggatcttcgacgaatggttgaagaagaaaaaaaccaagaaaaagagacgctatcaacagaaacagaagggttaaatgtatgttaattcacttgttaattttactgagcgtggatatatatatccttttactgcttattgattcgcttttgtccaggttctgatggaacatcaataccccaagctgcgggtgcgcaggacatgggactctgagaatacaacaccactgagccctatatcagctcaccgttccagtatatctccacgatcaactgaatatagttatgaagagaatgtctttcagctatcagatttcaggatagattctgcatcaagtagtccgcaacagcttgcgtttgtaactcctttccttaaggttccacttgatgatattcacgtgacagatactgtagaccaatctcatgttcacaaagaggaagctatagaagaacctcatgttcaggaggaacggttttatgaaatggctgaacacactgacggaaattctgaggataactgcagggaagttcggtgcatagaaacagagaagtcagatattagtataggtccagtggaaaatatgccggagagcagtccagacaaatacgaggctgtaactgcagaagaaccagtatctgtgacagagccaaagaacttacaacatccgacagaagaagcagtatgtgtgacagagacaaagaacttacaacatcccacagaagctgaaaacgaagaagaagaagaagaagaaagagtaaaggaagtcagtggtgcttctcctgaaccaaaacaagaaagcaacctcacaaaaaatcctccattgtgtgatttggaatgttcacctgatgagtttgatacaagcatgtctaacctgagtagaatctcaacacctccagcccttatcactccctctcctgaaaagcctttctcttggattatggagagagattcacaacttttcagaggaatgaagctgactagaagtcgaagctgccgaccaagcttattatcgagcccttcctcctcttggttagagaaagatgctgatacaccgccaagctggtacgacaaagaatttatcaaaacagctgagagaaacttgacaatgtgcgacatcaagaaccagagattgttgcaggatgagtttagtgggaggagcatgccaacaacttggttcgagagaagcttgagtgacactcaaacggtggatgctgcttcacatggtgtcagcaacgaaatgtcgccaaatgaatcaccatttcggccatctgatgcttctgtgtttgagctccagacaagtggtagagcttcaataagccaggacagaacagaggagactgctgctcaaaaagacaagcaaatcattcatcgatcggttagttttgctttacttgctttcgataaatcacctaattagtatgtgtgattgatttgacatgtgtgggcagatggaggaaagggaacagaagttcttggcctcgaattcaacgaagagtttcaaggacgcagcaatggacccaatacaagactacttagacacggccttgaattggccagtggagttcaagaggctacagagggagataatagagctatggcacgtgtgtaaagtctcaatggcacacagaagctacttcttccttctgttcagaggagatcagaaagattgcttgtacttggaggtagagctccgtagacttaagtacatcagagaatctttcgcccaaaatagcaacgatggcaacaatatgaccctaatctcctggtaaagtcacattgtatctttttttgttacctcgttaatttttggtttagtaagacactaaagtaatgtaatatatataaaaacaagcagcacgagggcattgacgagggagaggtataagctgagcaagctgatgcagaggaaactgtcgaaagaagagagagagaacttgttcttgagatggggcattgggctcaacacgaatcacagacggctccagctggcgcgtcgtctctggtcggattacaaagacatgggtcatgtccgagagagcgcctccctcgttggtaagctcaatgggttcgtggacatgaagttgacttccacagagatgtttggcgtcaactatgctttcagaccaccacgtcccaagaaatctagtctttggaaacgcagcgttttgtccctctcc

SEQ ID NO: 160245 - DNA, 1038 bp, Arabidopsis thaliana landsberg; identical to SEQ ID NO: 40112

SEQ ID NO: 160246 - DNA, 6521 bp, Arabidopsis thaliana landsberg; identical to SEQ ID NO: 34951
  unsure (1)..(6521): unsure at all n locations

SEQ ID NO: 160247 - DNA, 1197 bp, Arabidopsis thaliana landsberg
cgatctagatgatgccctggtgtgtggcggttgatggggcctgatgaggatgagctagggcaggcgcttaactttgcttgcggaagaagcaatgcaacatgtgcagcgttggctccaggaggagaatgctatgcaccggtgacggttacttggcatgcaagctatgcgtttagctcgtactgggctcagttccggaaccaaagctctcaatgctacttcaatggtttggctcgtgagaccacgaccaaccctggtaagtttctcttaacttgtctcacaagaaaactctacacagacgtgtaaatactctttaatttcaactttttggtgaaattctggaatattcttatgattgtaatttgtaatggttactatcttgttacaggaaatgagcgttgcaagtttcctagcgttacattgtgaggctgcctcgtgactcaggcgtgtggaggaaaggatcaaaagaatcattcgcattaagttgattatatctcttgataattatgattagtttcctttttattccaagtttttactctttgtgtcccattgttgtgcaagatctataataatctatagaaatttgttcctcatcccttctcatttctcatatatctagtagtttattaatgttctgaaggaaattatgagaattttataactaattcaagaacatgttttgcgatcattactatacgagaaatatgaagtttttgattcacatgttcctaaagaacacgaatatgaagaacatatagtagtgctatagtgttcttatttgaacaaagcgattgaacggagttatgagttatcgcattatgaagaaaaaaacagaaccaataaaatcataaaatggagtcatgaccttctatatgaaagcgaaatcgaagaatgagagaaacgactccaagcaaggggtttatgcctccggaagaagaagaagacaatgaaagttttcctaaaactttactttagatccgagaattattaacggttaaagagtcaaatctcacaaaagcaacacttacgggttagttcagtcatcagtggctcggttttacgatttcttcggttcggataacccttaccgaatcaaccaaaccaaaacctatactactaaccagaaccgggactgaagcaaactacacataacatggtcttaaggcaataagccatttacataataaagagggggaa

SEQ ID NO: 160248 - DNA, 1309 bp, Arabidopsis thaliana landsberg
caatcagcttaatgagcatgctaaattgtccatgcttcgaaatgccacttggaccttgtcaaacttctgtcgtggcaagcttcagcctcactttgaccaggtctatttttttcccctccaagcttgtttcgtcaatgtttatgtctagtattcttctaacatatgaagcatgtttaacaggtcaaacctgctcttcccgcccttgaacgactaattcattcagatgatgaagaagtcttgacagatgcctgttgggctctttcttacctctctgatgggaccaatgacaaaatccagactgtcatccaggccggtgttgtcccaaaacttgttgaacttctcctgtcagtaccattttataattcccttatttcatgtccacttcacacatttgttgacaaataacttgataccttgctcttgatttttagccatcattctccatctgtgctaattcctgctcttcgcactgttggaaatatagttactggagatgatatacaaacacagtgtgtgatcgacagtggtgctttaccttgttttctcaacattctaactcacaactataagaaagatattaagaaggatgcttgttggacgatttcaaacatcactgcaggaacacaagaacagatccagatggtaatagaggctaatttgattgatccgttggttcatctgcttcaatatgctgaatttgacattaagaaagaagcagcatgggcaatttacaatgtaacttcaggttgtcatgatcaagtcaagtaccttgtggagcaaggatgcataacaccgttatgcgatcttttgttatgtgcagatccaaaaatcataattatctgccttaaaggattagaaaacattttgaaagtgggagaggcagagaagaacttaggtaatacaggggacatgaactattacacgtacctgattgatgatgcaggagggctagaaaatatgatggaacttcaggaccatgacaacagtgagatctatgaaaaagctgtaaaagttatggagacatattgggtgtagaagaagctgacgagacacatgccgggtttcagctcggtgtgaaccaagctccggctccttctgggggattcaacttcagctgaaggaatggtaatggaagcttgcagcttgagaattgtgaaagttcagagtcagttagaaagtgttcggtttcattgtccatggcttttcttttctttgtaatgactggtacacaccggtcctgagtctactttttgtgttgttttaaaaaatttatattggagtcttggtttcgtgttcataacaatttgtt

SEQ ID NO: 160249 - DNA, 1507 bp, Arabidopsis thaliana landsberg
tttcaacaatgagtaatcagaagaagagaaatttccagattgaagcgtttaagcaacgagtcgtcgttgatccaaaatacgccgataaaacttggaagatccttgaacatgcgattcatgagatttacaatcacaacgctagtggtctcagtttcgaagagctttacaggtacacttccatagatttcactttgattcatctcttgttgttgttgttctgctaaactttggtcgcttatttcagaaacgcatacaacatggttctacataagtatggtgataagctttatactggacttgttaccactatgacatttcatctcaaagagatatgtaagtctattgaagaagctcaaggaggagcatttttagaattgcttaataggaaatggaatgatcataacaaagcgttgcaaatgattagggatattctcatgtatatggatcgtacttacgtttctactactaagaaaactcatgttcatgagcttggacttcatctctggagagataatgttgtgtattcgagtaagattcagactaggctattgaatacgcttcttgatttagttcataaggaacggactggtgaagttatagatagggtgttgatgaggaatgtgattaagatgtttatggatttaggtgaatctgtttatcaagatgattttgagaagccgtttttggaagcttctgctgagttttataaggttgagtcaatggagtttattgagtcttgtgattgtggtgagtatttgaagaaagctgagaagcctttagtggaagaagtcgaaagggttgtgaattatttggatgctaagagcgaagcgaagattactagtgtggttgaaagagagatgattgctaaccatgtgcagagactagttcatatggagaattcaggtttggttaatatgcttttgaatgataagtatgaggatatgggtagaatgtatagtttgttccgtagggttgctaatggtcttgtaactgttagagatgttatgactttgcatcttagggaaatgggaaaacagttggttactgatccagagaaatcaaaggatccggttgaatttgtgcagcgtctattggatgagcgggataagtatgacagaattatcaacatggcatttaacaacgataagacgttccagaatgcactaaattcttcgtttgagtatttcgtcaacttgaacacacgttctcctgagtttatctccctgtttgttgatgataagctacgaaaaggactaaaaggtgtgggagaggaggatgtcgatcttattcttgataaggtgatgatgttgtttcgctacttacaggagaaagacgtttttgagaaatactacaaacagcatctggcgaaaaggcttttatctggaaaaactgtgtcggatgatgcagagaggaatctgatagtgaaactgaagacggaatgtgggtatcaattcactttgaaactttgaggtatgttcactgacatgaagaccctacacgacacgct

SEQ ID NO: 160250 - DNA, 445 bp, Arabidopsis thaliana landsberg
tagttttttccgccacactcttccgccattatttttgttacttggagctagctagctaaaaaatatgggaagcgataccgaagcagagaagtcgattcaaaaggagaagaagaagtacgctattactcttgctcctatcgctaaacctctcgccggcaaaaaactccagaagagaactttcaaactcattcaaaaaggtaccaatctcagttccaagctcgcttcacatctctctatcttctttatttctcattatatattgattagtagctcatgttggtgtattgctctgtaatttttgtcagctgctgggaagaaatgcttgaagagaggagttaaagaagtggttaagagcataagacccggccagaaagggttagttttttcattctttgtctttttattgagtgtgatttatgattgttttgtgttgcacatggcttat

SEQ ID NO: 160251 - DNA, 694 bp, Arabidopsis thaliana landsberg
ggaggaaatctgcgtcgaagcctcctcgaccgccgcgtgttccgtctctagacgcggcggatcagaaacttaggggagggatcgctgaattggcgatgttgaaacgcgcgagaatcgaacgtatgagagctttgaagaaatcaagagcggctaaagctgcgtctgccgcttcttctttaggcaatgtattggccactcttttcaccgctattttcttctttgtcctcgttttccaaggtatgatttgattccacgattgcgtttgcgttttggtgattttaccagttttggttaaatcttatgtgtgtgtgttttattggattttttcaggattgtcaccgagagcagccggtagctccgggaaatctcacttagtagtcgccggcaaagccaatggtggttttgtttcggttcaatatgcgggaaatccgtcggcgagcgaaccggatggaggttataccggaccagttttagcacagagaccaaagtaagttgcttcactatctaatttcactaactggcgtaactgcttatctgaattaatctctaatccggtttgttgtacttacagtttactaaaaccggtgtccggtttggagaatgaaaagaagagttcacagtgaaagcgtaacgaaatggttaagaattggacagttccatactggtttgctcaaaccatttatcggtttagatt

SEQ ID NO: 160252 - DNA, 1206 bp, Arabidopsis thaliana landsberg
ttggtttaccaaatgagcaaggtcctcctccttataagaagcctcatgatttgaagaaagcttggaaagtcggtgttttaactgcggtgatcaagcatatgtcgccggatattgcgaagatccgtaagcttgtgaggcaatcaaaatgcttgcaggataagatgacggcgaaagagagtgctacttggcttgccattattaaccaagaagaggttgtggctcgggagctttatcccgagtcatgccctcctctttcttcttcttcatcattaggaagcgggtcgcttctcattaatgattgtagcgagtatgacgttgaaggtttcgagaaggaacaacatggtttcgatgtggaagagcggaaaccagagatagtgatgatgcatcctctagcaagctttggggttgctaaaatgcaacattttcccataaaggaggaggtcgccaccacggtaaacttatagttcacgagaaagaggaagcagaacaatgatatgaatgttatggtaatggacagatcagcaggttacacttgtgagaatggtcagtgtcctcacagcacaatgaatcttggatttcaagacaggagttcaagggacaaccaccagatggtttgtccatatagagacaatcgtttagcgtatggagcatccaagtttcatatgggtggaatgaaactagtagttcctcagcaaccagtccaaccgatcgacctatcgggcgttggagttcctgaagatggacagaagatgatctcagagctcatgtccatgtacgacagaaatgtccagagcaaccaaacctctatggtcatggaaaatcaaagcgtgtcactgcttcaacccacagtccataaccatcaagaacatctccagttcccaggaaacatggtggaaggaagtttctttgaagacttgaacatcccaaacagagcaaacaacaacaacagcagcaacaatcaaacgttttttcaagggaacaacaacagcaacacatgtgttagagttcgacactgcagatcacaacaactttgaagatgcacatgacaacaacaataacagtagcggcaacatgttccagcttgagttgattccacaccgatcgacatggcgtcattcgattacagagatagatatgtcgatgccaggagtagtaggaacgatggatggaatgcagcagaagcagcaagatgtatccatatggttc

SEQ ID NO: 160253 - DNA, 863 bp, Arabidopsis thaliana landsberg; identical to SEQ ID NO: 30380

SEQ ID NO: 160254 - DNA, 1066 bp, Arabidopsis thaliana landsberg; identical to SEQ ID NO: 9599

SEQ ID NO: 160255 - DNA, 651 bp, Arabidopsis thaliana landsberg
cagggtacatcatagaagatctaggttccggtgtcaaccaatgggccattaaaaaatacggtgaagagtcaacacctgtagtaggaacccaaatcgaagcatttaagggtcaccacaagtggccttggacaatcaccagacggcaatttgccaacaatactacacgctctggctcaagtcataaccttcacagttcttccactagaccttgcatttaacgaccctgtgtttcatggctttgtgtgcacatttgcgttttgcataatgtttagcaagcaattccatgcttgggcacatgaaaccaatatcaagcttccacctctcgtggtggcgttgtaggacctggggttgcttgtttcatggagacatcacgcggaacatcatcgagcaccatataacaacaattagtgcatcgtgagtgggcatggaacaatggtttcgatgagagcaatgtctctgaggcattggagatggtgttttatatttcgagcttggggtgagacctcagtcatggcgtgaaccaaacaacagaagaaacagagatctatctccaagaaaccaagcataattatctttttaacaaggtggtctctgaaacaaacaattcttgatacatatgcactagaatttaagtaatatactaaacaaatt

SEQ ID NO: 160256 - DNA, 2208 bp, Arabidopsis thaliana landsberg
tctaactagattttaacccgcggtataccgcggggacgatttatttttaaaagtaatatatattaaaacttgcaaattttatctatctataaaatatttatattttataatttataattgttatttaataacgtcatgccaaactcttcatgtcaaacccgtctcgtaaaaaaaacatttattttattaatgttgatcttatttatgatatgtttacgactcattgtctaaatattttagtcgatgcgggacgttgaacccacacatttttcgcaaattggttaatatatgttcatttttaaaatttcgaatcacaaaatataacggaaaaaaaattgaaaattttttaaactctatatattatataatgatgttaaaaaattgtgatatattaaaatttttataagtttaaatattgataatgttttattaagtttaaatatataaataattatatttaaaaaattaatattttttacctttaaggtattgacataataaatctaaaagtaaggatttagaagatttagatttttaatttaatattttcattcctaaataattaatgtcagtgtcatgacattgtaaataagttcaaatacatgatttatttatttaaacaaaaaacgtttagtaagaataatatttgttttaacaaaaaattttgttttaaaatattgttgacaaatatgtttatgctaattttaagggattgatttgaagtttgtttggattaaatttgattgataatgtggttaacaatttaaagtaaaattaattattttggagaaagatttaatgctaatgacattgagttgtaaataagtccaaatccaggatttatttgttaaaatggcttcaaaaatgtatatatagatacctgcaaaatctccatcgctcctgttaacagtttcttctcttggtgggattttatttaaatcaaacaaaaattcatctccatcatcactataaacagtttcttctggaatttcatttaaatcaaaaaaaattcattctcttcacttagaagtgacatactcaaataagaatttggaattgtgaagaaaattagaaatcatttttttaaaaaactcacataaacatgtatgattcaagaaagttttagtttggctccgatgtaaaaattttgaaattgtttgtttaaaattacttctgttatggttgcacacaaaaaaaaatttaattatgtaaaaagttgctccattttttcaagtaatttgggttgtttgagagtttaattattactctttaattgttttaattgctttaattactttacttgattgtttttattaaataatggttttgttaattactgtgctaagcctcaaaacatcccatattgaaacggagggagtagtaatttatatatccatatattgacttggcaactgctttaaggagaactctatggatgtttaatgactcgtttgttgccttacaaaggtggagattttttgggaccggattttctcacttttattgatctatgcgtccaagtccgaggtatacctctaccttatctttctgaattaactgtgagcttcatagctggaacgttggggcctattcttgagatggaatttaatcaagatacttcaacttatgttgcctttatccgtgttaagatcagacttgtattcatagaccgtcttcggtttttttggagagttcgttttgaatctagagaaggttctaagattgagtttgaatatgagaagctttgaaggatatgtactaagtgttgtcttatcactcatcaagtcaacaactgtcctttttaaatgcacctgtgattcatgatgatgaggcagaggtacttgatgtacctgtttaggaggaagctgctgcttctaatactatcactgatcaaactcatatgactagctcaaacagttcagacatatccccggcatcaccaatatcacagcctcctcttccggcatctttaccttctcatgactcttactttgatgcgggaattcaggcttccagacttgttaatccaagagctatatctcagcatcacttttctagctcttctttctgacttcaagggcaaaggaaaagcgaaaatggagattggtgaatgctctaaacgtaaaaaccatccagcaaggttgttgatgatgcacttcaaaacaataggcaatgtcgcaaggatcaggggattaggttttatcctgt

SEQ ID NO: 160257 - DNA, 532 bp, Arabidopsis thaliana landsberg
  unsure (1)..(532): unsure at all n locations
gctgaagggatagcagcttaggcgcatgttagctgaaaacagtgagaggcactatcgtgagcttatgataacaacggaagaatcagtaaggcggagattaagagagaaagaaacggagatcgagaaagccacacgtcgtcatgtcgagctagaagcacgtgcgactcagatcgaaacagaggcacgtgcttggcaaatgagagcagcggccagagaagccgaagcgacgtcgttacaagctcaattacaacaagccgtagtagtagctcacggcggcggagttattatgatggcggagcaaaaatcgggaagcgtagacggtgtggatgaagctgaagacgctgaatcggcttacgtggatcctgatcgggtcgaaatgatcggaccgggatgtagaatttgccggcggcgatcggcgacggtgttggctttgccgtgtcgtcatttggttatgtgtaaagaatgtgacggctccnnnnnnnnnnnnnnnnnntgccttaacacgaagaattcaagcgtggaggttttctat

SEQ ID NO: 160258 - DNA, 1956 bp, Arabidopsis thaliana landsberg
gagcttatgacaaaacctgtttttgttctttttgttgttttgattttttggattctggatatacttaaatgttgtggtgttatgggtttgcttgcaggtgagattactgcagagaaacataagcaagctgaaaatctttttgtgacatttcattgctactgcagtcgaaaagaggtaatatctcttgtcctcgcttgctttgtttctaaagtgaatctatgttatagcatagcttttggtaattgaatgcattgttctttactctctgttgctagatacaatgccttgatgtcacgcttgaggatgacaacattgtcaagtcccttgcggaatatgtttcctctggtgtgattgagaatttgattcttggtgctccttcgaggcatggattcatgaggtagtaatatgaatctcttctctcctataagtttgaatcctcttccttgttttatccttatgtgtttctttgattcaatctgttgacaggaaatttaagatttctgatacaccgagcaatgtagcgaaagcagcacctgatttctgtacagtttacgttatttcaaaagggaagatatcatctgtccgccatgcctcacgagctgctccatatcggtctccgcttatgggtcagattgaaaaccactctgaaatcataaactacgaaaagttcagaaacaccatgagctttagaggtaaaatcattaactagtttttttaggctaaaccatgtgacaccacacacatcttgaatttttttctttcgttggtacaaacagatagggctcctcccaggtcttcgactgctagctccattgaagattatggaaagtaatgtttcatgaggatatttttcgtctttgacaaaaaactgattcgttttgaaggaagatacttatcgctctttctttcgcggtaatatcgtcaacaggtcacctatggcaaggacgtcaaattacgcaaactcattctttgatttggaagattccgaaaacgacatatcatttgtttgctcaggcaggccaagtaccgcaagctcaggccggccaagtacaagtaccggaaggtctgacatatcttttgtgagctcaggcaggccgagtacaagcaccactggaagcccttccttcatctacgattttcctgattctggtttaactccgagagagtcgacgagctctggacactctatgcgtctaggaatcaggttcaatgacacaaatatccaacatgatttctcattcgtctcacaagatagcggtcggtcatcttgttcttgttcaccacaaaacttggtaagatgcgtttgattggttatagatagcaatacatatgttttcgggaatggtttactatatatttttcttgaaaaatgtataggaagaagtggaagctgagatgcggagattgaagcaggaactgaaacacgcaattgacatgtatggatcagcttgcagagaagcactagctgcaaagcaagaggtaaaacgatataagacgaaaccgtccctgtgtatatatattcttgtacagtgctgactgaaagaaattttacttatggatcaaaggcgaaggagctccaacgtcagaaaattgaagaggaagggtgggtgcaagaaggacagttatcagagaaatctacaaagtccatagtggaaaaagagagagcacataaagctgccaaggatgcttctgaaacagcaggcaagatagcagagctcgaaacacaaagaagagctatagaagctgcaggttctttctctgattccagtttaaggtatcgaaggtatgtcattggtgagattgaagaagccacaaactcattcgacaaggctaataaaataggcgaaggcgggtatggtcctgtctataagggttatcttgatcatacccctgttgctattaaggctttgaaagcagatgcagttcaaggaagatctcaatttcaaagagaggtaa

SEQ ID NO: 160259 - DNA, 1411 bp, Arabidopsis thaliana landsberg
atgtacaaacttccacaaagaaattgtgcagacaaacaggagtacactgtacacatgagaaagatgggtatggttatatttgcttgcttgctcttgctgattatatttccaacttttggctatgcagatataaacacatcaagtcctttgtcaataggacaaactctgagttcccctgatggagtttatgagctaggcttcttcagtcctaataattctcggaaacagtatgttgggatctggttcaagaacatcgctcctcaagtggttgtctgggtggctaacagagataagccagtcacaaaaactgcggcgaatctaactattagcagcaatgggagtctgatcttgcttgatggtacgcaagatgttatttggtcaacaggagaggctttcacatccaacaagtgtcatgctgagcttttagacaccggaaatcttgttgtaattgatgatgtttccggaaaaactttatggaaaagcttcgagaatcttggtaatactatgctgcctcagtcttctgtgatgtatgatattccccgtggaaagaatcgtgtgttgacctcatggagaagtaacagcgatccatcgcctggggaattcacactggagtttacgccacaagtccccccacaaggccttataagaagaggctcatcgccctactggagaagtggtccatgggcaaaaacaagattctctggtatacctggaattgatgcatcatatgtaagtccattcactgttctccaagatgtagcaaagggcacagcatccttttcttattccatgttaagaaactataaactgtcgtatgtaacgctaacatcagaggggaaaatgaagatcctctggaatgatggaaaaagttggaagcttcactttgaggctccaacaagctcatgtgatctatatcgtgcttgtggtcctttcggtttgtgtgtgagatccagaaatccaaaagtgcatatgcttgaaagggtttgtaccaaagtcagatgacgagtggaaaaaagggaattggacaagtgggtgtgtgagacgtacacaattatcttgccatacgaattcttctacaaaaacacaaggcaaagaaacagacagcttctaccatatgacccgtgttaagactccagatctgtaccaacttgcaggcttcctcaatgcagaacagtgctaccaagattgcctaggcaactgttcctgcacagcttttgcttatattagtggaattggatgcttggtatggaaccgggagctggtagacacagttcaatttttatctgatggggaactctctccttcggcttgcaagttcagaattgggtaggaatgaaaggccattattacatttgaagttcagcttctttatatgatgttttttcctctgcagcatggttttaagttttgt

SEQ ID NO: 160260 - DNA, 3687 bp, Arabidopsis thaliana landsberg
gtgaattggatttgaggtcaaatccttttcaagtgggagaggatgatgtgatcatggaaagcacaaagaacatggaatttgatcaagcgcttgtagccgcggaagagcttgaagcagaggagcagcttgaacctgaggagcattttgaagcagaaaataaacttataacggagaaagagtatgggaaagatgttatcttaacctcattggttttgatacatgatcatcaaatgggcatgtgtctcatttgtactctttttcccttgtcaagttttgtcccaatgggttttcttgacaaggtttttaatgaggcaaatgattcacattcaaatcacccatttgatgatctaaaccatggtataacattcagaacttggactcaaggaatatatatcaagtctaagtcattttatgtctattacaagcccaagaagagcccaaaccaagtgggtaatttgatggtcaagaggagtgacgaaaatagaagttcaagggtcatttttaagccaaagggtcttttctattcaaattctatctttaattattatgttgtgtttctaggcaaccttggagtatattccaagatttgtctctttctcttctcttcttcttctctttataaactcatgtaatctcttatgagaacctatctatctttttatcaaaaactctctcttaaaaatagatcatggatccattttcgtatgtcgaattttgatctttctcgacttatcaaaaggcttttccgcatccttttgtggcgtcattcaatccatcatctcgtctttgagtcgtgtgtcgtctctatttcgagaatatccactccagatcttccaagtgccgaaattgggattgattcctcaccaggatcatatcatgtggtatcagagcacacttggaggttgagtcgtttctgtctgtcatcttgttttaattttcatatttactagatgagtacccgcactacatgcgggtttatgtattactatttacaaattattttatataatgtatgttcatataaagtagagttgaatgcatcgattttgaaacataaatatgatttgtaattgtttttgaaactatattagttcatatgaaaaacgaatgtgcttgagttgttttttattgttgttctagattttcatttaatttatatattcttgtttttttggttatatgtttagattgtgagacggtgaaattttatacaatttatttcttacactaaatatataacatgtctttattaaccatgtatatgcatattcaatctaatcatattcaatttgatgttcttggaaagtttagtaagttcttgtcataatcttatatcttacgtattagttataaggataactcctcaaacatctttcaaattacttgttttcttagtataaatctcgaaaagcttagatatatttaatctgcatatttatttagtttcttacataataatcgtctaattttcaggaaaagaatatgtatagcatgtttggattttatgatcactttagccacttaagtggatctcaaaattaaagagaagtcagttttggtttggtttgttaaaattgtagaaagagtgatggttcaagttacttatgatatccgtagttgttatattgaattaattactaattatgtattgcttattttatgaaatctaggtggcaagctgttagatgctgacgtgtcaagttgtgggagagagttaggattctttaatatatatgactagatattgacccgcggtacaccgcgggagaatatgttattgaaaagttatacatatttttttataagaatattatttgtatatgaataatatattcttgacacataatttttatctatgtaaagtttgggtaatttatgttttcttgttctgatgtatattagtttaaaattagggtgaattaactaaataactaaaatctggaaagaaattaaataagtagcaccataagttgtagaatgcagagagtcacgcatctgtggtgtgaagttacaacacaatccctaacacaacgttgtgtgattgcttagacgtgcgtgaggggaaaaggaagatgaattctttcagctgacgtgggcgctggtaaagctagtaaaaaaaatttcatagcaccgctttacaattgtccgatcactaacatagcctgcagtgtataagattaatttgaataaaatactccccccaaaaatatgagaggagaatatgctctgcttttctattattgacagttaatgttgtaccttttacgcaaagatctcaaactgtaaacataacaatatggatggtggtgcaaaatagttcagcagttaataaggagaatccaacggaaaaggtacaaaaccatcgctttccagtttctgtttttactttctgcagattccttttaatattcaaccctttcaaagtcaaacaacgtactttcccttttcgaatcaaatactttccgtgatcttagatctgataaaacaagttggtaatattttcttagaatcgaacatgagtaaccatttctgaatatttgagaattattacttaccatagttaaagactaaacttactactatatgaacgatcaggatatttggctaggtttatatttactcgttctttcttttatctgtaaactaattacctcttcacatactcaatgtagacggcatcacaagatgaggtcttgctggtaattggcgagtgggtgagagttgataatatggcctggcagtttgaacctaagactttggaaggatcgtcttacatacgcctccggaccaacatgacttacaaggagctagttcagaaggttaaagagaagctttctttctgtgcaagagacatcactataaaattggcttaccaatatccagagtggatggcaatcgatgaaggcaacaggtctcctcctcaatgcatcaatgaagacggtgatgtgacaatgttcactcaaatgagacgtcacatagaagaggttaatctctgtgttactgtagtccaacatactattccaatttctcctgttgatgtagcatgcaaggacttcaattcagaggacagtgaggagacatattatgactctgaggaagaactgcaccaatttgcccttgatagtgccttggtgggtgcaacgcaagacccaacgccttgtgagacagagcaagagccaagaagtagtaccaggcgggaactttttcccgcaggaggcatcagtattagagagcctgaagactacatccggcttaaaagccttgaatgtggacctactaacaaagggaaaggaatcatggacaaaaatgataagtcagcgaaggttggtcctagtagagcaagtgggacagaagacaacgacaatgaagaggattttctcatcgtcccattcaccaggcaacctaatctgaccgcattccagaaaatgatgatttagaagaagttgattcatatagggcagatgttggcaggcctcctggcaatcatgtttctcctattacaaatgatgtggaagaaactgaaattcaaaggcagaacattttgttttgggggcgggcacaagaagctttaaacacaatcctctctgattttagtgatgattctaatctattcggtcgagacgccccaccggtctttaatgatggaaaaggtgaaggtataacttgtaatccggctatacatatata

SEQ ID NO: 160261 - DNA, 1080 bp, Arabidopsis thaliana landsberg; identical to SEQ ID NO: 9135

SEQ ID NO: 160262 - DNA, 649 bp, Arabidopsis thaliana landsberg
attgcttgcactgcgttgtctgcaggcgttttatattaaaaaagatagcggattttttcaggggcatgggcttgatctctgttttagagcctggcaggactccaaagacggataaatcagctatactcgacgatgcaatccgggttgtgaatcagcttagaggtgaagctcatgagcttcaagaaaccaaccaaaagcttctagaagagatcaagagtctaaaggttggtttctcactttgtcataaagctcaaggtcataaaactttctcataaagttatgagaacctaatttaagtagtagtctgtgtatcttcttcttgaaaatgtttctagctcataatcattatgtttggtacttatctgatttctcatctaactgtctgtaataggcggataaaaacgagctacgagaggaaaagctggtgttgaaggcggagaaggagaagatggagcaacagttaaaatctatggtggttccatcaccaggtttcatgccctcccagcatccagcagctttccattcccataagatggcggtggcttacccttacggctactatcctccaaacatgccaatgtggtcacccttacctcctgctgaccgtgatacgtctcgtgatctcaaaaatcttcctcctgttgcttaa

SEQ ID NO: 160263 - DNA, 731 bp, Arabidopsis thaliana landsberg; identical to SEQ ID NO: 24242

SEQ ID NO: 160264 - DNA, 2181 bp, Arabidopsis thaliana landsberg
gattgcatttactggaagtttcgccacaggaagtaaggtcatgacagccgctgctcagttggtgaaggtaattccaatttttgaactttctgctgtatattccttctcctccttttgtttcatcaccaatgtcaatgacacattactcatggcattgttgcagcctgtttctatggaacttggtgggaagagccctctcattgtgtttgatgacgttgatcttgataaaggtgaatgtcacaaaaagtagtttagtggatttggagtttttttataataacttcttcttgtgctatattcaagatagtactaatgcttttgttgctttgagacgagtagacatgacttaaatttgcttaatcttaaaattaaactctttgtatgttttgacgccggcaaatgatagctgctgaatgggctcttttcggttgcttctggacaaatggtcaaatctgcagtgcaacttcccgccttcttgttcacgtaagtcccaatcttctacttgctttaaggttttacctgatcttcccaatatgacatgcgaatatttattactggagaagtgaatgttccaagtcatacgggaagatgtttccattaaggtcaatgacaatgacatttatttcagatcaaaccttctggtggatatgccaacagggatacaattgctgactctcttgtctaaatttttttattttatatcttaggaaagcatcgcatctgagttcatagagaagcttgtaaaatggagcaagaacattaaaatttcagaccccatggaagaaggatgcaggcttggtcctgtagttagcaaaggacaggtaaaatcccagtgatcgttttttctgtcttcatattatttgtcaatttcccatcaggttgcaatacaacaaccaggactaaaaaggaaaagagaattgagttctgtagtatagtgattaacttttgtccctctaattctgaaccgtttagcttttagagcatcaatcaaatcacatctagcatatgatatttcatcacgcttatcatgttcttacttggtaggtgtgcttttcttctatgatcatataatctgattgagctgacaaatgtaaatattacagtacgagaagatattgaagtttatctcaacggccaagagtgaaggagcaacgatcttgcatggtggttcccgacctgaggtattacatctccctcccttacctatccttgatgcagtttcttccagactatgatgatgaccttttatatcatatctatatttcacagcatctggaaaagggcttcttcattgaaccaaccatcataactgatgtaaccacttcaatggaaatatggagagaagaagtctttggtcctgttctttgcgtgaaaacattctccagtgaggacgaggcaattgagctagcaaatgactctcagtaagtgtagatttctcttcttatcttgaagtagaactcctctgatgacgtgttagatcatatgcctgactttatttgtatttgcagatatggattagcaggcgcagtattatcaaatgatctggagcggtgtgatcgtgttaataaggtgtgtatctaacttttactatcaacaataacaatcaataacctcatgattgaacttaatctctaaagttttatgaatcgtaatcattgtgtgttgcaggctttccaagcgggaatagtgtgggtcaactgctctcagccatgcttctgccaagctccatggggtggaaccaaacgcattggatttggccgtgaattgggagaatggttagtctctttcgttagctataagtattaagattatcaaaccattagaaaaagacactctccaactagatggaattgtgtccatagtaacttaaaccgtaatagattaccaacaaaatttgaattgaaacatattttcttcgtcgcaggggacttgagaactacttgagtgtgaagcaggtgactcagtatatctctgatgaaccatggggatggtacaaacctccttccaagctctgagacaaacactagttcctgatatttccttaaaacatgtactcatgagaatataccaataaagcaagagacccttctgtaagagaaatggtattgctacaataaattcttgaaaaaaatgaaaaataagatgagatgatatttctttttgtttttctcaaaacaacat

SEQ ID NO: 160265 - DNA, 1337 bp, Arabidopsis thaliana landsberg
gaaaaacctctgtttcttcctcttcttcttcagggtcggtgttaggtgaagaagctctgtttcttcctcttcttcttcgttttgtgcttgaactaagaaaatttgggagaacaatgtcgtcttcttcttcatttgaacaacctcaagtcataacctgcaaaggtaaaaaaagggtcttttttgttttgtttttgtccttgttgatgaaagattaggttttttgattgagaaattctgtagcggcggtggcatggcgtgctggtgagccattggttatggaggaagttgaagtgagtccacctcaaccacttgagatcagaatcaaagttgtatgtacatctctctgtcgtagtgatctttctgcttgggaatctcaggtttgtagtttctcttctttactatataacctgttcatgaatttggctttataagtgtgtgtctctgatgaagtctccatttcctggtacagtctcttttgcctcgaatatttggccatgaagctgcagggtaagctacttctgttcataacctcatttctagattatgtagaatgtggtgtgaaactgagtgttctgttgtcattcttagcgtgaatgtagcaccattgttgcagttttagcataggactattataactagatttgccagctcaagaacagacctttcgtcggctagttgagaggtaaagctttaaaggagagcgaggagaatgcgttgcattctgaatttgtctagggtcttggtgtaggcattggtcgagagttagcgactttgctcatttttcaagtgtcttatatggtctacttctttgtgaattgagtgaaagaaagagtttactggtttgaatcctatcattgtgtccatgtacgtttctgcagtatagtggagagcattggagaaggtgtaactgagtttgaaaaaggagatcatgtgcttgctgtattcactggagaatgtgggtcatgtcggcattgcatatctgggaaaagtaacatgtgtcaggttcttggaatggagaggaaaggtttgatgcatagtgatcagaagacacgcttctccatcaaaggcaaacctgtttaccattactgtgcggtttcaagtttcagcgagtacactgtggttcactctggctgtgctgtcaaagtcgatccactggcacctctgcataaaatttgtcttctaagctgtggagtagctgcaggtagttaaaaaataatgtttttaaagtgatgaaatgccaacaattatctatagtcagtactgagaatcttgggtgtaaatttaggtcttggtgcagcatggaatgttgctgatgtacaaaaaggttcaagtgttgt

SEQ ID NO: 160266 - DNA, 1749 bp, Arabidopsis thaliana landsberg
acggaccagaaatacaagaggaatgcttgttggagtttacttggggatgtaaggcctgataagccatctgagaatctgaactctgtttttgaagtttatgatttgattagaacagctttctttgatagtgaaagcaatgcacagacccatagccacaatgaagattcaagagatgagattgatagtaaagaagaatatgagtttaggaaaaactagaagatgctgaaactccactatattctggctgtctcaacttcaccaaggtgtctgcgcttatggggctttacagaattaaagttaagagtgggatgtcggagaattattttgatcagttattgacaatagtggcttccatgcttccaacggataatgttctcccgaggtcaacaaatgagatgaagagtatcttgaagatgtttggttttggatatgatacgattcatgcttgtaagaatgactgcattctttaccggaaggaatacaaggacatggaaagctgtccacggtgtagtgtttcaagatgggaaagggataaacatagtggtgaggaaaagaaagggatcccagctaaagtacttagatactttccaatcaaagacagatttaggcggatgtttagatccaaaaggatagctgaagaggtgcgttggcattcagacaattctagttcagatggaacaatgcgtcatccggttgactcaataacttgggccactgtgaataacaaatggccagagttctcctctgatccaagaaacctccgcctcagactttcaacagatggaatgaagtcattctcgatcgagaataccaagtatagcacatcgccagttctattggtcaactacaacatggagccaacaaagtgtatgaagtcagagaatataatgttgactttattgattccggggccaactgcaccaagcaacaatattgacgtctatctagcacctttgatagatgatcttaatgatctgtggaatgaaggtattatcgtttatgactcatttctaaaagagaattttacactgaaggcaatgttgctgtggagtatcactgattatctagctttggggacattagctgggtgtaaagtgaaagggaaacaagcgtgtgttgtgtatggaaaagatacaccttttatgttataacagatgtgagcaagataacaaaaacgtaaagaacactacacagatttaacgtggttcaccaacacttgttgttggcatacatccacgggcaaagagacagattttattactggagaatacagaattcagaatacaaggaggctaggttaagaagagtacttatacaaaagaaaccctaattaaccctaaactgattgggcctaaagtcatgggcccaatctattcaagtcatatctaacaaatctccaccttgacttgaatcctccaaacagatgtacctgacacactgctcacagtgttgtaccagacttcctcatcagacagatgtaccagacagatgtaccagacttcctcatcagacagatgtaccagattcagctaccaaactgttgtacctgatggattaacacaataccagaagtaccaaccaaatgtagaagacagacgtaccagaattctcctttgcctcagatgtcccatcagggaaccagatgctcaacaagccaactgcttcatcaagacagatgcttcgctgagcgagatgcttcttcagaagtttgatgttttgtcgagcaagactgctccaccaggggcctga

SEQ ID NO: 160267 - DNA, 1264 bp, Arabidopsis thaliana landsberg
ttctaggttttgcatcctaagaacccttttgctccgactctgcatttcaattaccgctatttcgagaccgatgctccaaagggtaagaccttaatcctctttgagaagtgtaaagttccaattttttggttggatgaagcatttgatttcatcacttgtagatgttcctggagctccgaggcaatggtggttcggtggtgggactgacttcacacctgcttacatctttgaagaagacgtcaagcactttcattcggtcgttaaacctgatccattgttctgaaagtttgaagctttgtgattatggagatgctgattgaaatacctttctttgtgtaggtttaaaagcaagcctgcgataaattggatccgtcgttctacccttggtttaagaaatggtgtgatgactacttttacattaaggtctgcagttcctttaacgctattctgattgtttggtgagatcttagcactttgtggaactaaaagaccttagttttagagtcatgtatgtgcaagaatagatttagagcctcaaggttttgtttaggttgatacagtgataagttgtcgcctaggatttgaaaacactcaaaactttacggtcttgcctgcagcaccgtgatgagaggcgagggcttggagggatattttttgatgatttgaatgactatgatcaagagatgcttctgtcattcgccactggtagtgaccaagatataacttgtgacattttgttttaagaaacttcctagttgactaatttgaatactgagatgaattttgcagaatgtgcaagctcagtgataccagcttctatacccgtagtagagaaacgtaaagacacaccatttaacgagcaacacaaggcatggcaacagctgcgaaggggcagatatgttgaattcaacttcgtaattggatactactagctttgtttttctttctgtataaatatctcttgaaacctcgtctcatgttttgttgctgatggtaaaaataaaggtgtatgaccgcggaacaacatttggtctgaagactggaggacgaatagagagtatccttgtttctcttccgctatctgcgagatgagaatatgaccatgtaaagtttcttgattcaagaaactaaatcttgtttcatcttagctaatgaaacttaactactgatggtgtttgtctcttgttgtgcgatgcagaaacctgaagaaggaactgaggaatggaaactattagatgcttgtatcaatccaaaagagtggctt

SEQ ID NO: 160268 - DNA, 1047 bp, Arabidopsis thaliana landsberg
atctatggtgtgttgtggcgtgtaaagcataagtaactttgaaggtttttacaggtggagtccgtgtttgcttattttctgtgttttttctctgttttgtcaggtacaaatgttctgcaagtatgttgtattcctgacccagactatgataacacagagatcattgataatgagtttcttccacgaaaagatggagacctcactatcatgtacgatgtggtcagatcatattcatccaattatatggcacaggtcactatggagaaccataacccgcttggccggctggataactggaaactgagttttgactggatgcgggacgagtttatctacaccatgaaaggggcttacccgagtattgttgattcatcagattgtgttgatggcccacaggcgaagcactatcaagatcttgacttctctaacgtgttaagctgtgcaagacggccaaccgtcatagatctccctcctacgaaatacaatgattcgacattcggtcttatcccattttgctgcagaaatgggacgattctaccacggtcaatggatcctagcaagtcgagctcagttttccagatgcaggtgtacaaaatgcctcctgatctcaatatctctgctctatcaccgcctcagaactggagattaaacggtacactgaacccggattacaaatgtggccctcctcttcgtgtcagctcaagccagttccctgatacaagcggtttgccttcaaacaagagtgcatttgctagctggcaagtcgtctgcaacatcactcaaccaactcctcctaaatgctgcgtctcattctcttcttatttcaatgactcagtaatcccgtgtaagacctgcgcttgtggaggttgctctagcgacagagtggcgcgtacttgcagcacaacttctccagctcttcctcttccatatcaggctcttctaattccatttgacaaccgaaccaaacttaccaacgcttgggcagtgttaaaaaaccggaaagtcccggacccattaccttgtggagatactgtgagcagcatacgg

SEQ ID NO: 160269 - DNA, 582 bp, Arabidopsis thaliana landsberg; identical to SEQ ID NO: 43866

SEQ ID NO: 160270 - DNA, 571 bp, Arabidopsis thaliana landsberg; identical to SEQ ID NO: 2036

SEQ ID NO: 160271 - DNA, 1535 bp, Arabidopsis thaliana landsberg; identical to SEQ ID NO: 27515
  unsure (1)..(1535): unsure at all n locations

SEQ ID NO: 160272 - DNA, 1675 bp, Arabidopsis thaliana landsberg
cgatctacaactcgtttacttgcttatttgtcttttacattcatttactttgtctagcttatttaaaaacatcttaagtctattgtgtgaacataaagagctagctcagtggaattcgacccttaagtgctaacgacaatctcttatttgagggagtaagcttaaggcaatttgagagatatcaaatttggcgccgttgtcgaagttctcctttaggtcaccattagactaggtgtcgttttaagtctagatacttcttttttatcacctattcacgtgtttctttatcttttggtctcttgtttttcaggtaccttcagattgagaatcacgtttaaatgacagacaatcacgatagtgtcgaccgacaccatcaaggtgttgatcgacaccctctgcagaaccagacagctagaataggcgactttaacagaactgatcttttctacaccaaccaatcagcattcaagctacctccatttaaaagaaaagacattgctgtacaccctgcctattatgatcttgtatgaagaggaaagtttagaggagctctcgatgaatcaccattagatcatttgaaagtcttcaaagtcatagtatcctctatcaaagcagaaggtgtaccagctgattaccttctttgcaaactcttcccccactctctagcgaccagaggaacatcatggttgcgtcaactagaaccaggttcactaaccaattggactgatacagagaatccattcatgaatcacttcttcgatgaatccgtgacagaggcaattcgtttacaaatctcttctttcactcaggctccagtcgagtcccttagagcatcttggctctgtttcaggtcttattagcgtgaatgtccccaacatggcttccaagagaggccaactcatcaacatattctacaaaggaacagacaagccaaaccggaatcaacttgatgcagcgagctactgtaacttcatgacaagaactactagtgaagcattacttctcatcaccaatgctttaacttgtctttcaacgcagggatttgataaagaacgaagaatttcagctgagatagccaccacgagcaaagagactcccgtttcaacaatttctgctcctatccaagcccccctccaccctcatcagagaccagaatgtagtctatgcttgcgcaaattcttgcaggccaaacaaagcttgataccaaatatgattctctctccatagatctcaatagcaagattgacactctacgctcccaattctccaatctctcacctacttcagcttctatcaatgtagtcacactacgcagcggaaagcaggtcaacccaatacttcaacgcaaacgatcagcttagccttcaacttttccaattgcagaaaacgaatcaatgtcgatcgatacaccagggtgtcaatcaacactactcttgacgactctgtttttcctttgtcgagtggaatcgacaattttgtggaggaggaggaaactattcccgatggtgtcgactgacacccagctcctgtcgatcgacacccagcttgttcagacaatgtgcaaattcttgctgaaaccaaatcagcaaatcggcgaattcctttcctcaagagtccttaaaagtcaagacaaaccttagatgatgtcagatgcaaggctatgattgataagctg

SEQ ID NO: 160273 - DNA, 3422 bp, Arabidopsis thaliana landsberg
aactcttgaggatatgttcggattccctagagggactgatgttaaacctaagttcaagaaagaggagcttttggatctttgggtaacaatagatgatgacgcccaattctcgtcctcaagggccaagagcaacgcaaaacccctgcattcggtacttctagaaagcaacggctaacgtcctctacgcaagagagaagaccggaccgattaacaatggcgagatagagctgcttgatattgtcctaaaagatatcctactctataccaagaacaaagtacctataaagggtgacaccaatgatgcttcaccatcaatgcgtttattgaatcatctttgtggtttagcgaataagcagaagagaaccatttctataggaggagtgataacacctatactaatggcttgtggagtgccactttagtcgactccctttgcccctaaatggatcgacattcctcacctgagatgggctttgtttgttgagcatcagagtcatgaggggatgcatattctcaagtttcagcacaggacggaaatggatgccaaatttctcctacccagccaagagctcacaaccatcgtagtgagaggtaacatcgatttcaacccgcctaatgaaaaactttttttcatggatagagcacccccgacgagagaagctccggacaatgaaaaaagggttaagattgaagaaggagctgagaatgaagaagtggaggagatggattgggagaactacaatgcgagtaggttccattttgaggaacacaaaccaccaccaagagtgagtaagagtgtgagtgtagctcataagaatgttggttcgatgagtgcttggaagaagtttcaagaccggatgttggaaaaatgtgtcaaggccatcgccgcgattcaagctgtactgagctgttcatcctcagacgccaccatggtgagacaaaaccgccctaaaaaagtggtttcaagaggcacagagtttcaccttcaagataatctgcctatgagcaacgagaggtaagtcgcccccaagctcctgcaagacattcatctcatgagcacttcgagcagaaaagaagaaaaaaaacaagaatgcttcggccaaggagcaaggaccttcttatgacaagcagaagatcactcgaccaagatactcgacgtgatatcgagtagagtgtcgagcaggatccgtgggctcagaacaagtagagtgtcgagcaaaattagtgagatcaagatgggcagtcctcgggaatgaattgggatgcttaccatgacatcaacgagcaggaaaccacctcaactattgcacataccattagctttttatttttctttgtgtgttttgtgttttggtcttgaattctttctcagatttttattacacaagggactgtgtaatttaagtttgggggagggttcaagacatgtttaacattgtgttctctttttttatttcaaattttgcatcatctaaggcatataaaaaaccataaaaatttgaatatttttcagaaaatgatttcacaaaaacagagtgtcatgtagattgcatatcattttaggattgtatatagagtgcttgcatttaggattgctcatttgcataggggataatgatgatttcgaaccgttaagcatgttttgattcaatgaagtaagttcaatgcccatgttattagttctctgttgcataaccgattgtttctctgaagtaagaccgcaccgcaccctgctttgaatttacaacttgactataccgctttgattcgaaactcgcttatctgatgccatcccctatctattagaacctgaactgaaattgcaattatcatgtctatgcattgtttatgaactcatggctaccatatacatacttggatcatcttattcacttcatcaccctctgttaatccaaatagatgtctttcatgtagacttagcccatgctaggactaggtggagacttgtatttgggattgggattgtgtatggattgactgggaaagagaatgagaatgaaaagaaaagaaaaaaaaaagagtaaaagtttagagttcttaagggcgatacataaagtgttagtctagtaaaaggtttggaactcaaagagagttaggcattatgattcaaagaaaacggtacaacgccctatatgctataagatttgaagaaaagccttaagtttgtcaaagtataaaaccaaacccgctagactcttgaatcgtttcaaagaagaacccctttagaacttgaaccaaaagagagaaagaatgagaaaaagggtagagttaggacatttgtgggactgcgatcatcttctgagctatcatactatatcattgggtagatgggagtctgttcttgtatgtgtccattggcttttacctttagcattctgctgaagctcaatcttttctctgagagtctcctgttactcgatcaaatcaatagagggaccatttttgtctcttagcctaagcccgaaaccaagtgagttcataaccattgcattgcttgatccactgttcgtgcttaatgaatattcaagggaattggttgatgagaatgcttgaatatattaaggcaggttgttaggttgcattgtgacgagtatggctaacgtttttaagtaaaggtctatcatcttgcaacctagaattacctacctagacattgagcttacccgttctatattcatgcttcggtttttgaatccccaccttcaaacttaagatttttgtttgcttgagggcaagcaagagataagtttgggaaagttgataacactgtattttactcattttaggcatgtatttatcatcatttagcttagtgatcactcattgtttcatatcattttgcatcacatttagcttattttacacacttaggcatttaggatcactttgcatacatattgaatgttttggtgtgttttcaggtgtagaaggagtttataaaggcaatcactcgacactctactttatccaaccaacaaggaagcagtagagaattctactcgaccagttcagtcgatcaggcagccacaaaggaggcagcaattcactcgaccaacttactggatcaaggcagtcttagaagcagcatcatatcgatctactcgaccttactactcgatcctatactcgacccatttactctaacaagggcgaccaaatctacaagacttggtgagctatcaaagcgtcttcgaatcctcctcatttcccactcaaccagacatctgagcatacggataggagaggatgaagcatctactcgaccaattgattactcggagcatagacacaaaggcgcagactttgcagcaccctctttactcgatccccaaggtcgagtattcgcccaaaccgcctcaagtctcttgtcttctagtgaatctaggttttcaacattttag

SEQ ID NO: 160274 - DNA, 808 bp, Arabidopsis thaliana landsberg
atggcttcttcactggagaagcttatttcaagctttctacttgtcttgtactccaccaccatcattgttgcttcatcagaatctcgatgtaggcgttttaaatcgatcatcagctttggtgattccatcgccgacaccggaaattatctccatctctctgatgttaaccaccttcctcaatccgcctttcttccttacggcgaaagcttcttccatcctccctccggccgttactcggacggccgtctcgttatagatttcatcggtacctgatttttcttctctatttttagacaactcggtcactcctctgcttcaggtctctcttgcttgaaccacaagttatcaaccttactagcttctgtgtttttgtaatgttgtcttactatttgcacagccgaattcttgggactaccgtacgttccgccttacttcggatcccaaaacgtgagcttcaatcaagggataaattttgctgtgtatggagcaaccgccttggatcgtgcctttcttgtaaaacaaggaattaaatctgacttcaccaatattagtctaagtgttcagcttaacaccttcaagcagattttacctaacctttgtgcctcatctactcgtggttacaaacttagccttgttctcttccatatctacgatgcattgagctccttctaactttttttctttgggggttcagattgcagagagatgcttggagactcgctgatactcatgggagagattggtggaaacgactataattacccattttttgaaggaaaaagtatcaatgaaatcaaagagcttgttc

SEQ ID NO: 160275 - DNA, 756 bp, Arabidopsis thaliana landsberg
atgcaggtaaaatatatatatgtgcaagtactaacttgatctaacactaattgacaataaaaatattttgtttggatcaagggatgtgatgcatcgatattgttagacaacacaacatcgtttaggacggagaaagatgcgtttgggaacgctaattcagctcgaggtttcgatgtaatcgacaaaatgaaggctgccatcgagaaagcatgtcctagaaccgtttcatgtgctgatatgctcgccatcgcagctaaagaatctatcgttttggtatgcatcttctactatgctatccaaatggtttttgtagaccattttgttaatgtttaaccaaatatgtttactttaggcgggaggtccttcatggatggttccaaatggaagaagagacagcttaagaggttttatggatcttgctaatgataaccttccaggtccatcttctacacttaaacaacttaaggatagattcaaaaatgtcggactcgaccgttcttctgatctagttgctctttccggtatgttattatctcatttgaaacattttcatctttatagttgtaatcactaataactaactctatatgactatattggtttaggtggtcacacttttggcaaaagccaatgtcagttcataatggatcgtctttacaacttcggtgaaaccggtttacccgacccaacccttgataaatcttacctagccacactaagaaaacaatgtccacgtaatggaaaccagagtgtcta

SEQ ID NO: 160276 - DNA, 1211 bp, Arabidopsis thaliana landsberg
attagaaccaaggagggttcaacatgggctacaataactacaagcccaaccttattttctcctacaaaagcaataatgtaagtaacccccaagatcaagtgtatccaccacaacagaatcagtctaagccatttgttcagtacaaccaaggttatatccctaaacaacaatttaatggatgctagaaccagcagaatccaccaccagggttcactcaacaaccacaacaatccccaacagctcaagatcctgaaattaagcaactcattcaacaaatcattcaaggacaagctactggagctatggcttttgacaagaagatagctgaattacacaataagattgattgttgttacaacgatctaactgtcaagtttgaagctctgaattccaaaatcaagtatgtggagagtcaatttgcaccaacctctgctccgaagcatcctcaacaacttccagaaaaagcagtccaggatcctaaggactatgctactgctaatgctatcaccatccaccaagaagatgagtttccaccaagtcatcagactcccaatactgaggattgtatgattcaagattcaagaaggggggattcaactcaaattgttgcacctgccacccagcaattcatctggactatagagcacacacctttgctgaatactcaccattatggaaaaaagctcaaaattgaaaaactcaagaaagatcagaatcaagagatgattagtagagtcatcactcaagaaacgtacaagaagaaagttatccaagaaaagcttgatgatcctggtttattcactctgccatgccctctaggaccattgacattcaatatgtgcctttgtgatttgggagcatctgttagccttatgcctctctctaaagctaaaaggctagggatcatgaaatacaagttctacaacttagctttactcttagctaatggttctgttgcacatcctcatggtctaatagaaaatctgcctgtcaagattggaaatgtcgagatacctacagattttgtggtattggacgtagatgaagaaggcaaggatctccgaatcctaggtagaccattcttagcttcagctagaacagtcatagatgtcaggaatggaaaatttgatctaaaccttgaaaaaggtatcaagatgagatatgacatcagaaaagcttcagggaaatcaacaacaggagcccaggcctaa

SEQ ID NO: 160277 - DNA, 838 bp, Arabidopsis thaliana landsberg
tctccttactcatccccacaaaccccacattacaattctcccagccatgaacacaaaagccctaagtacgcgccacatccaaaaccatatgtttatatttctccaccacctccatcatactattctccttctccaaaagtaaactataagtctccaccaccaccatacgtctacagctccccacctccaccatactattctccttcaccaaaggttgattataagtctccaccaccaccttacgtctacagttccccacctccaccatactattctccttctccgaaggttgactatcagtctcctccaccaccatacgtctacagctcaccaccaccaccatactacagtccatctccaaagggtgactacaagtctccaccacccccatacgtctacagttccccacccccaccatactactctccttctccaaaggttgactacaagtctccaccaccaccatacgtctacagctccccatcaccaccatactacagtccaactccaaaggttgactacaagtctccaccaccaccatacgtctacagctccccacccccaccatactacagtccatctccaaaggttgactacaagtctccaccacccccatacgtctacagctccccacccccaccatactactctccttcaccaaaggttaactacaagtctccaccaccaccatacgtctacggctctccaccaccaccatactacagtccatctccaaaggttgactacaagtccccaccacccccatacgtctacagttccccacccccaccatactactctccttctccaaaggttgactacaagtctccaccaccac

SEQ ID NO: 160278 - DNA, 653 bp, Arabidopsis thaliana landsberg
tgtcatctctctcggcgagcagatgcaaactttgggaatttcacatgatctttacacatacagtattctcatcaactgtttttgccgacgctctcagctctctcttgctttagctcttcttggcaagatgatgaaactcggctatgagcccgatattgtcacgcttaactcgctgctcaatggtttctgtcacgggaataggatttctgatgccgtagctttggttgatcaaatggtcgaaatgggatataaacctaatacagttacattcaacactctaattcatggactttttcttcacaacaaagcttcagaagcagtggctttaattgatcgaatggttcaaagaggctgtcaaccagatctggttacttatggtgcggtagttaatggattatgtaagagaggtgatattgatttggcttttaatctgctcagcaagatggaagctgcgagaatagaggctaatgttgtgatcttcaacacaatcatcgatagtctctgcaaatatagacatgtggacgatgctgttgacttattcactgaaatggaaaccaaaggaattagaccaaatgttgttacctacagctccctcattaattgcctttgtaattacggaagatggagtgatgcctctcaactactgagtgata

SEQ ID NO: 160279 - DNA, 266 bp, Arabidopsis thaliana landsberg
ggtgtcagtctcatagttttctggttttaaaacggaaaatatatgcgttagggtattgctggataacgaggaaggagtcaacgaaggaagaagagggagatgaaggcgttggggtattggttaatggtggttggttcactgagactagcttctgtttggtttggtttcttcaacatttgggctcttcgtcttgctgtcttctctcagaccaccagttcagttctccctttttaatctctattttaaactgttcttgatttgatagt

SEQ ID NO: 160280 - DNA, 4127 bp, Arabidopsis thaliana landsberg
  unsure (1)..(4127): unsure at all n locations
gacctacctttaccattatttgggggtaggtggcttttttggttaattttggtccactctggactatggacgggaaactcaagttcaattatgtgtttgcaggtacgttgggaatggctctcttgcaaacattattaaaccaaataaatttggacctttcccagaatctttggtggctgtttacattgctcaggtctgtatacatctttcaagttgagttaagtttcgttatgcattgtgtactaactagtgaatacaggtcttggaaggtttggtatatctgcatgagcagggtgttatacaccgtgatattaagggtgcaaatattttgacgacaaaggaggtgtgttttctatattatctattctcagacatgtcttcagtgtgtttttgttttgagatctgctggataagattcttctaggctttttccttagaaagatacttgactacatcacacttcagggtcttgtgaagcttgctgactttggagttgccactaaacttaacgaggctgatgttaatactcactcggtggttggaactccttactggatggctcctgaggtacacctttgattatatatttttcatctccatattctgtatagctttcgtacgcagttttgaaaaaatatttgttgttgtttgaaagatgcttttgtttgctcctttagagaacttttacctgattatgtacgtattgacagaagcccaacttctgtttcaggttattgaaatgtcaggagtttgtgctgcttctgacatttggagcgttggatgcactgttatcgaacttctgacatgtgtacctccttactatgatctgcaacccatgccagccctctttcgtattgttcaggtatttgacaacattttatgagtttgcatttaagtcaatcaaatttaggtgtctcttccgtccccttctccatgtcgtaaacacttctctcctgaaaaatgcaaaagctgttagccagaagtgacaaactatttcttatggtttcgtttcaggatgacaaccctcctattcctgatagtctttctccagatattacggactttctacgacagtgcttcaagaaggtataattttctgctatagggtttattcacctacctctgtaccagaacctagacaatgatttatttaatatccagtatgtacatctgatttgtatcttgtgttttacaggattccaggcagaggcctgatgcaaagacactgctctctcacccttggatacgaaactctagacgagctttgcagtcatcacttcggcatagtggcaccatcaagtgagaacctatgtatttaactttattttttggaagaatattacaaaatgtattatatatcccatcttaaagaacacgcaatagtgttccttgcatccactgaacctgtaatgtccttgggtacttcatcctttgcagatatatgaaggaagccactgcaagttcagagaaggatgatgaaggtagtcaagatnnnnnnnnnnnnnnnnnaggagaaaatgtgggaatatcaaaaactgtaagattcctgactcaatcctcggctctaatttaccatcattcaatgttttgaatatgcagataaagagttgataaatgaacaggagaacgcattaaagctagagatgaactttctaaagctaatgatagtacttttcttgtccaggactcgaaaagcaaattacctctggtaggggtgtcgagttttaggtctgagaaagatcagtcgacacccagtgatcttggtgaagaaggaacagataattcagaagatgatattatgtcagatcaagttcctacactgtcgatccatgagaaatcttcggatgctaaggggacacctcaagatgtatcagactttcatgggaaatctgaacgtggtgaaacacctgaaaatcttgtaacggaaacttctgaagctagaaaaaatacttcagcaataaagcacgttggcaaagaattatccatcccagtggaccagacatcacatagttttggccgcaaaggtgaagaacgtgggattcgaaaggttagttgtgctgttacgtcattactgtcctagcattttcttagataatatggtaaatcacgagtcgtgcttttgtgtgaagttgattaataagttccttaccgataaaaacaaaacaggtcaccgacttgtactgtattatatacttctttatttgttttgcaaatttcacacctacatgcatagaggcttgtatagtgagactggttttgtttgttgttgggccttggtcttgcttttttacaagattatgttcttactgcaatactttccctttctttgttgaatgacgtgttcagacctagtgctctatttactgagttggaaacctgtaaactgactagatttgttttgattggtatttctctcttaaaaggctgtgaagactccatctagtgttagtgggaatgaactggctaggtttagtgatcctcctggggatgcttctttgcatgatttatttcacccattggataaagtgtctgagggaaaaccaaatgaagcctcaacatccatgcctacgtcaaatgtcaaccaaggtgattctcctgttgcagatggtggaaagaatgatctggctacaaaattgagggctacaattgctcagaagcaaatggagggggaaacagggcactcaaatgatggtggtgatctttttcgcttgatgatgggtgttttgaaagatgatgttattgacattgatggcttggtatgttctgtctcaagtttggacgtttgatatttcaagtagtatactgctaaaatatttccatatcttgtttctcaggtatttgatgaaaaagtgcccgcggagaatctttttcctctgcaggtattctgcaaatctatatcctattgttttggcaatctttcggcgttttatatgttgctaatgctacttgaccgattcacttcatcctctgagaatgataatgttaatcaagttttgaaaagagaattgttacttctcaacactgtttttagtgattccaaatcttagtatttattggttaagtttttgtaggcagtcgagttcagcagactggtcagctccttgaggccagatgagtcagaagatgcaatagtatcttcttgtcagaaacttgttgccatgtttcgtcagagacctgagcagaaagtagtatttgtgacacagcatggtttcctgcctctaatggatctactcgatattcctaaatctcgagtatgcttcttttgtaatctagcaggatttttgttgttgtccttcatgataagtagttattagtttgctgtgaatactgactggcttgtgtttgtgaatattttatggtgttttcaggtaatatgtgctgtgctgcagctgataaacgaaattattaaagataacactgacttccaggaaaatgcttgtcttgttggccttgtaagtttcaccttccatatgcttgctgactcaggggatcattggtatagtccggagaatatggccaatttgttttatcaaaggcgtgtctccaatttctatttcaaacttcaatttggaaagctaacaccatttttggggaaaaacgtagatagtttatcatggtttcgttatctcaacactcattttttcatggtgttttcaaatagtcaagtttgtgttttcattgatgtggcaaaataacccatgaaaattgattattccaagtgaattggcagattcctgttgtaatgagttttgctggtcctgagagggatcgttctcgcgaaattcgtaaagaagcagcttacttcttgcagcagctttgtcagtcaaggttagtcatcaaatatttataattttgctgcttcttttttctttctgtaagtcataaagttgatatggtagcttcttggcagccccttgacgttgcaaatgttcatagcttgcagtggaatacccgttttggtgggatttcttgaagcagattatgccaaatacaggtgggtactgtttatcatcttcatatggtgtctggactattgaacatattaagtgcagaagttaatgtatgtggtgtatttgttcaattgaaaaccgcagatacttttaacgttagctggcaattatcttaat

SEQ ID NO: 160281 - DNA, 753 bp, Arabidopsis thaliana landsberg
  unsure (1)..(753): unsure at all n locations
caaaaagtcgcaactcttcttcatcttcttcctctgacgatcattttcagaagaatctgattccgatcaaaattgcagaagaagatgtctcgccaatcgttttctctactgaagaatcttcgtagcatcgcttccggttccaaaatccagacccgatccgtgacttacatgcccagacccggtgacggaaaaccaagnnnnnnnnnnnnnnnnnnnnnnnnnnnnnnnnnnncgttggtaacaaacgcggttcaacaagtgatggaagcgatgcacgctccggtttacttcgaaccgttcgaagttcatggagatatgaagagtttacctgaaggattgttggaatcgattaagaagaacaaagtttgtttgaaaggtggtcttaagactcccgtcggtggtggtgtgnnnnnnnnnnnnnnnnnnnnnnnnnnnnnnnnnnnnnnnnnnncttctttggtcaactgtttcaatttgcctggtttagcttctcgtcatgagaatgttgatattgttgtgattagagagaacactgaaggtgaatatgcaggtcttgaacatgaagttgttcctggtgttgttgagagccttaaggtgcaatttctcagtttttgttgattgttttggttacaaatgtgatttgattcatagtgatttggtagtagatgtgaaagtaaaagatgataatgttatatcaaaaatgtctctgatgctaatgttttggtaggtgagtacaaagttctgatgagatcg

SEQ ID NO: 160282 - DNA, 1428 bp, Arabidopsis thaliana landsberg
ctcactattttttcttccgcagcgtcaccgactcagatttggtggtgctaggtcaccgtgttcttcacggcgttcgggagaatgtcttagttaccccagcttctccctaaagaaactccactactgttcaaaatccctttcctacacatctgtagttaaatgtcacataatctgttgaattacttgaggcttaaggtgtaaatgttatttttccttggcagagacctaaggtttatgtgtgtcttccagtttaaattatgtgtgggtgactcagagaatggggactaatgggaaagagattccttgtgagactcagtttctaatcgtagaagcaaacaaaggttctggtttaggaggaggagatgaatcgtcttcctacgttgtattcttgcctatacttgaaggagattttagagctgtttttcaagggaacgaggctaatgagctagagatttgtcttgaaagtggtaaattgacacagctagctagatttgagttgaaactttttgttagattctctctgagatttatatggtttgtgtatggtcaaggtgatccaaccgttgaccaattcgagaggagtcatttggtttttgtggctgctggctctgagtatatataacgtttctcaaatctcaacttaagacttctttatgtccaaaatttttttagtgctaagaatctttgcctttcaatgattatgcagggcttttgaacaacattttcacaccgagagagaaagaaagtaaggaaacactgagacgttttatgtgatactttgatttatatacataccaaaaactaactttgaaaatttcccctgttttggttgtgttcagatgccagatatgttgaactggtttggttggtgcacttgggatgcattctatagaaaggtcttgagaggtactcctgagtctttatttttaaagatggctttaacgtttagattgtgacttaaccaaacctgcaataattctctgtagcctcaaagctggtgtggttactccaaagtttgtcataattgatgatggatggcaatctgttggcatggatgagaccagtgtagaattcaacgctgatagtgctgccaagtaagtaatgaagctctctgttcagatataagctctttctttaagctaataaaccactcttttatctttttgtgaattccttcagtttcgcaaaccggttaactcacataaaggagaaacacaagtttcaaaaggacggcaaagaaggccaccgggtggatgaccctgcattgagtcttggacatgttatcacagatattaagagaaacaattcactcaaatatgtttatgtttggcatgcgataaccggatattggggaggattcaaaccaagtgtttctggtatggagcactacgaatcaaaggtggcgtatccagtttcttaaccaggaat

SEQ ID NO: 160283 - DNA, 591 bp, Arabidopsis thaliana landsberg
aaaagtaaaatacccatgggtgaagccgttaaggtaatataaacaaccttccttatgagttaggactattcccatttaatttagaagtgtttttgcttagcatcagattgatgttttgtaggatcaaactgaagaagtgattcaagcttggtacttggataataagcaataggatcagaaacttcctcaccacaaggatcctaaggaatttgtatctttggacaaacttgcaggtctgtgtgtatcttcattgttgcacatacttttattctttcacgtaggttaataatgtttttgtttttttttgttcagagcttggagtactttgctggagacttgatgctgataactatgaaaccgatgaggaattgaaaaagatccgcgaatctcgtggttactcctacatggtttgtgacatttatttgatgcctttttttaatatcttcctttgtttggtctttttttttaacaaaaaataaatcttcgtttgttagttgattattaaatattcgattttgatgtttggttttaggacttatgtgaggtgtgtccagagaagcttccaaactataagaaaaagtaacgttatag

SEQ ID NO: 160284 - DNA, 682 bp, Arabidopsis thaliana landsberg
tatgatataatggatgtggcttttgttcagttagatttttttttttttttgggttcaattcagaaacataaaagaatgtggcttttgttcagtgtttttttttgtcaacatggttttggttcagtttagagacatatcgattataaataatgttggtctaggtttataagctcaatttggtttgatgggttcacatgccaattaaccgttgattgaatactgtcatcatgtgaatataatagggcttggaggaggagttgggggattgatagcaggagcggcaacagcggtagtggctgtaatgggtggtcaccatgtgggtcatcgcgcaggctacgagcaccacaaccatggaaaatacataagaggattatttggaggaggaaagtacaagcgaggaaagcaaagtatcggaggagggaatcacaagtgtggcaagcacggcatgttcggaggcaaaagaggcaagcatgacatgttcgggggaaaacgaggcaagggcatgttcggacaaaggaagtggaaatgatccattagcattcctctctacatatattttcgtaacaacttaatattaagcttaatatataatgtgggtgaatcatttaatttacatgtatttgtagctatatgtatctatgaaagagtgtttaaattgggtaaaatatttttcttacggata

SEQ ID NO: 160285 - DNA, 885 bp, Arabidopsis thaliana landsberg; identical to SEQ ID NO: 5199

SEQ ID NO: 160286 - DNA, 1184 bp, Arabidopsis thaliana landsberg
gtgcactccaaagagcatcgccacaggttggaaagccaaagaaatgctccattacagccatgaacaccagcttaaaggtgtcggccgggtccagattccagaggctcttgccttctcctgtagcaaccttcttctttcacttcaacatgttacggttgcgttcactgttacttgtttttacacgagcgttgccttgatcttccgacagagattcaacatcccgtgcatcctatgcaccctctcaaacgccttgattatatacaaacttttgacggtcagaaatcttgtaatgcctgtgaagacatatttgttggtgtaccgtttggttgcttagaatgtgatttctaccttcatctgagatgtgcagatgccttgttgcggggtttgttgtgcaagtctcatgaacacaggctgttatatgtagaaattactcctggtcctgttgattatagaataaaatgcccatgcctaatatgcaagaaaaccgtgctctatgaaaaattcttttatttctgcgtcgaatgtgatttgagatgtcatatcaagtgtctacaaatacctgaatatttggtcaagaaatcttttcacatccatcaacttagacataaaagagtcgaaaccgaagataattttttggagtattgtggtgtttgtgagacgatggtaatttcaggatatcctgcatattcttgtgaagaatgtgattttcttggtcacactgaatgcattctacgtgaggtaattcatattttattacatctctgtgttttctaataatgatgatgatatccgttgacgaaaatgatatgagctaatactcttcgtactcaataccaacaggaagtgccttccccaatgtacttgaaagatttgtactcttgcagcaaaggcaacacaaaatcccaacatcttgaaaccattgaatttgaagataggttactggtatgcctttttaatataatcagtacactagtcaaacaatgtcttcacctaaaattgtttcaaatatatactccaggttaatagcttcagtcatattcatgtgatgagactaatccacatgagtgagcttgaggaagaaggaaagtgcaacatgtgtgggacaaaaatacatgataatccttgcaaatgtgagacatgtagcttccaatcacatgatttttgtgggggatcctctagagtcg

SEQ ID NO: 160287 - DNA, 619 bp, Arabidopsis thaliana landsberg
gatgcaacataccgttcgaaagctacagagtgtaacaagtggttacatatctgttatggtggatcacatgtctcagctgtaaattgcttctaccgacagcagctcagttcacgcattggccttcatgcatgaatgccacgcattaagttctaaacgcgtaagccagaggctatagccccttctgaaactagattattgtgtttttcttctttgtgagtctttaacggtttatttttctctgaagacagaattgttcattggtcatcctcaatcataaagatatatacgcgagcatggagagacctgcatttttgctacagatggtatgccttgcagatgttgtgataaaggcagagcctttagcctctggtttagcaaatgatgtacatggccaagtaagttatcacaagactctttttcctcaaatcattaattgaacctttgttattttcttggtgtctaattgacttttggtggcttattgcatatacagttgactgttctgaacaaagggataagcaactcaggtagaggaagctcgaggaacaagttgcagaattttcaattcaggatcaaggaaaatggtatcgactatttctatcctggttgcagaagctga

SEQ ID NO: 160288 - DNA, 2121 bp, Arabidopsis thaliana landsberg
tatgtgagtgcaaaggcaaagagttgatatcactacctttctatgcaaccaaatgtggactggactgacctgctgttgcctgtgccactcctgactgctacgaatacagtccagcctccccattacgaggcttttgtgcagcgcctcttagaattggatttcggcgcaaaagacctagtttctcatacttccctccatatattgatcaatgaggcgagtatgttaccgatttgcatcaaatggaaccatatcaactctggatcgacttatatcaatgggagaaagggccttgtctgaggatgtatatggaactttttccgaaagtgaatgaaacctattcaagaacatttaacgagagtgaagttgtcagaatccgaggcatattcgctttatggagattttctgggagtgacttaattggcccgtatgaactgcttaacttcactctgcaggggccttatttatatggtgtgcctttttagcctaataagtgttttttacccaagtagatctagactgactgctaagagctaagtgaaagtcttctttatctcctctcagttaacttcaacagtgaaaggaaaggcgtcagctggcgacgattggcagcaataactgcaggggctgtggtgactgctgttgcgatatccgctgtggttgcagccttgttgcttagaagatacagcaagcacgagcgagagatatctagaagacggtcatgtaagcgtaaccaaatcttccattcccaatttatcccactgaaatttacaaccaactttaactgaatctggttgtatttgtcagcctcgaaggcttccttgttgaattctgggataagaggctttagtttcaaagagctagcagaggccaccgacgattttagcagctcaactttggttgggcgcggaggctatggaaaggtttacagaggtgtcttatctgacaatactgttgctgcaataaagcgagcagatgaagggtctttgcaaggtgaaaaggagttcttgaatgaaatagagctgctctcgaggttgcatcatcggaatctagtgtcactgatcggttactgtgatgaagaaagcgagcaggtactctcttgatacccagtagaaccgcctgagtaaggtgttatcagttggatgtctataaaaattgcttatgaagttgctgaatttgcagatgctggtgtacgaatttatgtcaaatggcaccctgcgcgactggttgtctggtagtaattcacaatgattcatggggcgttttcggatgtgtgtcatttagttttctcaattgatggaatatttggtgatgcagctaaggggaaggagtcattgagctttgggatgaggattcgtgttgcgttgggagcagcaaaaggtattctctaccttcacacagaagccaacccgccagttttccaccgagacatcaaagccagtaacatcctcctcgaccccaacttcaatgccaaagttgcagactttggactgtctcgacttgctcctgttttggaggacgaagaggatgtgcctaagcacgtctcaaccgttgtccgtgggactccagtgagtcatcaaaatgaatgatgtgaaacatatattggcacaagagattcattgcttagttttattgaatgttgtaggggtacctggatcctgaatatttcctgacacacaagctgacggacaagagcgatgtttacagcatcggagttgtgttcttggagctgctgactggtatgcacgccatatcccatggaaaaaatatagtacgagaggtgaagacggctgagcagagggatatgatggtatcgctgatagacaagagaatggagccgtggtcgatgaaaagtgttgaaaagtttgcggctttggcactgaggtgtagccacgactcaccagagatgaggccaggaatggcggaggtggtgaaggagctggagtcactgctccaagcagcccccgatagggagacaagagtggaattggcgtcatcttcgtcagtgctgtcaacatcgtcgtcaaatgtgacaagagacctttacgagtcgtcgagccttctaggaagcgatctcagcagcggctttgttcccagcatcgctcctcgctgactccaaccatt

SEQ ID NO: 160289 - DNA, 2215 bp, Arabidopsis thaliana landsberg
  unsure (1)..(2215): unsure at all n locations
atttgggttcgtttgattttattgctttttgtcgaatctcttctctattatagcaatatctagggttttcggttcgcaaatttctcgcaagtacctcgtaattttgcgagggatatatttgcaggttgaagtgaaaccaatagttggtgttagttctcatgaatatgaccacttggtttcaaaaaagaatcctaaagacaaggatttgttacatgtttttgatcttgtgatcaaagggtatttaatgagcaagaaggattggaggcacggatgtattgaagtggaacaagtacatgaaggtagaattgattatgtaattaaaacctgctattgaaacacttgtgtatcgcagcagaaaaaggaaatcaatgtcctttggtgagaaataggacttgtctatgaaaactgtgaagatcttaggtacaaagttggaaagatggatgactatttanggatcgaaagagttcatgccaattctactagagaagaagaaaaaaaagaggaagaagaaaattttgcgagggatatattcctcacaaattttacgacgacttagcgatgttctcctatctgctcgcaaagtcctcgcaattctgtagcaaatttgcgagggacatttttaatcgcaaatgttcctcgttaatcgcttgttttcttgtagtaaaaagcttcttaaaagaattttaaagcgttgaaaaaattattataatgttaacactttaactgttagtaattgggtctaggcctcttatttacaaaaaacaaaccgttttagtaaaaattcactaaagcccaaaattcactaaagcccaaaccaaaaaggaaaaagaacccgtgaaagaaacaaanaattaaaataataaattagaaaaattgtcgtctctctcactgtgtcttcttccttagaacaatttgaaaattttttgattctccaacaaaggaatcaattgaaggtaacaaatttatgaaactaaattttgattgggtttgttcgattttatttctttttgtcgaatattttctctggtattaaaatatctagggttttcgtttcgcaatgtcctcgcaagttcctcgcaattttgggagggatatatttgcaggttgaaatgaaacctatagttggtgttaattctcttgaatatgaccacttgctttcacaaaaaaattctaaagacaaggatctgttacatgtttttgatcttctgattaaagggtataaaataagcaagaaggattagagtcagcgatggattgaagtggaacaagtaaatgaaggtagaattgatcatgtaatgaaacctgcaattgaatcacttgtctatcaccaacagaaaaaggaaattaatgtcctttggtgagaaaataggattggtctatgaaaactctgaagttcttatgtacaaaattggaaggatggaagagtatttatggatcgaaagagtttctactagttcttctagggaagaagaagaataagaggaaggagaaattttttttgggggggggggggggatatattcctcgcaaattttgggacaaattagcgacgttctcctgtctgctggcaaagtcctcgcaattatgtacctaatttgcgagggaccttttccatcgtaaatatttctcgcaaatcgcttgttttcttgtattaaaaaggtttctaaaagaacatttaaagggttgaaaaagttactgtaatgttaacactttaactgttagtaattaggcctagacctcttattttcgaaaaagcaaatcgttttcgtataaattcactaaagcccaaaattcactaaaaaccaaaacaaaaaaagaaaacgaaaccgtgaaagtaacaaaaagtaaaaaaaaaaaaaaatttagagaaattgtcgtttctttcatcataacaatttgaagaatttttgtttctcgagcaaaggaatcaattgaaggtaacaaatttatgacactaaagtttggtatttcggtttgttcgatgatatttcttttcgttgaatctcttctctattatagcaatatctagggttttcggttcgcaaattcttcgcaagtacctcgcaatttttcgagggctatatttgcaggttgaagtgaaaccaatagttggtgttaattctcatgaatatgacgacttggtttcaaaaaagaatcctaaagacaaggatctatgacaaattttttatcttgtgatcaaaaggtataaaacgag

SEQ ID NO: 160290 - DNA, 411 bp, Arabidopsis thaliana landsberg
aaaaagatccaaatgataacatcaaaactaatttatatgataactagataaggccgcctaaataagcggatgcaaaaataaatatatttttttgtaatattttactactaccaagcctcagctaaatcgtgagaagcttgtggtagagcaacgcactgtgaatcttcctctgtctaacgacacagccctacaattgaccaagtttcagcctaatcatgagaagcttgtggttgagcaacgtcttgtgagtcctgctgtgaccaacgacccaactctgaaatcgacatggacccatcggttaagggttgcagcgggctggaccactttgtttgtccttgagctaaatctgtcattggagggtttgatctcatctctggctcgatcagctttacgcggttatgcagggtacac

SEQ ID NO: 160291 - DNA, 419 bp, Arabidopsis thaliana landsberg
gggggaggtgtacggggactaccagtgcagcgagtacctgatagaaggtagtttcggggcaaggaactgcacggtggtggaggcggagacgaggcggaaggtggcggagataaggcgcaaagtggatgcgtcaacgaacgtgatgcttgggaaagacgttttctcgttgaacgtgaagcccggttttgatggagcctttgcaatgggattggttcttgtgcttgatcaaatctacggcgacgatctccttgaggttggtgaggaacaggtgcacccttccgcagaagatctctgatttgatttttcaccctttttttgtttttgttttcttcttttttggtgggacgcaaacaaaaccgagtggaaaaataataattattgtgagtttgtgtcggtttgaaaggaaacgatttggacaa

SEQ ID NO: 160292 - DNA, 1056 bp, Arabidopsis thaliana landsberg
catagacaactcgacggctttcgagtccgttcaccggttaaacgtcggcggacaaatagtcaacgaggtcgacgattcaggaatgttccggcggtggcttcctgatgattcttttggaaactctggatccattgtgaatgttccgggtgtaaagatcaactacacggagaaaactccggcgtatgttgcgccgtatgatgtgtatgctactagtcgcttaatggggaactccagcaacttgatgttcaatctaacgggtatgttcctcacagttgatgctgggtataactaccttgtgaggctacatttctgtgagactcttccacaagttaccaaagagggtcaacgtgtcttctctatctttattgaaaatcaaacggctacgcttgagacggacgtgtttcggatgagtggtggttcttggattccgatgtatctggattatactgtgattgcgggttcgggaagtggtcggagacatgatctaaggcttgatttgcatcctttggtgagcattaatccgaaatattatgatgctattctgaatggtgtggagattctcaagatgaatgatcccgatggtaatcttgcaggacctaatccagatcctctagtatcaccagacttaataccaaaccgtgcaacgccgcggattcgaaaaaataagtcacatattttgccgatcacacttgcagtggttggttctttagttgtgctagcaatgtttgttgttggtgttcttgttatcatgaagaagaagaagaagagcaagccatctacaaactcgtcatggtgtcctcttccgcacgggacagattctacgaatacaaaaccagcgaaatctctgcccgcggatctctgtcgtcgattctccattttcgaaatcaaatccgccacaaatgatttcgaggacaagctaatcatcggagtaggcgggtttggttctgtctacaaaggacaaatagacggtggagccacacttgttgcggttaaacggctggaaattacatcgaaccaaggtgctaaagagttcgaaacagagctcgagatgctctc

SEQ ID NO: 160293 - DNA, 1320 bp, Arabidopsis thaliana landsberg
  unsure (1)..(1320): unsure at all n locations
atggatggtagcttgtatggtgagtgtggtaactatattggacctgagattgaatctgacagagatagtgatgatagtgtagaagatgaagatctccaagagcctgggggttctaatggctggattaccactatcaatgagaaccaaaatattgttcttcctgaggataagaagtactaccctattgctgaggaggtttatggtgaggatgttgagaccttggttatggatgaagatgagcagtctcttgagcaacccattatcaaacccgttagagatattagatttgaggtgggggtcatcaaggatcaaacaacaacgtatgtgtcaacactgtttcttatcggcctcatgtctaatcctgcgcttgtgaggaatgttgctcttgtggggcatctccagcacggcaaaactgtcttcatggatatgttggtagagcagacgcatcgtatgtctacttttaatgctgaaaacgacaagcatatgagatatacggacacaagagtcgatgagcaggagagaaatatatctatcaaggcggttccaatgtctcttgtccttgaggacagtagatccaaatcatacctgtgcaatatcatggatacacctggacatgtcaatttctctgacgaaatgactgcttctttaagacttgctgatggtgctgttttcattgttgatgctgctcaaggagtcatggtaactagtctttactctctcttttttcaagtatactatttgtagtactaacgctattaatcttttttcaggtaaacacagagagagctatacggcatgcaatccaggatcatctccctattgttgttgtgatcaataaggtacatcatgcctaaagtgtgaaattttatattttcatacatttgcttgacctttgctttttgtctgcccaacaggttgataggctcataactgagctcaaactacctccaagggatgcttactacaagctgaggtatacaattgaagtcattaataaccatatatctgctgcttcaacaaatgctggagacttacctcttatagatcctnnnnnnnnnnnnnnnnnnnnnnnnnnnnnnnnagccggatggtccttcacattgcaatcttttgctagaatgtatgccaagcttcatggtgtggccatggacgtggataagtttgcatctagactttggggagatgtatattatcaccctgatactagggtattcaagacaagtcctccagtaggtggtgcagaaacagcatttgttcagtttattctggagcctctaaacaagatatacagccaagtgataggtgaacataagaagagtg

SEQ ID NO: 160294 - DNA, 1281 bp, Arabidopsis thaliana landsberg; identical to SEQ ID NO: 26776

SEQ ID NO: 160295 - DNA, 395 bp, Arabidopsis thaliana landsberg
gacgacttggtttgttctttgattgcaggggaagatctgattgctccgtgcaattgtaaaggtactcaaaagcacgttcacagatcttgtctcgataattggcgctccaccaaggtatattatcgtcaccgtttccagaaagtttcttcttcttttgaatgaatggtttacttagcttatgaagtgtattttgtttctatgcaatatatgtttcaggaaggttttgcattttcgcattgtacagagtgtagagcctttttcaaactccgagccaatgtgcctgctgatagatggtggttgagattgagatttcagctgctggttgctagagatcatgccttcataatcaaatctgtccagatggtacatgacttgtttcctttttttaggtttag

SEQ ID NO: 160296 - DNA, 511 bp, Arabidopsis thaliana landsberg
  unsure (1)..(511): unsure at all n locations
accttttaactgcagaattgcagagaagagcaagatccatggatttcccgcgggtttgtgcacaagtgtaggcataggtgggtatatgacaggcggtggatacggtaccttgatgaggaagtatgnnnnnnnnnnnnnnnnnnnnntagacgtaaagatggttgatgcaaatggtaaattactcgatagagccgcgatgggtgaggacctattttgggctattagaggaggcgctggagggagtttccggataattctagcatggaagatcaagcttgttcctgataataagaccgtgaccgtctttaccgtcaccaaaacgttacaacaagacgtgggtaacaagattatctcaaagtggcaaagagttgcggacaagcttgttgaagagctattcatcagagtgctcttcaacgtagctggaaccggtgggaacaagactgtgacgacatcgtacaatgctctgtttcttggcgggaaaggaacgttgatgcaacgtatgaagaagagt

SEQ ID NO: 160297 - DNA, 900 bp, Arabidopsis thaliana landsberg
ttttaaaacaggcaaattttatgtttgttgtgggtgttggtggctgagacaagctcaagaatcattagaaaatgtactcatcgatctttataaggtaaataaactctaactgagaccatcctctcgtttctctcagtttttgttattagattgtagaattgacaaaattgaatcggaattttgagcagaaaggtggaagaacagaagagcaagttgagctcttgaagctacaactttggatgatatatcaagaagaagcattcaatggaaaaccagcaaaaattgcgagatctcatggccggaaatttcaggtcacggtcgagaaggaaacctctaggatgttggtaagattaatctcactagtctttagttttgattagatttctgaattcttttgatcaatgaactgatgaatttgaatgtgacgttacaacagctgaagccgtgtatcggaaactcaagtgatagagccagatgcaaacaaggcttgtaaaaagtaggcaaacataaatctaatgcatcgttttaaggttggttgttatatacaaattgtggcataatcttggcttgttatgcgtttggatctatctatttgatcaaagttctggtatcatattacagattcaagtatattcagaaccagagtcttcttaaagtggatgagtcagacgatgaaccacttgacacaaaacaaatcagctctttgaacctctttcaacaagatttcgatgtggaaggacttttaatcatttgtgaaggctatatctgatgtagattttgatgccagaaacaacaaatattgtgagatctcatggcaatccattctaagtcacaatcgagaagaaaccactaggatattgataagagtaatctcactagtctttagttttgatcagattt

SEQ ID NO: 160298 - DNA, 1417 bp, Arabidopsis thaliana landsberg; identical to SEQ ID NO: 7726

SEQ ID NO: 160299 - DNA, 1474 bp, Arabidopsis thaliana landsberg
ttattttgcacacttaagcatttaggatcatcttgcatacatattgcatgttttggtgtgttttcaggtgcagaaagagcttacaaggattctactcgaccctctactctatccaaccaagagggaagcaacatagcaatctactcgaccagtttactcgatccaggcagctacagaggaggcagtaattcactcgagcagtttactcgatccaggcagccacagaggaagcagcagatcagtttactcgcccctcttactctatcctctactcgacccatttactcgaccaaaggcgacctactctacaagatttgttgatctatcattgcctctttggatcctcctcattccccaatcaacaagacatctaagcatacagataggagaggaagaagcatctactcgaccaattgatcactcagagcataaaggcaaaggcgcagactttgcagcaccctgtttactcgatccccaagatcgagcaatcgtccaaaccgcctcaagtctcttgtcttctagtgaatctagggttttcaacattttagtataaatagatcactttgggatttgtccgaaggatctagcttttatctcttagtttttctttttgttcttgaatcttcaaaacttaattacttttaatctatttctattttgcatttagttctctgagcaaagttgtttatcttgtttagatctacattttgctatatttagagtaatttctgggtttgtgttcttagttatgttgcttgagtagtgattagggttcttgaggatggattagattagggtaatcactaggttagtcaggtggttaagattaggtaagatcccttctggattcgttggcccctatgcggttttcgctggctaatgtgggaattcgaccacaggtatccagcttccaaaagacgttcaaatggatgtctgatctaggaattcaagagatttgtagattctagcccaagaaattggatgtttagactgcttgactttggtagattgttgcttaaagcctgctctgctattcatcaacgagagttgagattaggaagtggtaaagttatctgtgtctttgtcacgagagtggattgacccggttttgaatctatcatctagggtatttgcctttcgcctgttagccacctgagggcatgatatgctattgtgagacaagacttggaacttgaaccaatggagcagcttgtagccgaggagcagcttgtagctgaggagcagcttgcagcggaggaagctttgtacggaaccaaccagtcctatgactcgttcgaagactagacttctcaaccaagctgttaccggacttcttaaccacttgggcaagcatccaaacaaagtcatactaagcgtttggaactcaatagcagctcaagacaattggtaattggctaggtgttacttgggtactctttttcccttataaggttttgccccaatgggttttcca

SEQ ID NO: 160300 - DNA, 414 bp, Arabidopsis thaliana landsberg
atttgtctctcttaaatgtgtttatttccccttttgtagtaaccactcagaaggttttccttcactcaaaatggctttgtctcttatctttctagctctcgtagtgttgtgccctagtagtggtcatagccaacgttctccttcaccgggatactacccgagttcccgggtaccgacttcaccttttgatcgtgaattccgtactttatggggctctcaacaccaacgtagagagcaagacgttgtcactctttggctcgacaaatccactggtctttttctttctttactttttttttcgttatcaaccaaatttgatggactcaattcgttggtccgtgttataaaatgtactaaaagattatatgctattcattatgaacagaccattaaaattaatgaatgtaaatattg

SEQ ID NO: 160301 - DNA, 723 bp, Arabidopsis thaliana landsberg
  unsure (1)..(723): unsure at all n locations
tcttttaaaatacttttgcattcctctataattgtgtattaaaattaaaaatcgaaaattttgctttacgcgtgtgtccaacgaacttggagcaggaaatgtaaaaggcgcaaagaaggcgactttggtgtccgtaaagttgtctttagttctagctctcggtgtagtcattgctatacttgtgggtcatgatgcttgggttggtttattcagcaatagccatgtgattaaagagggatttgcatcactaaggtttttccttgctgcatctataacacttgattcaatccaaggtgttttatcaggtataaagatccaagaaaatcttcannnnnnnnnnnnnnnnnnnnnnnnnnnnnnnnnnntctttaaatgtattttacaggagttgcaagaggatgcggatggcagcggttagccacggttataaatttgggaacattctacttaataggaatgccgatttcagtcctttgtggtttcaagttgaagcttcatgccaaggtgaatgttagactctcttatgaaattggtaaagatttttgttgttgctaaactgtgtttgattcattattttgatattgtttttgatgaaaacagggtttatggatcggtctgatatgtgggatgttttgccagtccgcatctcttttgcttatgacaatttnnnnnnnnnnnnnnnnnntgactgctgccactgtctgaaacctatagttcaatttt

SEQ ID NO: 160302 - DNA, 838 bp, Arabidopsis thaliana landsberg
ttgttttgcatacttagacatctaggatcatcttgcattcacattgcatgttatggtgtgttttcaggtgcaaaaggagcttaaaaggactctactcgatccattgtctcgatcgaggcagctacagaagaggcatcattctactcgacctcttgacttgatccaggcagctacagaagaggcatcattctactcgacctctttactcgatccaggatgccacagagaaggctgcagtttactcgaccctcctactcgatcaaggcaacctcagatgaagcagcagattgatctactcgcctctcctactcgatccatttactcgaccaagggtgaccatctctacaagacttgttgagctatcaaagcgtcttcggatcctcctaattccccactcaaccagacatctgagcatacagataggagaggatgaagcatcttcttgaccaattgatcactcggagcatagacacaaaggcgcagactttgcagcaccctctttactcgatccccaagatcgagtattcgtccaaaccgcctcaagtctcttgtcttctagtgaatctagggtttccaatattttagtataaatagatcactttgggatttgtccaaaggatctatgctttatctttcaatttttctttgtgtttatgaatcttaaaaccttaattactcttaatctatttcgtgtttgcatttgattgtttaagtaaagttgtttagcttgtttagatctacattttgatatgatttttgtaatttctgggtttgtgttcttgataatgttgcttgagtggtgattagggttcttgagtatggattacaattgggtaat

SEQ ID NO: 160303 - DNA, 2682 bp, Arabidopsis thaliana landsberg
cacaccttcattgaagtcatcaaaacacaacttcattctgcaagaatgctttctctaatgtgcaagccaagtaagtatacctcacagtttataacaagttctaactcaactagcaaatgcacacattaattgaccctgatataatttaaggtacatgctttatgtgaaagtcatggatggcagtggtgaaaccaaatgcctcctgtctcctgtttgataccatctgtgcagacatggttcgtgaatcatgtacatccatgttaggtggctcttttaatgaggtatacttacaatcgaaatagttatcttcttatgtttgtggaatctaatatgttgcaagagtatataaactggctaactaacaatttgtggtcttactatttagattgaggatccaaatgatatccctgacggttgaagaaatttggttgggaagacttttctatttctggtctctgttgagaaagaaaacatatgggatggtaaggattcttttaaggtcacaaggctattgtctaccgatggtctctatggtgatgaggtcctcaaagactcagaccactctgtcaaccctgcatccattggttctagggaccatgtatgattctacacatgttatccttaacaaatcaggtgtaaatgaaactttatcaatgaaacttttctaaactatgttttcgtgtttacagtgtcttatgttaacttcgagccaagagacttcagactcagttactccatcatcttagcgtgtttatgctacaaagttgacagactcggaacaatcatccagttccaaaaagctttgtgtcagccgttggatttggagaaatctgaacctgagtttaatgatgaactcgctattaaggaggtaaagaatgcagagataactgagatggttgaaggtgctgtaattacagataaagggaagggtgtgataagcaagttttttaggcctagttatatgcagaagtgtggtgtgttcagttcaattcccccttaaacactaacatgtcgatgcagctatagggggtgtcaatccagtccactgttattgctagctatcaaaatttgtacagaatcaactaagtcaagccaaattatagagatgattggtttctagtaacaatcctaggtgaggattcaaacaagcaaaaatatgaacttaaaagccctactcgatcattgggtcgagtaataccaataggcaacaaatttaagaactaaaatgcaatcagcaggtgacacaaattacaggtaaatcaaagtgcaatcagggggtgaatacatataaatctaagaacaatagaagtcctaaggatggattcattgataagagcaactttagggttcatgaggtggctaacaggtgaaagggagttacccttgacgatagattcagaaaccgggtcaatccacacttgggacagagatccccataactctaccacttcctaatcttaactgtcgttgatgaaacatagtaaagaagggtttaagaaacaatctaccaaagccaataagcagacaagccaatctcttggtcgagtctacaaatctctggaatttgatgatcagacatccatttgaacgtcttttggacgctggacgtctatgatcgaatctccacattagccagcgaaaactgcataggggccaagcgaatccagaagggtataaacctaaacactaaccacctaactaacctagagattaccctaatctaatccatcctcaagaaccctaatcactactcaagcaacattctcaagaacacaaacccagaaattactaaaatcataccaaaatgtagatctaaacaagctaaacaactttacttaaacagcaaatgcaaaaacgaaatagattaagagtaattaaagtttcaagattcataaacacaaagaaaaactgaaagataaagcatagatcccttggacaaatcccaaagtggtctatttatactaaaatgttgaaaccctagattccatagaagccaagagacttgaggcggtttgggtgaatacttgaccttggggatcgagtaaagggggtgctgcaaagtctgcgcctttgtgtttaagctccgagtgatcaattggtcgagtagatgcttcatcctctcctatccgtatgcttagatgtctggttgagtggggaatgaggaggatccgaagacgctttgatagctcaacaagtctgtagagatggtcacccttggtcgagtaaatggatcgagtagtggatcgagtaggaggggcgagtagttgaatctactgcttcgtctgaggttgccttgatcgagtaggagggtcgagtaaactgcagcctcctctgtggcatcctggatcgagtaaagaggtcgagtagaatgatgcctcttcagtagctgcctggattgagtgaatggatcgagtagagtctttttaagctccttttgcacctgaaaacacaccaaaacatgcaatgcgaatgcaagatgatcttagatgcctaagtatgcaaaacaagctaaaatggtgcaaaatgacatgatacattgagcaaatgcaaagctaaatgatgataaacatacacctaaaatgagtaaaatacagtgttatcaactcccccaaacttatctcttgcttgccctcaaacaaacaaaaaatcttaagttgaaggagaggtttgaaggtggggatt

SEQ ID NO: 160304 - DNA, 1977 bp, Arabidopsis thaliana landsberg
gagtcgcttgagaagcctacggctttacaatctcagacctataaaatacaggtccttatgcgatgcgttgtcagtttgtccaaatatcactgatctgaggattgtgggattgtaagttgtctttgagtgcctgcttgtctgttatgaatttcaagaatttctcctttttttctccctttgtccagaggtttcatattgtcatcttctatgctttcgggttgttactacttcaatgtctgtcgactttcagttctgctaattcgttaagcaacattgtctcctgttttacgttatttcgtgtttcatgtgacaggtataacttaaccgaggagctatttaattcattgacaaaaaaatgccgcttaatagagcacctgttcttagagacctacggttatccacgtaaagcttttccactgtgaagctttcctttttgttacttccaagtatcctcaagctcacctattgtgtgacaggtacgttagagagtaaagcaggatcatccttagtagagtttgtgaccaattgccccaacttaacgtccctgacgctcatacgttttggactaaccgatgactgggcccgaaatcttgctgaggtatgacccctttttttatctttctggtaattcttctctcttcatctaatctatgcttttacaatggcaaaaacataactggatgttatttgcagagttgtcgtaaactgaagtacctgaatttgtcccgatcacctacaatcaagggtcgttttttgaggtaaagacaccaaaatgttaagagtaaaatttccgctagaagtcaccccatccccaaaatctcactcacatagcaaggaaatattgttggtagggagttgggacttagcgggagggaaaatctactcaagactctaatattgcgcagctgcccaaaactacaggaggtaagagactaaaagcataaacaagttttttagttgtttcatcagagtcttggtctgacactcactgacctcgatatttcagaaagaagtattggaattctgtaactcactactcacagggaacttcaaatccattcggcaaattgtaagttctaacggaattatgacaaactctgtaaatgaaagatatagcttggattacacttaatcgtcttcttcttggtttactctaataggatgtttcaagtaacagtggattagcttcttcagacaggggcaagagatgtaacaaaccaaagtaaccgattgatccttcattttcttatttagatacttagcattgtaatcgagctaacggctcccttggttatatattccataaaattgtagctttcctctggagaggctgaaagaagaaagatcagatgtcacatttgtggcggattttccatcaacaaggtcttcttggttatcccttactagatagacttttttaaattaacatttgattgaaacaatggggtttgtgtctgcaaaaaatttcagttcaggaaagcgttatggtagctgcgatgaagaagagctgaggctgatagagatgatggaagctgaggacgatgaagtggacgaagaagatgactcggatgacgattctgacgatgtatcggatgaagatgagtcagaaaatgatgatgacatgggaatgggatttgatgtcgattatttgttgtgattagtgtttggtaatcgttagtatttcttattgaactagtctagtccaaagggaagttctttgtttcttttcttcttattgggaaatacaaacatacgatatcattaaacgaatttgaaaaatgtgacgttgtggttttggtccaattttaaaagtatttttagcaattattaatccagaaaattaaaagcaagaccacatataaattactctgcaacacgtctcgaattcgtttccaaaaaacgttatggatactccaaaccctaagcgacagtgctgtgatgctttctcctcgatccaaagcaataattctgttacta

SEQ ID NO: 160305 - DNA, 738 bp, Arabidopsis thaliana landsberg
atggctaactacatttcctctgttttgaagtcgctgcttctgcttcttcatcttgtcttcttgattcagcagcatgttgattctgcctctatcgtcaagtttcttcctggttttgaagggtctcttccctttgagctcgaaaccgggtttgttttcaatctctttgtgagattaaatctgtgtttggagataatctaaaagacatagtatactgtttcttgtgtatgaaggtatattggtgttggtgaggaagaggaagtgcaactgttctactacttcatcaagtctgagaggaatccaaaagaagaccctcttcttctctggctaagtggaggacctggctgctcttccatctctggccttctttttgagaatggtgaaatcaaaaacatctttaaacttgttcttttgcgtctctgattactcgttgtaactgtatagatgtacatataagcagggcctgtgaatgtgaagctcgatgtttacaatggaactcttccttgccttggtctctactacatattcatggactaaggtaatacaaaagtgtataatgatatatatgatggagatcatcaaaacccagtgatcattgtatattcttgatcatcattttcctcagaattcgagcatgatattggtggatcagcccgttaaaactgcaatctctcattcaagggctgaactttttaatatatacagtgatacaggagaagccaaccggatccatgagtttct

SEQ ID NO: 160306 - DNA, 1436 bp, Arabidopsis thaliana landsberg; identical to SEQ ID NO: 3311

SEQ ID NO: 160307 - DNA, 2413 bp, Arabidopsis thaliana landsberg
aacaaatatcaactaaggaatacatttataaaggtcgacaaaatttattaattaagaaaacataagaagatagttgaacaaaagaacaaaaccagaagaatcaaatgaaaaaaaatcataaaatgtaaatattacgatcatgtttcctgttaatgaaacaattcaaattccatagtatggcatctagtagacatatggtggtgggggagacttgtaagtgactttaggagaagtagagtagtatagtgtgggtggtgagctgtagacatattgtggtggagaagatttgtagtcgaccttaggacaaggggagtagaacggtggaggtggggagaagtagacatatggtggtggtggggacttgtagtcaacttttggagaaggagagtaatatggtggggtggggagctatagacgtatggtggtggtagagacttgtagtcaacctttggtgaaggagcgtagtatggtggaggtggggaactatagatgtatgggggtggtggggacttgtattcaacttttggagaaggagagtagtacggtggtggtggagaactgtagacgtatggtggtggtggagacttatagttaacctttggtgaaggagagtagtatggtgggggtggagagctgtagacgtatgcgggtggtggagacttgtagtcaacctttggagatggactgtagtatggtgggggtgggaagctgtagacgtatgggggtggtggagacttgtagtcaacctttggagatggactgtagtatggtggtggtggggagctgtagacgtatggtggtggtggaggcttgtagtcaacctttggcgaaggagagtagtacggtggtggtggggagctgtagacgtatggtggtggtggagatttgtagtcaaccttaggagaaggagagtagtacggtggaggtggggagctgtagacgtatggtggtggtggagatttgtagtttaccttaggcgaaggggagtagtattgtggtggtggggaacttttaacatatggttttggatgtggcgcgtacttagggcctttgtgttcatagctgggagaattgtaacttggggtttgaggagatgagtaagggtatgatgtcaccgtagccgcaatagcacttagaaccacaacataaactatgcagttctctattcccatggttcttgaggatctcattacacctattatgctattttatttctttgttttggttatgttagacttgaacatgaacaccctttatatagtcttgctttgtgttctcaacttgcgttcgtgtgtggcacttctaagtacattagagaacgtgctaagttgtatgtttggaaaagtagtgattcgtgaagaaaattaatttatactagattcttttgcaaccctcaatttttaaggattataagttgaagaattgtatggtacattaatcttaagctggttcttcttttgttaaggcaactggatgtgaatcggtcgtgtgagcaacatttgattcacgaccatgttttttcctcatgggcaaccacgttcatcccaaataaaaaaaaaaaaaagcgaagcatctatttacattagagttgcttatgctgtttcttactctctttttttcttgttttttatattattattggcaatagacattattcttctagtaacgatattagacggagcaaaataaatacatgcatcatccatgtgagccgcatttagaccaattagtgtttttttttctttgtttgataaaagtttagaccaataaagtttgtatcgcaaaactagcaatttcatgctttttttttgctcttacgttgtgtgatcaactgatcattaattatcgcacagtacattaacaaaagcttcgttcattctttgtagtgaattaatcaaaagaaaacaaatatgacaatgataaactaacagaatctatcgtcaatgtttcactttgtcatggagagcagcattaatgacattttttaaacaagagcgtacttctggacggaaaaaacaaaatccaaactaaaaagaagaatcgtgctgatgaggaaacaaagaaattaggggagaaggtaactttagggatccacctgaaaacttgtactaaatgctgttaaaaaaaaaaacagaagagaagtaacatttttctacacaaagttgagactcttgaaagcatcaacgatttgaccaaaaaaaaaaatggaaagcatcaacgacaataacaaagaagaaattaaagattcaagtgccactattgtttcaagaacttccctacttcacaagccctagctaggtggccatcaaaacgctcaatagagaacgtcaacgaaccaaacgcttcaacgacccttcaaacacagtcgctttttccacccccaacattggtgcttgcctgcttctaggtgcaa

SEQ ID NO: 160308 - DNA, 434 bp, Arabidopsis thaliana landsberg; identical to SEQ ID NO: 71699

SEQ ID NO: 160309 - DNA, 552 bp, Arabidopsis thaliana landsberg
gagcgtaagggcatctacctttgattggtcttatactctggttgattgcggatttttgaatgttttcatttctgcagaaaggtttattgtgcaagaaccgggtggttagcaatttcgcttttacctacccccttcgcccttttcttgcttgcatcatcaggaaatgcatcagcattacaagctggaacagcgctgatgggtttaagctccgggtttatatttgcagcagcggtttccatcacatcagagctttttggaccaaacagtgttggagttaaccacaatatcttgatcacaaacataccgataggatcattgatctatggattcttggctgcattggtctatgactcacatggtttcaccgggaccaaatcaatgacctcggagtcggtggtgtgtatgggacgagattgctattacttgacctttgtgtggtggggttgcttgtctcttcttgggctaggttcgagtcttgtgttgtttattagaactagacgagcttatcaacggtttgaacaagctcgtataagttcgaacatcaacgactct

SEQ ID NO: 160310 - DNA, 1194 bp, Arabidopsis thaliana landsberg
  unsure (1)..(1194): unsure at all n locations
gaggatcccaatgtttggtgagtttctggatctgtgtttttctaaccaagttgtgaatttttaggtactctgtcggcaaacacgcttccgttgttcgagatctcaaacagagtgattttgacccaagtgaaaagttctggacaaggttcccacgnnagggttctaagaccacaccaccgcatctatctgtggatttccgctggaaggactattgccctttggtgtttaggtattcaatcttttccatttatatgctgtttatttgattctgcatagtttggtgatgtctgcacactatctgggtttgggattaatgtgtctcctttggtttattcttttgttagacggcttagggagctattcacggtggatcctgccgattacatgctagctatctgtggaaacgatgctcttagggaattgtcttcgcctggaaagagtggaagctttttttacttaactcaagatgacagatttatgatcaagacggtgaagaaatctgaagtcaaggttagtcgttggcttttgtcttgacttcttctgtcctatttgatttcctttgtattattgtttcttagctttcactttacattcttaatcattttgtccactaagtgtggttacctaaataattttgacctgaagttttttgttttctttatccaggtgcttctacgaatgcttccaagttactacaaacacgtctgccagtatgaaaatacacttgtgactaggttctatggtgtgcattgtatcaaacctgttggtggccagaaggtttgtgttgttcatctacatttcataagactctttgtttccaatggacaatttttctcatattgtttgccatcttaccagactcggtttatcgttatggggaacttgttctgctccgaatatagaatccagagaaggtttgaccttaaagggtcttcccatggacggtatacctccaaacctgaaggggaaattgatgagaccactactcttaaggaccttgatctcaattttgctttccgtcttcagagaaattggtaccaagagcttatgacgtaagctgccaaattccatctagtcttattctttatttaatttggctgtttgagtgcaaacactttgctcagctgactggatttcatttaccaggcaaattaaacgcgactgtgagttcttggaagctgaaagaataatgga

SEQ ID NO: 160311 - DNA, 419 bp, Arabidopsis thaliana landsberg
cccccccccaaaaaaaaaaccaaaaaaatacagagctaatggttctgcttccatgggagctggaggaagatatactgtctcggcttccacctcgatctcttgttcaattcagatcggtttgcaaacgatggaatgctctttttgatgttaaaagtttcaacaaggaccagttcgctcgtgctcgtcctcagttcatcttcattaccgattccaagatttattcgatagagatcatcggtctcgacggcgttgatccaacgattaagttacatgtgctagactcctctggtatcccttaccgtgaatggaaatttgcttacttaaccatcactgcttgcgatggccgatgggttcttgttttgtaactcttggattagtcccaaggggacagctttttggaatccgtggttgaaaccaga

SEQ ID NO: 160312 - DNA, 1089 bp, Arabidopsis thaliana landsberg
tgtctgagtaaactgctcgttaggaatagggtttctcattatgttatccatatggttagtagtcgccccctctgctaggttatctctagaattcttcatctttattatgtttaatgctagatctagagtaattaactaggtcttgaatccagacaatagatatgcccaccataggtatctgtagttggatctattatttgatgagcttggtttataggtatgtagtaagaatcggcctatctacttaggttaataatctctcggcttctctggttattcttagctatagaaatagggaatttcgcggaacaccacaggttcttccataattagagtttgagtttaagaatggtttgataacaacctagctttcattagatctactaaccaatagtttcctgagaataccctgttcctagccttttatttaatcgtttacacacaatctatcttctattttcttactttgttctcattttatttcattcatgccctgctagcttaatcttgacattgaactcatcgtttgaataaaagaattttggggaaatcgatccttaaatactgcaattgatctcttatttgagtgagtagttcttagggtaatttgaaccgtatcaatagcattagcagtagtatagtccttaagattttgaactgcttttcctggaagttgttgaggatgcttcagagcagaggtcgatacgaactgactctccacatacttgactttggaattcagagcttcaaacttgacatttagatcgttgtaagaacaatttatcttgttgtttagttcagctatcttcttgtcaaaagtcataccgctggcagcttgtccttgaatgatttgttgaataagttgcttaatttcaggatcctgtggtgctggggcttgttgtggttgttgagtgaacctggtggtggattctgctgttggtatccccattgaactgttgttttgggacataaccttggttatactgaacaaatggcttagactgattctgttgtggtggataccttgatcttgtagttgttgtacccttgttgaccctcttggttttgatatacagactcttcagttga

SEQ ID NO: 160313 - DNA, 1093 bp, Arabidopsis thaliana landsberg
aaggctttactgtttctcccgttatgttaattgatcttaaacccttaaaagagtccatagtctgacatagatgctttcatatttttttgtgcagatcgaacccatccgtaatttatttgctgctcttttcctagccagcattgggatgttagttaatgtccattttctgtggacacatgtggatatactgttagcctctgtgatattagttattattataaagacaacaatagttacaaccgttgttaagggatttggatacaacaataagacggctcttctggtaacatattctgactcaaattacttatatgatctatcatgtttgctttcttgcttcaccatccttagtcaaattgatgcaggttggaatatctctggctcagataggggagtttgcctttgtactacttagccgggcctccaatctttacctcatcgaagtaagtaacacaacttggtccttaatggaccatacacataagtaggaattaagaatatataaggtattttgaagaaagaagcttaaagttatgaaaattgtaagggaaactctatctgcttcttcttgggacaaccgctctaagcctggtatgatcagataactctctgtaacctcctcgttttatgttctgtgttcaaggtcaggtaagcatgtaccctggttttggtttgggcaggttacgacaccgctggttttcaaaatgattccaccagttgtacatcttaggatattgcttaaatggttttctccagacagtactatagaggtaagttggtttgatttttggttgattctttcttcgtttatagaacataactaaataaagaaatcttttgttttggtcagaaaggagaaattgtaagatcagaaagtgggaaacaacggatgattctaatgtcacgtcaatcccacagctcctaaaaccacaaaatgttcttctcaactaaagtttggtacactcaatcaattttgacaaaagaaaaatgtggaaaagaagagaaaaagattttaacactaacattgtttgtttcctgggagtaactaacccacaagtccacaacccatttgtttcccttgtaattagcattg

SEQ ID NO: 160314 - DNA, 1035 bp, Arabidopsis thaliana landsberg
agcgattttcgagtttcctgagcaacaacaaccaacgatgcaatcagttagggaagatgaagattcttcttctccgattcatcacgactctaaaacctcttcttctatcccttccggtgataataactccatctgggccgatgtatcacctctcctctccgccgcctgctctggtagtgatcgcaattacctattttgcttgttttagttccacggagataatttgagtcttttctttttgcagatcttcaagaaggtgaactcataaatggagataatttcaatctttttgctgccatgtctgctttagaggtttctattttgtaacaaactatgtatggactattcttagctgtaaacttagcttgtgaggttgctataagtgtataacaaacatggtgtggtgtccttgctttgtattacataatggacccaaagatggattctggtatggtgtctacgttttattctatagatgaagccatcgaaagtggttttgcgcccgtccctataagttccgatagtactgttaatgtgcaatccatcattgacattatggaccatctcctggcgtgtgaggtaatctcttctttacatgtgctcatataatactgtgtgagtttgcaaggtataattgtgataaagagatatgtatgtagctaacatgtcagccttggagttgatttatccacattttgtgtctctactcttttgcaggcaacatggcacatgggtcattcattggcccaaactgtgttttcatgcatctatgttctgaggcctgagaggacatcttcacaggctctattacattcttattgtagggtcatccgagcaacttgcagggcagttgtttctgttgtttcagatgcgcgtacaaatgaagtaattaacttttacaatttttggtcctcttttattcttgtggggctaagcaaatgtttctgtatgttttttggcttttcattaaaggtttagaatgtgttcaatgtttgcttctaaaatcttttgctatgtccaacattcttttatgcg

SEQ ID NO: 160315 - DNA, 1995 bp, Arabidopsis thaliana landsberg
atggatcgacaaaaccggatcacatccggattcataagccggtaaagcgtaccggacggctaaatctcgatcaaaatctctctctctctgaaaagtttagagagagaagagagagagaagagagagagaggtgtttttaaagtgggacttgatatatccctattttcactgatttcatctatgttttaggtataggattttgagtctttatgttatttctcgagtctttttagtgtcttttcaggtattctatgcagtgggtcgataatggagataaggagacattttggagcaaaagctaagaaaaaggaagttaaagacgattttcagttccagtttcagaggagtgttgatcgacacactcctggtatcgatcgaacacactactagtctcgattgacactagtttcggcccagcaaagtcccagatgctttcaagtttacagaagaggaaatttgccccagaagacttctctatttacattattaatccttagatgttttatagggtttatatacattgtttaaacgtaagttttgtttatcaagtttttatcaagctttttgcaaaccctgtttaagagagacataacctattcatcgattgttgtcagagattgattcagttcctaatacaatgaagagatcccttctttcccttaatctgtttgttgtgtttatgctttcatactcaataatgttgtttgctttaatcaatatgtctgagtaatctgcttgttaggaatagggtttctcattagggattcatatgatttagtagattgcccccttgctaggttatctataggattcttcatctttaattatgcttaatgctagatctagagtaattaactagatcttgaatccagacaatagatattcccgccataggtatctttagttggatctattatttgatgagtctagttgataggtgtataataagaatcggcctttttactaagatcaacaattgaactcgttaagaatacatatttaggttgataggttctcggcttctccggttattattagctatagatataggaagttatgcggcacgcccaccggttattccataattagagtttgagtttaagaatggttcgataactatctagctttcattagatctactaaccaatagtttctgagaataccctgttcctagctcttttcccaatcaacctgctgtgtttttactttgtttacttattatttcactcataccatgctagcttaatctcgacatttaactcattgtttgaacaaaagaactcagtgaatttgatcctaaaatactgcaattgatctcttatttgagagagtagttctaggtaatttgaaccatatcaaatttggcaccgttgccgaagttcttgggaatcatcattgagtttagtttagacatttcgtctagttcttacttctattttgttactcacacatttcttgttttcttcttttctgtgtttcaggtgtatgcctaggctatcaaggagcacacaacagaaggggctgatcaacttgtttgttttggattctagaaatcttgaacgcaccaaccgaaaaactcaaagattagcaatggctgacagagtcatccgagctgatgtagaagttttgaaagatgaggatgggcaagcctacaatgaggctagtcagatattggatgatcatggactaatcctacctgaggacaccaatgaggatcaggcacgtctcaatgcgcaattagctgccagagacgcagcagggctcggtgtcgagcgacactaactgggtgtcgatcgacaccttcaggagaaaaatgcatacgcgattggtgtcgagcgacacaacagaggtgtcgattgacaccaaccccaaattcttgtagctattcctccagctgcggaaccacgttctactcttgcggattttaacaggcctgacctgttctatgcaaatcgatcagcgattgtacccccacccttctagagaacgattatg

SEQ ID NO: 160316 - DNA, 1605 bp, Arabidopsis thaliana landsberg
ttgaatctcacgggtgcacggcagatattagtaaatgcgattgggaaagctccaaaagataaggtaagcctgacaacggttaatctggaaattgtttacattattgctcatgttttacttaccgcggttattttttctttcaagcaaaatagatattcaagaaatacattgagatcgaactccagttgagaaatatagataggtgtagaaaattatatgagcggtatcttgaatggtctcctgggaattgctatgcttggagaaaatatgctgagttcgagatgtctcttgctgaaacagagcgaactagagctatctttgaacttgcaatatctcagcctgctctagacatgcccgagctgctatggaaggtaaattttttcagtctaatgcatccaaagaagtgaagatttctcagacttttgaaccgattgatcattaaattctctatattttttgtggcagacgtacattgattttgagatatcagaaggggaattagagaggacacgggctttatatgagagactcttggaccgtacaaagcattgcaaggtgtgggttgactttgcaaagtttgaagcgtctgctgcggaacacaaagaagacgaggaagaagaagatgctattgaacgcaaaaaagatggcatcaaacgcgccagaggttcgaagctactgctatatttattgtgcgtcttgacgattccttgtgacaagttttaactgttctgtatttcctttctttttctcagagatattcgacagagccaacacatactacaaagactccacaccagagctgaaagaagagcgtgctatgcttttggaggattggcttaacatggagacgggctttggtaagctcggggatgttagagtcgttcaatctaagctcccgaagaaggtcaagaagagaaatctgagcagtagagaagatggctgtacagagtacgcattgcatacatataatttcctgatttgttatctttggaatgtgagaatcgaaatgtgaaagtattatttgaatgttttggcaggtatgaagaatacactgattatttgttccccgaagaatcagagacaacgagtcttaagattcttgaagctgctcataaatggaagaagcagaaggttaaagctggggaatgcgtctagtgtggttaacataatgttgttatgcaatactcttccagcttaaaaaatagcataatgtacttacataggtgattatgtcgcttgcggtgttgatattaatgatatttgtagatttagttatacattagatttatataaaaagcttatgcatatggctttaatgctttatatcccagattcctgcttagctcttattcatctttcaaaattggaaatagtggagatagctatatgaacttctttggtcattttcttgtttcgatcttgttatcaaagatggcaaatgcttattttcttgcgaaggcaaaagtatgcacagagacggtagccgaatgccatggcaagcagaacccacagttcttgtaagccgccattcaagtttatcgtgtcaaaggacgatgagctttgcagtgtcctgcagccgcctttgctcccacattcgaaaagttg

SEQ ID NO: 160317 - DNA, 596 bp, Arabidopsis thaliana landsberg
ccgataagtatgatgttgctccatgggctatagaagctgtcttggagtatgtaaagcagagctatggcaatcctcctgtctacattcttgagaatggtctctctctctctctctctcattctctctacctctctctcgttttagtcggttaaatctcttgttaaatgtcaactaataggtcgaccgataaatcgagattcgcagttgaaagaaaaggacacaccaaggattgagttcttacaagcttacattggtggtgtgctgaaatccattaggtgagtaaagtttcttattgcatattttcgtcacttctcttgtcagtgtaataaagaaaaaaaaacattactacatgtaggaatggatcagatacgagaggttacttcgtatggtcatttatggatttatacgagatagtaaagggatacgagtttagttttggattatactctgcgaatttcagtgattttcatcgtaagagaactcccaaactctctgctcattgttactctgcttttctcagtggcaacatcacttttcttggttctcaaggcatcacgcaattgcagaggaacttctcttcttcatcttcttcgtag

SEQ ID NO: 160318 - DNA, 928 bp, Arabidopsis thaliana landsberg
tttgcttcatgattttttatttcttactcaactttttcgtgtatcatgcagatccatctggttttattttatttcctctagttgttcactcgtttgacttggtaatatcatcaattggtattctatcgatcaaaggaactcgcaatgctagtgtgaaatctccagtagaggatccaatggttgttcttcagaaaggatattcgctgactattatattagctgttttgacatttggcgcggtaatgtcattgattatttttgttcattatgtggttgtcgagcagtagctttttgatgttatattgtcagttttatcgatagttgactttacatgcacataagggcccatctaagcaagtgaagctcttgatagtgctgtaatttcaatggaattcactgacaccattgcccctgttttgtagtcgactcgctggctgctatacacagaacaagctccatctgcttggttgaatttcttcatgtgtggcttagttggcattatcacagcctatgtctttgtctggatatccagatattatactgactataagtatgagcctgttcggacgttggctcttgctagctccactggtcatggaaccaatataattgctggggtcagcttgggtctggaatccacggctcttcctgttttggttataagtgtagctatcatttctgctttttggctgggcaatacctcgggactaatagatgaaaagggaaaccccactggaggtctatttggaacagctgtagctacaatgggaatgttgagcactgcagcttatgttcttacaatggacatgtttggtcccatagctgataatgcaggtgggattgttgagatgagccagcaggtatgagtcatgagtggttcgaattatgcctatgttgtatctttgaattttcaagcttctataaaact

SEQ ID NO: 160319 - DNA, 823 bp, Arabidopsis thaliana landsberg
cttaacgtgataaataaaaaaagccactaaaataaaaccaaaacacctaaaactcttatcacgtatcaggtttgatagatttttttgtgtctttaggggaaatggatgaaatgaattggtttgacatggacctccctaaggcagaagttttaatactgaacttctcttcggacaactacgtcttgccaccatttattggtaagatgagtagactcagggtgctcgtgattatcaacaatggcatgtctcctgcgcgtctacatggcttctccatctttgccaatttggccaaactgaggagtctctggctcaagagggtacatgtccctgaactcaccagctgcaccattccactgaaaaacctgcacaagatgcatctaatcttttgtaaggtcaagaacagctttgttcagacgtcattcgacatctcgaaaatattcccaagcttgtctgatctcactattgatcactgtgatgatcttttggaactaaaatccatatttggaataacctctctcaactctctcagcataaccaactgtccacggattcttgaattgcccaagaatttgagtaacgtacagtcccttgaacgtctaaggttatatgcctgccccgagctgatatccctcccggtcgaagtttgtgagctgccatgtctaaagtacgttgacatttcacagtgtgtcagcctggtttctcttcctgaaaagtttggaaagctagggagtcttgagaaaattgacatgagagaatgcagtttattgggtttaccaagttctgtagctgcacttgtgtctctacgccatgtcatttgcgatgc

SEQ ID NO: 160320 - DNA, 562 bp, Arabidopsis thaliana landsberg
  unsure (1)..(562): unsure at all n locations
catttctcatactcattttgaccaccatgtgtatatgcaaaatacgattcaaaagaacggagatttggtacaagagaataccaaaaggataaaaaagtgttaagtagcaaatgaggctttgtattatgtcttctcttggtcattgtctctgagagtgtttatcctatcaatgcgttgccttttccgtcaaccagacgttagattggtgtccgtataacaaagaagtcgtactttattacgatgatgagtgtatgcttagatactctcaacgaaatattctctcgaccgttacatacaaagaaagtgctatcttgttgaacaccgctaatatttcatctaagtaatcaaaatcaagtagatgagtttaggatttggtgtcgtgcacgttgaacctnnnnnnnnnnnnnnnnnnnnatagttctaaaaagttttatacgagaaaggtcatcacaccccagcctttgtacttgttagttcagtgcacacctgatcttacaagacaagactgtttacgttgcctacaaaaatccatcaatggaatgtctctttacacaattggagg

SEQ ID NO: 160321 - DNA, 1167 bp, Arabidopsis thaliana landsberg
actgattgaaaatcatctctttaatttgtgtactcgcagaagaaactcgacgaagatgaaccatcacaaagcttcgagagcgtcgctctcatcatcggcgttactggaatcgtcggaaacagcttggcggagattctccctctttccgacacacccggtggtccatggaaagtctacggcgtcgctcgtcgtcctcgtcctacctggaacgccgatcatccgatcgattacatccagtgcgatgtctccgacgccgaagacacaagatccaagctttcccctttaaccgatgtcacacatgtcttctacgtcacctggaccaatcgtgaatcggaaagtgaaaactgtgaagcaaatggctcaatgctccgtaacgttctccaagcgattatcccatacgcgccaaatctccgacatgtttgtctccagacagggacaaagcactaccttggccctttcaccaacgttgacggacctcgtcacgatccaccgttcactgaggatatgccgagattgcagatccagaatttctattatacccaagaggatattctgtttgaagagatcaagaagatagaaaccgtgacgtggtctatccacagaccaaacatgatctttgggttctctccttatagtttgatgaacattgttgggactctctgtgtctatgcagcgatatgtaagcatgaagggtctccgttgttgtttcctgggagcaagaaagcttgggaagggttcatgacggcttctgacgcggatttgattgcggagcagcagatttgggcggcggttgatccgtatgcgaagaacgaggcgtttaactgcaacaatgctgatatcttcaagtggaagcatctgtggaagattctagctgagcagtttgggattgaggagtatggatttgaggaagggaagaatttggggttggtggagatgatgaaagggaaagagagagtgtgggaggagatggttaaggagaatcaattgcaagagaagaagcttgaggaagttggtgtgtggtggtttgctgatgttatacttggagttgaaggaatgattgatagtatgaacaagagtaaggaatatggcttccttggtttcaggaactccaacaactcttttatctcttggattgacaagtacaaggcgttcaagatcgtaccttga

SEQ ID NO: 160322 - DNA, 296 bp, Arabidopsis thaliana landsberg
ggtaatgtacaccttgtcggatatcaaagaacgtcatgatgctgtcagagacttggaaaagaaacttcttgatttacaacaagtatgttggatttcatatttccttatgaacatctttgaaccagagtgtgatgcaatctgttaatcaaacattttttcttcgtctgttaagtcgttgtatgaattcattcgcctaaaggcagatctaagaggttccccttttcttgcagatattcttggatatggcagttttggttgatgcacaaggagaaatgcttgtcaatatagaatctcag

SEQ ID NO: 160323 - DNA, 853 bp, Arabidopsis thaliana landsberg
tgttctttctttatctgttgatactctgtctgtttttttatcctttcttctatttttcacaaactatcagaaattgaaagcaaatatttatagtctctcatctcttctccatgtatttgcatggaacatttattttggcagcaagattgatgatagtcatattttacggaagcttaaacctcaggatatctggcatctaacagtgcttggttcacttgcaaccacacagagggaatatgttgcacttcatgcgttttctcgacttaacccacaggttggtttttgtttattctcctacagatctcctataggtgctttaaaatatgctgatgttggtgaaacttaatgtcttttttagatgcaaaatgccattctcaaccccagtccggagcagtttcctagttacgaggagcaaacccctgcaacgcctgattgtttcactactagctttgttgaccatttacatagaagctttaatgctccgcagctggctgcaatccactgggcggccatgcatactgcagctggtactagtagtggggtgaagaagcaagaaccatggccattcactcttgttcagggtccgccaggaacaggcaagacacacactgtttggggaatgttgaatgttatccatttggttcagtatcaacaatattacacttcgttgctgaagaaattagcacctgaaacctataatcaagctaatgagtgcagcagttcagataatattttgtcaggctctattgatgaagtcctacaaaacatggaccacaatctcttccgcaccctgcccaaactctgtgctaaaccaaggatgctttgtttgtgctccttcgaatgctgcaactga

SEQ ID NO: 160324 - DNA, 773 bp, Arabidopsis thaliana landsberg
tactatgaatctctcattgttgaggcgagaagcaagcaagaaagtagtattgccgaagcagtagagcaaattgttgttaacacaatgcaggagcttcagaataagattgaaaaatgtgaagaggaaaaaagtggtatcactgaagtaagagtatctctgcctagttgatcattgttcaattctcgaaaggtttccttatgcaacattgggttttcaggttaacacaaaacttataaaagagcaggatacttggcggaagaaggtcaaagaaatagaagagaggtgcaagaagtttgctcttctttcttgattttacataaacaatcatcagccatagtagaggaatgattttatcttttggtgtttatctagggaagctgcattgctaggatcaaaagacgagatgataactgatcttcaagaacaggtaagtttcttatacttattgaggtttgctattaacagttaacgaatgacctggtaaataatggattgtacagataagagatattacggtcttcattgaagccaagaaaaccttaaagaagatgtcatcagatacggatggtatacgcgaaggaaccgtcttaccggtgcctatcagtgccgagccagtttcctcagttagaaggcaaaagaagtcaaaccggagaaagtaaagaacagatttggtatgcttatagggatttacttaggtttgatgtatattcaggactactacattgatatatattggattaggtgctattcatttgagtgttcatgatcacgtt

SEQ ID NO: 160325 - DNA, 1166 bp, Arabidopsis thaliana landsberg
  unsure (1)..(1166): unsure at all n locations
gggggggcctcgatattgttgacaagctattttctgaggtcagttactcgctctatctatggggcccatttaagggccactttcaatcagtcacgtgaccttgttgcattcttcttattcagatgattgctgaggaagaagctataggagcatcaccaaagtcactgcctttacatttagaggatagcgcttctcttccccaagaagaaccgatttcaaaaccctcgggagaggtcaaatcaaaccccttgggaaagatcaaaggaagtcgtcgagaagaagtcaagtctaatccccaagaagtaaccaaacccaatcccaaggacgaaatgaagtccagtccccaagaggaaaccaaatccaatcatcagaaagaaatcaagtctagtccacaggaagagatcaagaagtccaatggatctgatgatcatcacaatcatcaacttctcagtcagaatgattcctactttcttgcaaaggtaatacctttcaaaacactaaacttggttagagtgtgattatacaaatcctgaataagagttatgttgacttgtttcgacaggttgtgcacccgtttgatgctcaagccccaggggaactcatcctcgctgtcgatgattatgtgattgtgcgacaggtacatttgccgccacccttttcaacaatacacacataacagagaaaacaaaatgaattaacaatcttgttctgtttgatgaaacaaattcaggtggctgggacaggctggtcagaaggagaatacaagggcaaagccggatggttcccgtctgcttacgttgagaaacaagagaaagctccggcgagcaagatcgtggaatcaaacgccaagtaacaatgatccctttctttaacatatacatacaaaaagtatgtgtaagatatgattgtgtttttcttccttctnnnnnnnnnnnnnnnnnnnnnatatgtttccacgagtaaatatgatcttgtaagagttatgatttgtgtgttttcttccttttcttcttatgtatcaacatgagtctaactctagactcttgagtcatatctctacgcagttgtgagaatcctgttttatcttttgtttgataagatcctctgtttcttctgtaatttactctgataatgataatgatctttcttgtttcagtaaagtttga

SEQ ID NO: 160326 - DNA, 745 bp, Arabidopsis thaliana landsberg
tcatcttgcttccatcactgtgattgtaactctatttgctgatacattttccagctccggtggctcaacctccatctctggcgagcttctccgtgaaccatcatagaaagctggctctttaggcaaagaaagagcgttgttgccatcaccgtatatcatcgacacaacgtctaacatacttggtctatcgtctgcgttttgttgtacacacaacagagcaacttgaacacatctcaacacttgagggttctcaactgcagaatctcccaacgacggatctatcacctcgtgaattcggtcctctttaaacagattccacacctgaaaaaaatacaaagtttcagagactcaaagactaaacaagcaagctgaaaatgttaacatttgaaagaggaagaaatttggcttttacatgaactatgagattcagaggtccttcggagtcatggtggaagctattgttcttccttccacaaatgatttcgagcattagaactccgaagctgaacacatctgattttgccgagaacagtccttctctgaagtactccggagacatatatccactacacataatttcaacacaagacatttagtcagaaattgatgcctatgaatgatgagagaatcattgtttctagtcactctcaacttacaatgtgccagcaactcttttggtgttggctctggattcttgcgctccaaatatccgagccattccaaaatcagatattttggggttcat

SEQ ID NO: 160327 - DNA, 368 bp, Arabidopsis thaliana landsberg
ccaaagtgacatgagacagatcttacctttgtcacatgttccgtgtcacattctccaaagtgttaaggacttagctgtaccagtcgttgtctccgagtatcttcacgccaatcttggctgtgaatccgtcgtcgaggttattccttctgatggtcatcttcctcagcttagctcaccagattctgttattcctgtcatcctccgtcacattcgtaatgacattgctatgtgattgtaagagatttaattagttaattattaaacgatgtaagaaaagttgaaaaaaaatatctgatgtgatatgtctgtctagtctattgagaacattatttcgttgtcgtttggttctgattcgtttatcttgagta

SEQ ID NO: 160328 - DNA, 737 bp, Arabidopsis thaliana landsberg
gtgactactgcgatcgtggacccgagactcgaaaagtcatcgacttcttgatctctttgccggagaaacatcccgatcaggcccatgtctttcttgccggaaaccacgactttgcttttgctggcttcttgggtttgttacctcgcccttcagatgggtctgagtttaaggaaacgtggaaagagtactcaaaaagtgaggagagagaaggatggtataaaggtgaagggtttgagaatatgcatctccaaagcaggagatgggcgggaaagattagggttcagttcgattattccgcatatggagtgttgtataatggatcaatatacgatgcggcgtctacttttgaatcttatggcgttactcatggatcttctggtgacattctccattgattcttctttctggttatagtttatgattagacgtttgtctttgtcggaaactgtaaatataggtcaagtgatcgatcatgtaattggtgatcagtcaaataagtaatgattggatctttggttaaccaaaaatataactgaatctttctcgatttggagttttcatattctcatctctgtactagtgaaattatgaaattttataactgttttgaatctattggtattggttttgaaacttgtttgttttcttttccttgatagatttgataaaggcagtacctgagagtcacaagaaattcttgaccaatatggtttgggtacataaagaggtaagggctt

SEQ ID NO: 160329 - DNA, 552 bp, Arabidopsis thaliana landsberg
attcccttacattctttataactactgttctgtagcaactcgtgttaagtatggtttttacatcacgttctctctcttaggcatggtgcctgaggtttttgtcgcaatctacacgtaagtcagctttctatctcttcttttcaattccaaaacattttgttaggtccaatactgtttacatcaatgctcattgcacctactcagcagaaaacatcccataataagaatacttagtaaatcctcacattacactattccactactgtagaacagttttagcttgtgtctagcttttattttagcttctagaagcctaagtaaaaagcccttttcacggatgagtcaaatgtctcgtttctgtgttgcagagggatacttgtaaggacattagcagaagcatcttctgcagaagaacagggtctctcggttacacaggtgattctcaacattctcggctttttagcaacagtggctacaacgattctcatcacaaagtatgcgaaaagacagctggagacgatgaagaaagaggacgaagcattgttgcagtaa

SEQ ID NO: 160330 - DNA, 275 bp, Arabidopsis thaliana landsberg
cttttctgaaccaaatcattccaagcctttgccgcttaatcctcgcaatccgatttctagggtttagaaattagattttgggtttggatctcttaatcatgtcgaggcagaataaagatgaaaaatttgtttttgatgacggagaagacgaagacagagaagatccagtagccattacagaagtcgacaacggcgaagaagaagatgatgatgaagctaatgaagatctaagcttgaagattttagagaaagcattatcgaggcgtgatgttggg

SEQ ID NO: 160331 - DNA, 1785 bp, Arabidopsis thaliana landsberg
gttgtaaatggactgcttgaaagagaagactggaagactgccataaaattgccgatcggaatggtccctgcaggttcgttctgcctcatacttctcttgtcttgtgtgtccatgtgaaagtttagatgtaaaggttatccttaagtaagattgaaacagttttctgtttatcataccaaattgatatcttgtgtatgagaaactttagctaaacatttttactttgcggttctttgtgtgcactaacattcctaatggcaggaagtggtaatggcatgattaaatcattgttggaaccggtagggcttccttgtagtgcaacaagtgctactatttcgataatccgaggtcctgctccatgccatacgatattcaatctttcaaaaacatttcgactttcctaatgaatcaactcactgtcacactatttctgtattggcaggtcgtacacgttctctagatgtagcaactatctcacaagggactaccaaattcttcagtgtcttgatgcttgcttggggtatgcaaggacttctacttctttgtagtatagtactctagaatgtagaacttgatttgcaaatgcaagtagtggctgagcttactgaattattctgttggttgtactgagagaaattcattttatttcaggtttagtggctgatatagacatcgagtcagagaaattcagatggatgggtagtgctcgctttgatatctatgtatgtttagttgaacatttgaaaattttctgcaatgcatgttttaatatgcgttactcaactaagttaaaggtggaggttgaacaaaaaaaaaaaacaaaagagattgtgtgtttctaactggatgctgttttcattcaactaaacaccttgcgttcactcttctacgacttgcatttgcagggtcttcagaggataatatgcttaagacaataccatggacgaattctatttgtgccagctcctgggttcgaaagctatgggcaacgagccagttgcagtatagataaagagccatctggtagtgataagacactcgtataccaaggacctgatagtaaacttgaaaatctggattggagagaaatgaaaggcccatttgtttcagtatggcttcataatgttccctggggtgctgagaacactttggctgctcctgacgctaaggtcagttaaacattttgaaaccacgaaaacacgatttttttggaatccttttgcgtttacttgctataaaatcttgaaagcttcatatggtctgattaacagttttctgatggcttcctggatttgattgtcatgaaagactgtcctaaactagccttgctatcacttatgacaaagttgagtgatggaacccatgtccaatcaccatatgcatcatatctgaaggtttgccatgcgaacccaattttatagttgtaatatttcatttgatgactttgatgtctcttttcgaaatgaatcggaattttatgattgattaaaaagcttacacgttggtttttactgttgaaaaggtgaaggcattcgtactggagccaggtgcacgcatagacgaaccagacaaggaaggaatcatagattcagatggagaagttttggcaagaggaagaaaatcgtacaaatgtgatcaaaaggctttgatgtcttacgacaagcttcaaataagtgttgatcaaggtttagccactctcttctctcctgaataattctgactgatacatgagatgtgatgagatgagatgaagttgtcccttgtggctataatttgattgatgga

SEQ ID NO: 160332 - DNA, 1101 bp, Arabidopsis thaliana landsberg
ctgctactttgttcgagtgattgctgacatgccgtcagcgtcggagattgttgacaggtttgtttgtccgttttttttgtttttgttttcccgcttgtgtatgtgtgctaattgttcattgttaaagattttgtttttacaggattgttgttgtttttgagtggtatcaagttccttaaagtaacttcttttgtttgtttagtagttgaaagctagaaggttttcactttagggtttttggggtttttcgtagacagaaatttgttaattttgggcacaatttgtctcttttggattacgttctgtgcgatttgtggcttcgagttcgtgtggggttaagagacttggaaattagaggatctttagctggaataaacgttaaatgtggtacctttcctgagtttgctctgttctaattgtggtcgtgatggggtttctttttattcgctgtgatgctgcagattgtgaaaaattcttgtagctacttcggtgttggtagattctgtgatgcttaaaaattgtttctttgaaggtgctttgatcccaagtatagttgaacatgttgctttaaatcttgttaagagaaaaaatgggacttgcttctgtgcccaatagttcacgagcatgttgctaatcttgcttctatgcccaggaaacggaagtctcgtggaacacgagatgtagctgagattctaaggaaatggagagagtacaatgagcagaccgaggcagattcttgcatcgatggtggtggttcaaaaccaatccgaaaggctcctccaaaacgttcgaggaagggttgtatgaaaggtaaaggtggacctgaaaatgggagttgtgactatacaggagttagacagaggacatggggtaaatgggttgctgagatccgtgagccaggccgaggtgctaagttatggctcggtactttctctagttcatatgaagctgcattggcttatgatgaggcttccaaagctatttacggtcagtctgcccgactcaatcttcccgagatcatcacgaatcgctcttcttccactgctgccactgtgtcaggctcggttactgcattttctgatgaatctgaagtttgtgcac

SEQ ID NO: 160333 - DNA, 2344 bp, Arabidopsis thaliana landsberg
atgtcttgggacgacggaaaacacacgaaggtgaagagagttcagcttacgttcgatgatgtcatccgatctatcgaggtcgaatacgacggaacctcccttaagtcccagcaacgtggcaccgctggcaccaaaattgacggagttagtaaacaaagtgttcacattttagtaaacattgttgttcgttaatcacgtaacgttttgtttttccagtttacactgagctctgatgagtatataacggaggtgaatggttactacaaaactacgttttcgggagaagtcataacgtcgttaacgttcaagacgaacaaaaggacatatgggacttacggaaataaaaccagtagctacttttctgttgccgcacccaaagataaccagattgtcggttttcttggaagtagcagccatgctctcaactccatcgacgctcattttgccccagctcctcctcctggtagcaccagagctaagcccggtgctagtggcatcggaagtgattctggtagcattggtagtgccggaactaaccttggtgctgatggcaccggagaaaccgaaaaaaacgctggtggctcaaaacctagcagtggtagtgccggaactaaccatggtgctgatggcaccggagaaaccgaaaaaaacgctggtggctcaaaacctaccagtggtagtgccggaactaaccctggtgctagtgctggtggcaacggagaaaccgaaaaaaatgatggtggctcaaaacctagcagtggtagtgccggaactaaccctggtgctagtgctggtggcaacggagaaaccgaaaaaaacgctggtcgctcaaaacctagcagtggtagtgccggaactaaccctggtgctagtgctggtggcaacggagaaactgtttccaacattggagatacgaaaagtaacgctggtggctcgaaaagtaatgatggtgctaaccatggtgctagtggcattgaaagtaatgatggtcctactggaactaactctggtgctggtggcaccgggggaattggagatacggaaagtgatgctggtggctccaaaaataacactggtagcggcggaactaaccatggtgctagtggtattggaagtaatgatggtagcactggaactaaccctggtgctggtggaggaacagattcaaacatcgaaggtactgaaaataacgttggtggcgagaaaactaaccctggtgctagtggcatcggaaatagtgatggtagcactggaactagccccggaggtaccaaaagtgacgctgacggcacaaaaactaacacgggaggcaaagaatctaacaccggaagtgaatccaacaccaattctagtccacaaaagttggaagcacaaggaggcaaaggaggaaatcagtgggacgacggaaccgatcatgatggtgtgatgaagatacatgttgcagttggtggtctaggaattgagcaaattagatttgattatgtcaagaacggacagttgaaggaaggacccttccatggtatcaaaggaagaggtggcacttcaacggtgcgtaaatatttattattatggtttaattatgtttttcgaataaagtgttaattcaagattttttataatcatgattgtgcagattgagattagccatccggacgagtatcttgtttccgtcgagggttggtacgactcttccaatatcattcaaggaattcagtttaaatccaacaaacacacttctcagtactttggatatgaattttttggagatggtacacaattttcacttcaagttaatgacaagaagatcattggtttccatggttttgccgactcacaccttaattctcttggagcttatttcgtttcaatctcatcctcttcttcctccttgactcctcctcccaacaaagttaaagctcaaggaggaagttacggagaaacatttgacgatggtgcttttgatcacgtgagaaaggtttatgttggtcaaggtgattctggtgtagcgtatgtcaagttcgaatacgaaaaagacggggggaaagagacgcgagagcatggaaaaatgacattgttaggaacagaggactttgaggttgattcaggcgattacataacatcaatggaggtttatgtcgacaaagtctacggttataaaagcgaaatcgtcgttgctcttaccttcaagacctttaagggtgaaacttctccacgttttggaatagagactgagaataaatatgaacttagtgacggtaaaggaggaaaacttgctggtttccatgggaaagctagcgatgttctttatgctattggtgcttatttcactccagcagcaaattaa

SEQ ID NO: 160334 - DNA, 770 bp, Arabidopsis thaliana landsberg
atgagtttgtggtatatcattgttgcattcgtcttcttttcatctatgatcattgtaaggaacactagaaagacaaagaagaatctacctcccggacccccaagacttcctataattggaaacttgcaccaactgggatcaaaacctcatcgttcgatgttcaaattatccgaaacatatggacctctaatgtccctaaagtttggaagcgtgtctactgtggtggcatctacaccagagacagtgaaggaagtcttaaaaacatttgacgtagaatgttgttcgcgaccatatatgacttatcctgcaagagttacatacaatttaaaagatctctgctttaatccctatagcaaatattggagggaggtacgaaagatgacagtggttgaactctacaccgcaaaaagggtgcaatcatttcaacatacaagaaaagaagaagttgcatccctcgttgatttcatcaaacaagctgcttcattggagaaaccagttaacttgaacaagaagttaatgaaactatcagcaagtgtgatttgtagagttgcatttggtatcaatcttcaaggaagtaaacttgagaatacttatgaggaagtcattcaaggaactgtggagttggtggggagttttgcagcagcagattactttccggttgttggtagaatcatcgataggatcacagggttacatcgcaaatgtgagaagcttttcaaggcgatggaagaaaaaattgatcaatctataaagcatcacctagaagatga

SEQ ID NO: 160335 - DNA, 549 bp, Arabidopsis thaliana landsberg
  unsure (1)..(549): unsure at all n locations
cntctgtctcgcaggtgaagtgtcatatttcacctttgcaaaggttctcgccggcccaaactatgaatcagagggtctcgtcacagctgatcttggtatatatatacactctcatagtcttctttatattcatcttaggctatcgaaaatgttgactttttaagctactcatattgatagcgttatttttttcatcaagatcttggtgatatagcaagagccaagttatacttcgatgtggttggacattactcaaagccagatatttttaacttgaccgtaaatgagcacccgaagaagccggttacattcatgtcgaaggtcgagaaagcagaggatgaatcaaacaaatagtcaagatttgcaattcgtctactgaagttaagtcaagttcgaaatgttttttttcagttttaaagttgatgtgcaagtttatttttctttctcttcaataatgtaagaggactatttcactatgctaaataaaaccaattggttctctcctcttgatattcaattgtcgtgtaataatgttttgttcaattccag

SEQ ID NO: 160336 - DNA, 220 bp, Arabidopsis thaliana landsberg
ttctgggttttgcttgaaatgtgatttgggtttctggtttgatctcatagggttcgagtagtgtcaaaagagaagtgtgagagatgctgacgtgtatagcttgcacgaagcagcttaacaccaacaatggcggatctactcgagaagaagatgaagaacacggagttattggtacccctaggactaagcaagcgattaaatcactgacgtcacaggtaga

SEQ ID NO: 160337 - DNA, 167 bp, Arabidopsis thaliana landsberg
  unsure (1)..(167): unsure at all n locations
gaaaaaaagccacattaagacaagatannnnnnnnnnnnnnnnnnntaaatgacatttatagctcgccaaacgaatctgcccagcatcacaagaattgatgaaccgtgcaattatcggtatctcataagcagctttctccttcgacactggaccacaggtaagaacc

SEQ ID NO: 160338 - DNA, 1020 bp, Arabidopsis thaliana landsberg
atgtcgactctagagtatcccctcattaaggacttctacagtagccctctaactgcaaggtatatatatgtcccaattcccaaagaatgatttgtctttggttctgctcactgttttcaccaatgctgtatttggccatatgaatttgatagatgccattattaatgtttgctcatgcagtggtaagccccatgatgagaccatgctagcaaaacttgaaagcatttatactggctcaggtgaccaaggatcaacgatggtcagtctgatacctctgttggtacatcttccccttcttttttcagtgcctaattctatctgtatttttataccagtttgcgtttaacatggaacaagggcttcctgttttgcccgaatggttatgtttcaatcgagtgactggacgtgccaggaaaggcatacacattggaccagctcgtttcctttttaggtatgctaacttcctttgaggcatataattttcttgaggtctctatttaccttttgggattcgaatcatcatttctaaagttttatatagtgtatcttaccttgttcatgtttatagtctgtctggtggacatgtggtgggaaaattttcacctcatgaagcattcgtcatcggtggaacaaacagcgtaagaggttacgaagagggcgctgtaggatctggtcggtcatatgtagttggttcgggggagctgtctttcccagtggtgggtttttctttgaacattcctaagatctcatttcacaatggtgtaaaaatcatgactctcattcttaccctattgtgcagagaggaccggtcgaaggcgtcatttttacagattatggcactgatatgggatcaggatccaccgtcccaggtacagactaggctttcggtttttttttctccttctgagtctttccatatatgcttgtaatagctttagaataacaagaaaccttcatctttgttattttctgccctttaggtgatcctgcgggggcaagactgaagcccgaaagcggtta

SEQ ID NO: 160339 - DNA, 2228 bp, Arabidopsis thaliana landsberg
agacacatccaattcagaaatataaccattgttctgattatgatacatcaatcatcaatcggaagaaatcgattgaaccttctcagggagagacagcgcacgactctatgagtaatatacaaaagaaacgattgagaagatttacctggcgacactgagaagagacgaggagggaggtatgtgactatacaagctttcgacaactgccgatggttacatgcgctgctgctccgattacctaccatcaccacttacgaaacttggattgattcaatcgaacaaagaccagtgagatcagaagctaagaccatgccccattggttaggtccttaaccatgatccttaactttattttttttattaaaattttgctttttgtaagttaagaaactaataagagtctttaacaaatttctactccaatggttaagaaacaatgggtccttgagtaaaccaaaatcaaatgtttgcaaaataatgtcttccaatacaagcatgaaattcataatagcaaagagaagagatgagatttgaattgctagtatcatcatttgctcaagaaaacacaatataacaatacgctagcatgtcataaacacagttttcagttctgttccaatattttcagaaacagagaaccattttaatatcttgagtgcacaaaagaaacggtttccagttgtgcttcaatattttcagaactgatttaatacctgcagcatagttggcagcgcatgtgcgtaagcacaagtgtcaaactttgttctacactaaaataatagctacccagaaattaaaagaagaagaagaatgagagaaacgaagggagaaatagagagaaagagagattacgcatgtggagagctcgagtaatttagtgttgtggatgattgaaccagctatggctatgctaacaatggctttgccatcttcaaccatcagattataagagaaaatgttaacccaagaatgattacgaataaagaaataactgatttcagtttacatcacaaacatgtaaataccgtgttcactagagccgtattagtctattggacgagattattcgagcgacccaagcctctcggacaccagaaaaacgtcaatttcatgaagagtggatttacaaaaaagtaatggtacaagtagagttttgaatacacatacagtatgtagctacaccattcacaatctcacgacgacggccaaatcaaaatgaaaaaccaaataatgaatcaaataataagagaggaggatcatctgggagcggtggaagtgccagattccatgttttcgagagatgttgaatccatctgcagagacatagccctcaaggcatctccgttttgggaggaggtcacagggactcctcgttcttgagctgccttgaaataggcgtagggaccccatccttcttcgtggtaagggttggggtagaactgacggtagcagaaggcggctacaagggtgccaatgagagctcctgcgaagacatcttgccagtggtgccagtagtcatccacacgagatatccccacaagacaagcggcaagcagagggaagatcacgaggcagagtttagccacatgtccttcattgttgaaggccttgattttgccagagaggtaaagggaaaggaatgtaagccccgcaaaggaccaggaagtgtgtccgctcgggaagctcttgtggccttccttgacctcagctgccttgccgtggcataccacacctcccaacgcatcatacagctctttgccgtcggggaagcagcgccagtagaagttaggacgagggcgtccggtggctaccttgatggagtcagtgatgacaccagttatcaagacggcgaagagcagcccgaggatgctgtggtgcagatcgtacacacatgtcctcttcaggtagaagcagacgaacactatgatgggaagaagcacagcgtacacagggacagaccagataggtacggtgttgtccttgaaagggtacttgaggtcagtcatcatgtcttttcccacgtagcggtagaaaggagagatgaggttcaagcctatctcgatggcaatcaagatgacgagtatgatccaatcgtgcttgtgtttagaagcgactcttcctccatgggactttatagtgtgaacactaagatctatctcctgcatcctccctctctgcgcctcctggtcctgccaccaaaaacacaaacaatcatcacagtcaactaa

SEQ ID NO: 160340 - DNA, 805 bp, Arabidopsis thaliana landsberg
atgcagtatctccatgcggccttgtctgagactatgaggctttacccacctgtgcctgaggtaaaataacctgcgcttaaaggattcttctatgtcctgaacatttcaagagctaatcaaaccaaataatggggatttaagttttttcttttcttatctttcttggtccttccaaagcacatgaggtgtgcagaaaatgatgacgttcttccagatggacatagagtgagcaaaggggataatatctactacatatcctatgcaatgggtaggatgacttacatttggggtcaagatgctgaggaattcaagccagagagatggctcaaggacggcgtattccaacccgaatcacaattcaaattcataagctttcatgtttgtacactctcttgctgacaaactaagggatcaagagtaaggtattattttctaatatctgagatgttttatttctttggctgtgcatgtaggctggtccaagaatctgtattggcaaggatttcgcataccggcagatgaagatagtatcaatggcacttcttcacttctttcgcttcaaaatggctgatgagaacagcaaggtgtcttacaagaaaatgcttacacttcatgtcgatggaggactacatctctgtgcaatcccgaggacaagcacttgagtacttaaccagaacactttccatactttcatagtgcctccatgagttttggtcaaacattcttaatgaaggtggaacaagacaccaagaaatttccatgtaataaataatctgcttttatagatctttggatgactcagcta

SEQ ID NO: 160341 - DNA, 1640 bp, Arabidopsis thaliana landsberg
  unsure (1)..(1640): unsure at all n locations
atgggtttaacaaaaccaactgctggctttccaagagctaggagtctaaattctacagtggtggctcgcaaaaccaaatcaatttaccttccacctaaaaaggttgagcctcttagtcctcgtactcaacagattcgtccaggggtcatgagacaagcttctaaagcacaagcagtaggagaaggtggaatcttttgcttctctctccgttttcttaatctatttcgtttctaaaggcctaagatcccaaacttcttttactagatgactaaaaacatatcttgctgagttttttattggcttttcaagggtcaaaatctaaagttggcgatggagctaaatatcatgattccaacgagatatgccgatcaattttatcagagaaattgttgcaattacttccatatcgaccagctttgcaccccatttggaagtgagttcctgatccccccaaacaatatatctttgttgctttcaaattttgtatgcttcggtcagaccactctatagtactcctactaatttcatgatatatgtttgtgcttagccttatctgcgttcttaaaaaggaaatttccttagtttctttagcattaggctttgttgcattgctgaaaaacctgaaactgaagatgtgcatattttatatcttcctctttctgcctctataccaggggacgcatagtggattctgctacaccatctgagtttaatggcgagttcttagctcaaccggcatctaaagtccgagggaaggcttatatactttcaaaagctattcctgtcttactcaaggtcaaattggttcctataggcaatcttctgagtggtttgtttatgaacagaaaaccagggctttcagatgtcgagatgtacattttgccagatgacaagaacacaaaaaggtaatcaagccactatggctacaaaggaaaagcttcttgttcattgttatcacaaaatttacgacgattgcaggtttacagcggaacgtgatcatatctttgaggccatgaggattcgcaatgccatgatgaaatttaacatcaatggcacaccattgttgatattctcttcaaaactactggacaagtcctcccagagtaagcctaatgtatgcttacagatctatcattggcttcaaaaatatgaataaaactcgttttgtgtttgcagttatcatcaagatgcagaagaaaacaaataacttcctttgggggatttttctcctgacgaaaaagtctttagcacttcttccaggaacatcgaatcaaactccccaacattttgatgatggatatgtagttgacaatgacactgaagtaggctaattccttctttttctaaatcaaagacccttcatcaagtggttgttcttgtctctgatgtaatgtgtttcgcttgtttttcattgcctctggtggaatcagcctttcttcagacgataccaccggaattgtgggaagcaattgcagagacattatggtcagagggattgatcaaatggggagtggcttatgttgtctcaaggaaattgctatatagattagtgctactaatctctgattgtactgttctatattggtgtaagaagtaaaaaatntaacccttgtgttactttttacctcctgattgcttgt

SEQ ID NO: 160342 - DNA, 915 bp, Arabidopsis thaliana landsberg
ctttttcataaactctctccagagaaaactatatgagcttgagagaaatgagcgaaacaaaacccaagagagattctgagtacgaacgatcaaacatcaagaggatgagactcgatgatgatgatgacgttttacgctcaccgacgagaactctttcttcttcttcctcttcttctctggcttactcggtttcagattccggaggtttctgctccgtcgcgttatctgaagaagaagacgatcatcgaagctcaagcatcagctctggttgttccagcagcgaaactaacgaaatcgctactcgtcttccattttcagatctggaggtgaaatttcgaaactcgagattacaaattttgaaatttctctgtttcacaataaatgctctctgagcaagatctgattacgtttttttggattaattaattttgtttccgttttcaggctcatgaaatctccgaaaccgaaatctcaacgttactcaccaacaatttcaggttaataactaaaaaagacgtttcaaagatttttcaatttcttcattgtttcgtctataaattcataatttttggaatttcacaggaaacagggaatttcatcaagcgagaatctgggagaaacagcagaaatggactcggcgacgacggagatgagagatcagagaaagacggagaagaagaagaagatggaaaaatcaccgacgcaggcagagctagatgactttttctcggcggcggagagatacgaacagaaacgattcacagaaaagtgagtcttttttagacccacacacacgcgcatgatagcagagatccttaacttgcagttgtttaaaacatgtataggtacaactacgacatcgtcaatgatacgccgcttgaaggtcggtaccagtgggttagtctgaaaccttag

SEQ ID NO: 160343 - DNA, 384 bp, Arabidopsis thaliana landsberg
gaagaaagcggttcatcgtcacctataagcactccttatctatcaggtgctaactcacgcgaattcaatgacaccgccatcgaaaaggaataaaagaaggagtctacctggcatcatcatagatgtcgtcctggtttctcttcatgtggtggaagtttcatggagaggaggaagaagataagttctgcaactccagctgtttctgtagaatgatatgtagagactatgaactttggaaatgttttgtatatgaaagcaaagagagggacagcatccagagctctcacagtacccaagctctgctgaacttgacagggaactaaaatatctttgatgataagagattgaatccataggtgaacaggtaatgtgaaagaaataaat

SEQ ID NO: 160344 - DNA, 417 bp, Arabidopsis thaliana landsberg
gtagtcaagattctgaaagagaaaggtccttttcttgtcttgcatctcagatatgagatggatatgttagcattttctggttgttcacatggttgcaaccccgaggaagaagaagaactaacaagaatgaggtataaaaaatccccgaaaaatcttcctgcttttgttccgactttgatggatctattgatgtaaattctctttgtttgcagatatgcttatccatggtggaaagagaaagtcataaactctgagctgaagaggaaagatggcctttgccctttaactcctgaggaaaccgctctcactctgaccgcgttgggtattgaccgaaatgttcaaatttacatagctgctggagaaatctatggtggtcaaaggcggatgaaggctttaacagacgcttttccaaatgtg

SEQ ID NO: 160345 - DNA, 467 bp, Arabidopsis thaliana landsberg
atcccaaagacaaaaggaaggatcaggatccagaggacgaagaagacgaggaagaagacgaagaagaagattctgaggcagaaacaagcgatacatcatcatcatctgccaatcctactagaactatgaaggagactactagtggtggtgctgcaaagaagagttttttgtccaagtacaaacagcattttaggaatttttaccaggctgttaagtttcccggggtcaaggagcgaaagggaaattctgatgtgataccagatgatgaggagactgaatatgatggcttagagatgaagccgatgcagaataataatgtcaaagaggaagtgacagtagtagtgcaagcaattatacctgaaatttcagaaccctctttgcttttatcggagcagtctagacgctccctttatacttcacttcctgcgcttgttcaagggaggaaatggatattgctttataggtga

SEQ ID NO: 160346 - DNA, 2142 bp, Arabidopsis thaliana landsberg
acccctcctttttcccataaaattcatcaaaattatctcaaaatcattcaccaattctctcttcttatggagcttttcccttcacaacctgacttgtacttgaagatcagccgaagaagagaagaagaacaagaaaaagaaagtcaagaactacaagaacaagaagtcgaaaggagattagggtttcagagtaaagcctcagatttagacaacaagtcttcaaataatctcatccacactctccagttcacttcaaacaatgaagccaccaagattaatagtaatcaagaacacaaggaatctctcgatcaagacttgagatctatttttatgatgagaccaataagaggaatccctctttaccagaatcaagtccttgaccactactactactcatctacctctcccaatcctttcttcttcagtgaagtcaacggtcaacatgctagtcgtcgcttaatcacaaaccctaattgtagttttaatctccacaaccgtcatcggcgtcaagctcaaccgcagccgccaagattcaccgccaaaagaggagtaagggctccaaggatgcggtggacgacgaccctccacgcccattttgtacacgctgttcaattattgggtggtcatgaaagtattgtcctttttcactattacccctttttatttaattgaatttatatctctttttcatttttaacaaaaagaataatgaataggcttgatcaaaaattctaattttattgacttagtaattatgattaatatccaggagcaaccccaaaatcagtacttgagctgatggatgtgcaagatctcacattggctcatgttaaatcccatctacaggtaatcttcttaagttacaggtacataatgtataggtaaataaatgaatttattgtattatggatttgaatatgcaaatgaaccaaacccactgcacttttttatgaaatggctaaaagaaaaaatgtgattaatttggacatggttaaacttttggtcgcccccatatatatatatatatatatatatatatatatatatatattaagaaattatatacaaagtgaagaaagaaaaaagataaaaagagaaggaatcaaaagcaagatatagacaaagagtaagagaaagagtccttttattactagagatgcagtagaaaagtaaaagtacaaaggagacatcattcttcaatgatgatatttagattgatatgcacacatatatgtatatgcatgattcttcaatgataacaaatatataagttgctgttttgcataatttgactatagtcagaataaggcacgtagacccatgcacatctcccatctctgtgtatggctgcacattttcatgaatcgtaaatgctttctgttttactttgatctctttttttcttactttatccatctctgtctctgtgtgcgtgcatatctaggttatagccttatatacacacacgtgaatgcctgaatggaacaagtctaaacacacgaacatcacacacacattatatataattcatgtgtatgtattgatcgatataactattaattattcttataactagcacttatatataatattagtaatctaatctataatgtttcagatgtatcgaaccatcaagtctactgaaaaacctacaacgtcatcaggttatttgattgattatgtatttgatttaattaaattatctgttaaatactatacatctgataaacgtgtgtgtatagggcagtcagattgtgagaatggatcacaagtaaacagtgagagagaagcaagaaatctcacgggtctatggaataactcctcaaggtatgttatgttttaatatttgcctaagtagaatttagtatttgttggacagatatgtatatacttattaggcaactttctatatttgcatcatatgagaaacttaatatatataatattatgttagttgagtccaaaatcattagcattatattattcttttttgttccttcaaaaaatcaatgtgatataatttgaatctgtataaacagtgaagctcggttccagttgaaggcaaaggcatcatcaggtgtagacatttcatccaatgaggtaacagatttcaaaaatttaaccaaaagggcattggaataa

SEQ ID NO: 160347 - DNA, 4022 bp, Arabidopsis thaliana landsberg
atgacgacgactgtggaggacaatcgcgaggtcctcgaggctgttttgaaagaagcggtcgatctggtacatattttctgtagtaaatttgtgaaactttgtaagggaaaatggtctgagattgtgtttaaatttccaggaaaatgtgccaattgaagaagtatttgagaatctgagatgtagcaaggaaggtctcactacacaagctgctgatgaaagacttgctctctttggccataacaaactcgaagagaaaaaggttactaagtttgattttgctgatattctgaaagtttgggtttttgctactgaatgtgttttatgtattgtgctgaagtagacaaccgctatttttatcttttttgaaggaaagcaaattccttaagtttttaggctttatgtggaaccctctttcctgggtgatggaagctgctgctattatggctattgcgcttgctaatggaggagtaagctattttcttaactcttactttgtacttgtttttatatctttttttagtttttgttcttgataatgtttgtatcagggaaaacctcctgattggcaagactttgttggtattatcactctgcttgtgattaactccaccatcagtttcattgaggagaacaatgcaggaaacgctgcagctgctctcatggcccgtctagccccgaaagcaaaggttctatatgcttattttcaattgtttcttataaccgagtttttttatgtttcttgtttgtttatgtgttttgctttgttggatactctctttaactcatttggttgaccatttgattttccttatgttaaatgtatatgtgaaggttcttcgagatggaaggtggggtgagcaggatgctgcgattctcgttcccggtgatataatcagcatcaagcttggggatatcgtcccagctgatgcacgccttctcgagggtgatccccttaagatcgatcaggtttgacatacgcttaatcttgtggcggacatagcttcaatcatagctacttttggatgtttggatataatactactaagttttctttactttcgagattaatttgtactgaagctgttatgaaccctttgttctgtagtcttctcttaccggtgaatctctcccagtaaccaaaggtccaggggatggtgtgtattctggctccacttgcaaacagggagagcttgaagcagttgtgattgcaacgggagtccataccttctttggaaaggccgcacatcttgtcgatacgaccaaccacgttggccattttcaacaggcatgatacacgttatcaaaattctcattgttgggatcttgtatggtgcattgtttttcccttttcaagtttgttcaaactatattaatacttatatctgttttgtatatgttcaggtgttaactgccattgggaacttttgcatctgctcaatcgcagtggggatgattattgagattgtcgttatgtatcccattcaacaccgtgcatatcgtcctggaattgataaccttcttgtgcttctcattggcggtatcccatttgccatgcctacagttctctctgtgaccatggccattggctcgcataggttatctcagcaggttagccagaaccacataagatgtatttttatagagtttctgttttatattttatcattttatgtttgtcttttaagttcttaaggattttttttaattattcattaaggtttgatgttaaacttgcttgatgttgaatgattagctgggacttgataactttgtcttgaaatatctctatgctttaatggctatatgattatattctgatatatatcgcagggagcaataaccaagaggatgacagcgattgaggaaatggctggcatggatgtgctttgcagcgacaagaccggaactttaacattgaataaacttactgttgacaaaaatcttatcgaggtaatgtgggcttgttcaaataaacacatcttcccaggatcccggtagctgatttttgaatgagagcaagttttttgtatataggttttcacgaaaggagtggatgcggatacagtagttctaatggcagctcaagcctctagactggaaaaccaagatgccattgatgctgctatagttgggatgcttgctgaccctaaagaggtatttggtttcactgaactgcattctaagatttattaagcttcctttgttttctgtttatttctttggcgcttatggtcaaccgttttctgtaggcacgagctggtatccaggaggttcacttccttcctttcaatcctactgataagagaacggctctgacatatattgacaatgagggtaacacacatagagtgagcaaaggtgctcctgagcaagtaagctctttatcgccagttgtgcctatattttactaattttcaatttttagttagagcatagtctgaacagttaccttctgtgaaaatgtttcagatcttaaatcttgcacacaataaatcagagattgagcggagagttcatgctgttattgataagttcgctgaaaggggtctgcgatctcttgctgtggcgtaccaggtcaattggtgatctactttccaagattcttaagatattgagtcacagcaatttgatataaagttcaaggttgaaaaggttttgtacttttgcaggatgttcctgaagggaggaaggatagtgctggaggtccttggcaatttgtgggtctcatgcctctttttgatccgcctaggcatgacagtgctgagacgataagaagggctttaaatcttggtgtgagtgttaaaatgatcacaggtgaaaaacatttcgtagcatttagtgaatttccatttcatattgatatttcagtctgatccttatagcatttatccttgtcaagttgtcattttgacatttcttgtcaagataaaatttatccttgctaaaggcttgaggcttctgtataggggatcaactggctataggaaaagagactgggcgccgtttggggatgggaaccaacatgtacccctcatccgctttacttggacagaacaaggatgagtcgatagttgctttacctgtcgatgagctcatagagaaagctgatggctttgcgggtgtcttccctggtaaattcatgtacttctgaaactagttccagcatctataaacagaatttctcacttatgcccaagggttttctgcagagcataaatatgagatagtgaagcgattacaagccaggaaacatatatgtggaatgacgggtgatggtgtaaatgatgctcctgctcttaaaaaggctgacataggcattgcagttgctgatgccactgatgcagctcgtagcgcatcggatattgttcttactgaacctggtcttagcgttatcatcagtgctgttttgaccagtcgtgctatcttccagagaatgaaaaattatactgtgagtgccatatttctttgaaatctcaaatcattgaggcctcatgacaatttccttttaacttttgttggttttcatgttttactggacagatctacgcagtctccatcacaatccgtattgttgtatgttacgattcagttttttgggttttcctactcatttctcttttactgttaccactaatattctgactgctttgtacacttttaccgattcagctgggctttatgcttctggctctcatatggcagtttgacttcccacctttcatggtccttatcattgccattcttaatgatggttcatttcttatttcctctttttctcgatcataattagactttcagagttttctattagttcctctagactctgatataccaatgaactcttgtggaattgacgtttaggtacaatcatgacaatatcaaaggacagggtgaaaccttcccctcttccagatagctggaagctttctgagatttttgctaccggtgttgtctttggcagttacatggccatgatgaccgttatatttttctgggtttcatacaaaaccgatttcttcccg

SEQ ID NO: 160348 - DNA, 241 bp, Arabidopsis thaliana landsberg
atggtaagagcagctttaattataatgtaaccgcgtcgtagacgaataatactgtaagcgaagaatcctcgatttatgctactgtcactgaaccatttttcctctcaggtcggagctaaattttgagagtaacaaaatgcaaaagagatacattgaaaaaaaagaaagaaaaaaatcctctcttgtttcggctagggtttcgtttttgtttcatcgataaactcaaaggtgatgatttaga

SEQ ID NO: 160349 - DNA, 1909 bp, Arabidopsis thaliana landsberg
  unsure (1)..(1909): unsure at all n locations
ataaagcatttgctggagcatctgttggttactttacattcctgtctctgttggctggaagagcattagctgtgagttcaacagaactgtggctttttctgtttctgtattcaaccggaatattaacgattattctcgtaggttcttctatccccaccaattgtagtatattctccaagggtgctaccagtatatgtctacgatgctcatgctgattgcggaaagaatgtcaggtatgcagccacttgagtacccctaatagtattgcatctgctgatctgaaatgaccataaaggattaagctgatcgactctcatatgcttttctattgattgcattgggatttctctagtgctgcatttcttgtcctgtatggaattgctttggcaacagaaggctggggtgttgttgctagtctgataatttatcctccgttcgcgggtgctgctgtatcagctatcacccttgtagtagcctttgggtttgctgtttctcgcccatgtttgactcttgaggttagttttctggttgtttgatttatttgttccttaaaataaagattagtggttagtggttcatttaaatcactttgctaattccttctgatgttcttcagatgatggaggttgctgtacgctttcttagcaaggatactatagtgcaagctatctctcgatctgccacgaaagtaagttacactctgatgtgtctcttgaaaatcatattgatattctattattggccttatttcaacacattcacgtaatatggagctccatgggatgtatgatttattccgtctttgcaacttgttaattacagacaagaaatgctctatccggcacgtattcagctccccaaaggtccgccagctctgcagctcttctggttggggatccctctgcaatgcgtgataaagcagggaactttgtgcttcctagagatgatgtcatgaaattaagggatcgtctcaggaacgaagaaagagttgctggatcaatcttctacanaatgcaatgcaggaaaggattccgtcatgaaccacctacaaatgtagattatagaagagacatgtgtgcccatgcaagagttttggcactggaagaggcaattgatacagaatgggtgtatatgtgggacaaatttggtggttatttactactattgttaggtttgacagctaaggcggagagagttcaggtgaatcctgattctaaattttcatatattcttctctatgtatgtctaacacgggattattacaatgttgtaggatgaggtacggttgcggctcttcttagatagcattgggttctcggatttaagtgccagaaaaatcagtaaatggaagccagaggatagaagacaattcgaaattattcaagagaggtatatgtttcttataattatgtggtttgacgaagctgaactcttagactgttgcctatcattttcttttgtgttgtaaattttagttatctgagagagaaagagatggaagaggaaagccttatgcagagacgtgaagaagaagggagaggtaaagaaagaaggaaagctcttttggagaaggaagagcgcaaatggaaggaaattgaagcgtcccttattccatctattcctaatgctggtagcagggaggcagcagccatggcagctgcaatacgtgctgttgggggtgattctgtccttgaggattccttcgcaagagagagggtctcgggtattgcacgtaggatacgcactgctcaactagaacgacgtgcacaacaggttaaaacttatttttatattctgcaagtgttctttcttatgatgctgattaatggagaattaactaagaaaagttattaccagactggaatatctggggcagtttgtgttcttgatgatgagccaatgataagtg

SEQ ID NO: 160350 - DNA, 563 bp, Arabidopsis thaliana landsberg
atggtggttttattactagatcagacaaacaatgcagtcgatcctaaggccttgatgttcaagaagaatatgtatgggaagcctgaggtgagacagttttgtgggattatactagactaactcttagtctcggcttaggggcaaaatttcatttgtttttgtttaaatttttacaggtagattggcagaattatacgaactgtaataatccaccattgcatttcaacatttctcacacagattcattaattgcctgtggggtgactgtacacgttccggtaagtcttctattcaagcaaatgcctccagtttttcttccaaaattagtggtttcttgtttttaaatttgaacagttgcagtttacaacgactgtaggttggtatcgatgttgaagacaaggaaaggaagattaaacatgatatcttagcatttgcagaaagattttactctgctgatgaagtcacgattttgtcaactttaccggaccctgaagttcagagaaaggaatttattaagttatggaccctaaaggtagtttctactaacaacacatttacttgag

SEQ ID NO: 160351 - DNA, 862 bp, Arabidopsis thaliana landsberg
gagggagctccaaaacattgatgatcgtcaacatttgtccaagtgcacggaacttgtctgaaataatgtcgtgtctcaactatgctgctagagctcgaaatactgtaccaagccttgggaatcgagacacaattaagaaatggagagacgtggtaagtggaattagagtattccgttctctttctccttcttttctcatatattgacatgcatacgtataacagatggaattgttaaaatataagtatagaatcatagtttttgactcagtctgttaggattttacttaattactctgttggtttgatctctacctcttttggagtttagtttatttctctgaagaacagatttgggacatgtaatttttttgcttaacttactatgtacacgtagtttgaaaaagtaccaacctgtaaacatatcctttcttcccgtaggcaaatgatgctcggaaggaggtattggagaaagagagggaaaatcagcgtctaaaacaagaggttacgggtttaaaacaagcacttaaagaagcaaatgaccaatgtgtactgctctataatgaagtacagagagcgtggagagtttcattcacactgcaatcagatttaaaggtcttcgatgctgactgggatagtgtctccttatttcaattattccttataagattcctttctgctaacgatttacttatttgtttttgcagtcagagaatgcgatggttgtagacaaacataaaatagaaaaggagcagaattttcagttaagaaatcaaatagctcaacttttacagttagaacaggaacaaaagctgcaggcgcaacaacaagattccaccattcaaaatctccaggttggtact

SEQ ID NO: 160352 - DNA, 601 bp, Arabidopsis thaliana landsberg
tttccccccttttaggatgtcaacacaagtgacgctgaatcgagatggcactcatctttatccaatgcacactctaagaatagtgggtcatttgctcaattgaacatgaaaaccaattggtttatgggataccggaacgaatccagtgcagcagcatcagattcttcctcacaagctcctccaccggctgagaaattcgagtatcaagctgaagtacgtacgatctgtgtgtttagatgatttcttgttttgtgatcaattttgtgtgtgtcctcgtcactaatgtttgaaacaaatggcaggttagtcgcctcatggaccttattgtcaacagcttatacagcaataaggaggtgtttcttcgggagcttattaggtatcgtattattctctatctttttttgtttcgtaatggtttttgtgtaacggactcatatttagtaatctatattttacttgatttgttgttcaacagtaatgcaagtgatgcattggataagcttcgttatttgagcgttaccaaccctgagctctcaaaagatgctcctgatcttgatatacgtatctatgcagacaaggagaatggaatcataactctcac

SEQ ID NO: 160353 - DNA, 337 bp, Arabidopsis thaliana landsberg
ccaagtgaagatataaatcgaaggttggaaagtggatacattatattatcaatggctgcaacagctgatcaagcagctcttatattgagtatacctagacgtaaaataaccgatgaaatccaagagactttacgcacttcttccttccctagctcctatgtcaaggtgtgttcttaggatttcaaacatgaaacttataaattttttgatccttctccattttattgttttctattgtactgacttttgttttcaggacaaatggggaaaaaatatgttcataacatcaatatgttatggtcggacagtttgataatgaaacatggagcatattctt

SEQ ID NO: 160354 - DNA, 4634 bp, Arabidopsis thaliana landsberg
  unsure (1)..(4634): unsure at all n locations
gtgggaggaaaccacattttctcacacctaatcatcatcatccaaccggcgatttcttccgactagccgaatccgccatgaacaccgagtcaggtaagcctataacgtgagattgaggaatgacgtagtgagattttcggcgaattccatgttgttgctgctctgtttttgtagttgtcgagttccttggaaacgtccctttactccagaaattaccgagctcttctctgaagaaaattgctcaagttgttgtgccgaaacgttacggtcggtccattctcaatttcggatttattcttctctctgatttcacgatataaaaaaattgagctgtgttgttctctattgtattattgaagggaaaggggattatgtggttcgtgaagatcaaacttgggatggatgttattttattttgcaaggagaggtttgtttctgagactagatatcgatgtatctatcttcgccattgttataatttgattcttgtttgcaggctcaggtttccggaccagacgaagaagataaccgttccgaattcctcttgaaacagtatgattacttcggcgttggtgagagatgaatgctttctgttcaaccttgggtttggtgatatatgctcagcttccttgtcttttttcttcctcctacaggtttatctgggaacgttcattcagcagacattgttgctatgtcccaggtatttgctgacttttgatatatattccaacgacaagcgtgtccaagtttcttccctcacttgtcattgcagcttacgtgtttggtgttgccgcgtgatcactgtcatttgcttgagactaattccatctggcaatcggatacgtcacttgacaaatgctctttagtggaacgcattttgcaactcgaccctttagaagtacgtacggacggtgttcttctttatcacatttctttctgcttctggcaactgaatctctttttctctgtgcttctttcttctagttgaatatcttcagggggatcacactacctgatgctcctatatttggaaaggtttttggaggacaatttgtcggacaggtatcgcattttctctaggaaggttacattattatgtctctgtaaaccttgctgatctgattcatgtgcatatatatattgcttgttaacagtgataaccgtaaccactactaagtcacttttaccaacattttacaggctcttgctgcggcgtcaaaaactgttgattttctcaaggtcgtccacagtttacactcctattttcttctcgttggagatattgacagtatgtacataatctcactggggcactttctagccaccaatgatgcctttcttccctattgaaacccaccctgctgttggattcatctgattatcatagtttgttgctcttgcttgcagtccccattatttatcaagttcaccgcatacgtgatgggaacaactttgccacccgaagagttgatgcagtacagaaaggaaatatcatattcatcttgctggcatcatttcaggtttcccattttattctttacaagatagcttatgaatctctacgtccacctgccaccaagagagaatagcctttcacaaaactgggaaaattgttttcttaaattttctcttttattactttcatagaaagaacaacaaggatttgagcaccaggagtcaaccatgccctctgtaccagatcctgatacggtaaatcatttctccagatttaagggttccaataaattgttgtgtgttttatttttcaccattatctgctacagcttctatcactggaggagttgcgtgaaagccgtataactgatcctcatttaccgaggtaagtggtagtgttttccaatgtatgataacttatatcaaaagctcaagttggaccaatcttgcaattgtttctttctttcaggagttatcggaacaaagttgcaactagaaactttgttccatggcctatagagattcgattttgtgagcccagcaattcaacaaatcagacaaagtctcctccgaggttaacaactcgctgaaataaatcaattatatcatagagtactcttgagtgtatactcataaattccattaagtatttcttaaaaaaaaaatcaagaaactcacaatgccttcttgcagattgaactattggtttagagcaaagggaaggctttctgatgatcaagctttgcaccggtaagtaactccatctatgtatatcaaggtaaccatctaaaaattggtattattcatctggtaacaatcctttaaactttaaaggcaagaatgattgtagacaagtgaatcaatggtgttttagtatcccaagttgataggttgagacttgtaaaaggccaaactttcttaatagcattgaaaaactgacggtatattgaaattcaatttatcattcttagcaaactaatcatttggcaaagccatgttgatatgcagatgtgtcgttgcatttgcctcggatttaatattttgtggtgttggtttgaaccctcaccggagaaaaggggtgaaatccgccgcacttagcctggaccatgcgtaggtttttattttctcttggtgatgtatgagttttgtgtgtctgggttaaattttttaattacattgaggcattattccagtagggatcttccagataagtaactattacgagttactattcctcatttggtttgcaggatgtggtttcaccgacctctaagagccgacgagtggttgctctatgtggtagttttttctatccttgtttcttatgaacatttcagatcaaatgtttgttcagaataaatgaaaatgatttttggtatagagttgttttataaacttgtttgctgtaagaggttcacccacttacaacacaaaggatgctgcttgcagattgtgagtccaactgcgcatgagacccgtggttttgtgactggtcaaatgttcaacaggaaaggagaggtactctttctctattcttttgaaccctattatacatacatatctggaaatgataagtgataaaagaattccttttggtatgtgtttttgaatatgagaacaacagctggttgtatcattaacgcaagaggccctattaagagaggctagacctccaaaaccctccggcacgtcgaagctctgaatggctctcaacgtaagttaaataagatacattattacgagtacaaggcgacgaataaaaagatcaaaaaccaatctgggtgggtactaaataaaagattttattagacaaactcataatgtcaatgtagcacgctgtatgtacattgtttgattccggccttctcacctctatcatcatctatctataaattctcttgttttttttttttgttttaaaattctctctcacaagaacacctttagatcgattcgtgggccagaaaattatgggcccaagtatcaaattagttttcgtacgacccattttggatccgcgggggtatctttgatggaaccggtacacctgcttaaccggccggtttatagttttgtatccatttgtgatttgcgggtttctgttgccacctccccactctcctcgcttttgttggtcttggaaaaaccctgggattttgggtatctctgagcacgaattctacattctcatggctttcgaacacagaaatgaannnnnnnnnnnnnnnnnnnnnnnnnnnnnnnnggagaaaatggagtcagaggtggagcaaatgtcgcgcaaggtttccgagtacaggaaaagcctaccgagtaatctgagcaattctgtgatttcttctcgtagatccaattttcccaacatcgattctttgggctttcgcacaactagcacaggttcgtacttttctttgcttatatttagttagataccttccttctcctttggtttcagctggaattttagtctctttttctttctagatgatgtaataatagattgatcctctacattattagtgtatcattcttgtgaagaccaagttgtttagcagcagcagacttgccttttgattgtgatgtcgttttttgcatttaggtttgtgtcatgccatccgtgtagaatattgtgatacttgctactataccctctggatgattatgttcatgagttattacgcttaattctgaggtgatgatacatatacaaggcttttccattacaataaatcatgtatttttgtggcttagaatcgacaagcatgagactatgtgatgatatgtttagctaagctgagagaaaatgattgtttagccaatttttgtttacagataccatgagaataagtggccacattaggtgacactaagatttcatagcattgtaatatacacaagtctctagtgaacctgctgttgtgataatcaactcatcagttattttgttccttgcaagtttggaagaacctctagtgtcaagagatggagcacatataggtggaatcgaacaagaatctcgagatagcttgattcagctcaaagaaagagtgtacgagaacattgccacagtgcctctagttgtagagagaatgcgagagagtaaagagagaatcgacaagtccatttctttcaatggaactactatgcacccggctttcacaaggcggaaagctagctaa

SEQ ID NO: 160355 - DNA, 528 bp, Arabidopsis thaliana landsberg
atgagcgaggtttcaaacaatattcgatatagtaaggtgactttgctctctctatatatatctccttcaattgcacaatgtcgctaatgcatgtgttttcatttttatatcttttatcttgctaggctaaggcaatatttgccttttccagtgaagatcatattggaaaaatcattctccatgcggagcaggtacctgaattctaaattggattccatatatttgcaggaagctccatcttttcctagctcattttcacatttaatttgttctctggaatggacaagcttcgttgcttgattccttgtgcaattgaccaggtctgctgttttcttactttatatcttaaccgtgtttggtttcctaatgttgtttggtatcctttgatccaaatttagtcaaaaatggttcttcgtgtatcatcattatgtgttctgtgtttgtatatataaatacctgccaatctttacttttggttttgttattcagggaacaatcgtcccttttatcaagatcaatcgttggtaa

SEQ ID NO: 160356 - DNA, 357 bp, Arabidopsis thaliana landsberg
  unsure (1)..(357): unsure at all n locations
ctcattctcaaatctctctttttgtgtctgggactctgtctctatacattcaaactcttcaagattacttcttcatctttacttggagaggaagaccaaaccattaactcttcaaaaatacaccgaccatacatggcgttggtgagttcaagagcaacgcaggactcaaaaccttccggcgaaaggaaatcccccgtcgtttattatctcagccggaatggccaactcgatcacccacacttcattgaagtacctctctcttcccacaacggtctctatctcaaaggtagcaaaagtctcatctntttgctctgtttttcttctcctctggtttggatttcataaaagtttgatttt

SEQ ID NO: 160357 - DNA, 670 bp, Arabidopsis thaliana landsberg
  unsure (1)..(670): unsure at all n locations
tttagattagatcactgtgtttggtttcttttatgctccaatgcagttaggttcgcgaatttttcttatactgataacgcttttttggtttgacagcccatgagtatggtattgcctggtgttgttggattcaaacttgccggaaaaatgcgtaatggtgtaacagctactgatttggttctaacagtgactcaaatgctgaggaagcatggcgttgttggaaagtttgttgagttttatggtaattatatccttgtgagctcttaagtgttttgctcttttataatagacatgtgtttgttggagcattataagtctacttttttcttcttaggtaatggcatgagtgggctgtccctagctgacagggcgacaattgccaatatgtctcccgagtatggtgcaaccatgggcttcttccctgtggatcatgttactctacaatatctcaaattgactggaagaagcgatgagacagtgagtgtttgactttaatcttccttctatatatattcagatatctggtctgatacaatactttcatggcaggtggctatgattgaagcatatcttcgggctaacaantatgtttgttgactacaatgaggtaaattagccttatactttctttctttttttggttcttaatctctttcaggtttttatttga

SEQ ID NO: 160358 - DNA, 887 bp, Arabidopsis thaliana landsberg
gctccagggtaagtctcaaatagtgcaggatgagctagcgaggcttggtgaacaactagttaacagtgctgaaggtacaagggctatagctttggagctttgccgtgagtttgaagacaagtttcttctgcacttggctggtggtgaagtaagtacattcttacaaaagttaactagatttagtcgaaaattcaagaatatagtgagagagaagaactcttcaaatattagcaatcagccatttcagatttggtactagtgtagtggaaagtctcttgctagcctacgcttggtaagagcacattatattgttgggaatctcatgaatctgatagtggatgtttataatatgtgtataagccaactgagtgtttgatatagagtttttgtacttgtctgtgttcagtttatgggctgaagtcccttttggagcttggcaaatgtttttctcaaaactttttgattcttgttcagggaagtggttggaaagttgttgcaagttttgaaggaaatttccccaaccgtatcaagcagcttccattggatagacattttgacctgaacaatgttaaaagggtgggtgtcttcttctgtcctaagtttctgcacgagacaagttttgagacttgatttgtcaaaatatctttgattttcaggttgttttggaggcagatggttatcaaccttatcttatatctccagagaaagggttgagatcgttgataaagattgtccttgagttggctaaagacccggcacgcctttgtgttgatgaggtgtgcttgtttacatgtttttttaggtacatgcagtaggattgaattttagaaatttactgcattgtgaactggctatggcttgtctcactttaattcttcgaactgtaa

SEQ ID NO: 160359 - DNA, 850 bp, Arabidopsis thaliana landsberg
gagtcttggggtgaatttatattgatcaaacaggagttgttgggtacttctggaacacttcttgaaatttctttccacaaagcggctatatgttgtacagctatgcacagaggcgctgctttagctgcaatgtcatacttatcaggtaaggttgcagtggtttacaaacgaaaacagcattaatttttggttataagcatacttaacacaatgttttcgaactttataggtttcttggaggtttcactttcttccatgatcgaaaccgtgaatagcatatcagatggatcattcagcgtggtctctgtccaggtcgtatctcactgtggagagggacttttgtctaatctggtctatgctctacttggagttgcagctatgtcaagggtaagatttttgagtaagatctctcaaaaagtagttgatggattatgatatttgattctgtttttgttttaggtccataagtgttcaacgatactgcaacaattagctgcaatctgcagtttatgtgagaggacttcatggaaaggaatgttgtgttggaaatctctccaaggatggctaaactcagcggtttctctctttctcttgtgatcacatcaacaccaaactccgcctctgtgttgtttattctaatggcttttttttgtttgtttgtattcaggtttgggcacttccgagcgagtatctaaagcaaggagaagcagaaagcatagtgagggaatggtcagaagctctaggaggtgcagggatcgattatcttgagaacaaaagctgcaattttggaagcaataacagttcaggaggacatatgcaagggaaacacggtcgaacattgaagcgaata

SEQ ID NO: 160360 - DNA, 396 bp, Arabidopsis thaliana landsberg
  unsure (1)..(396): unsure at all n locations
gttagttccttatggtgaagatcacagtaaagcttgtgggcactctctttctggtcgtttttgtgangaaggcttagtcgtttaggtgttctctcaatgcagtcttttgagtagctttagatggtctctcgagctaataaaatgggtgatttagctccaggggaaaaccaagaatggaatgaagatcatccaatgcacttcgttggtccctcggttggtgcccaagttgttcgtgtcttgcagcaaatgcttgctgataaggtatattgttttcgttaggaagcacccaattcgatagagcataggatttgcctgtgttgttgttgaagcttagtagaaaaagttgtgttacttttcacatgtttgagggtcacacgaccgcgaatgacatcctgg

SEQ ID NO: 160361 - DNA, 2098 bp, Arabidopsis thaliana landsberg
gatatgaggattccaggaaacaaaacagtgctttaggtcctctagagattgctagagttaataagtcgatatatgctttacagaatgtcatgtatgctctaaacgcaaatgaatcccatgtgccatatcgggagagcaaactcactcgtatgctgaaagattgtttaaaaggatccaacataactttgctaatcacatgtttggtatactttgcttgcttatgagttcgttttaagtatatctatcactgagtgcaactggcgatgctaacccttttgtttttcgtttcagccccgggaatttagccaagactccttttacatgctaaacttagcatcacggatctgtctaggcggtaaccgagccatcactaatcctaccaagaagaagatcaatggtctcgatagatctgtttcattatcctcagccgctcaaaggagacagacacctttgactatgtctgctgcttctagaaaacagacagtgctgaggggaaatgtgacagagagaaagactaaaatcaacactgctacttctgcaattaaagcaaggtaaatctttcagaatcagctttctctcaactctaagcctcaatatccctgtactcttgttgttcagttttagaacatcaaagaatgacctttttttctcaatgtttgaaggaaactgttcggtgaagcaaatgattcggtgaaatgtaaaaatagctctaagaaggtaattgatcttttgttgttatcgttatggattcagaaatagttcagttagacttgttttggattttgtaggtggaaggcaaagcaaagatggttctgaaaaaggtaaagcatcttcattctaattgctgaatatttgagtaatgctctttaataccttttctcaccttgaatgaaatttgtgttgattttgatgcagggaatctccacttcaaaggttgtcttgagcgttcaggcctcttcacctaaagaagtaaatccttgcgagcctgaactaaatggagctgcgtggttatttattaccatggcattacttacaaagtctcatgttcttaatgtaggaaatctgttcgtcgattactgttacagattttcaatcttctttggtagaagaggtaatattttatataacgtcaatgctaaatgaaaatcatcaagacattacttacattcagtgggtttcttttcaggaatattctctggctttttcaagttctacggttgccatggaaccggtaaattttccatctgcaacttctctgtattttaagcagatgccaaaacacgttcaaagaatcgaagctgtctcctttgtttcagcatatctaatattgcttcttgtcatttataagggctattcaaatggtgcatctttaagctcagaagctatttacactacagataaggtaatttgtgtaggtttatgttttgtttcaacatctggatatcaattgtgctgacagttcttccattattcttcaggagacaccccggaaacaagaggaaatgtttgctggagccactcattgtgatgatgcttttgtagacaaaggtgagattggaaaattgataaagaagggtctggtataaaggaaaggctgactttgatcttaattgtttttttttctctgtatggcagcacaaatagtagagagagatgaaaacaattcagtcattgaagaagatctgactctggttattgatgaaggtaggttgtgagtcctgtgacattaatctaagaaagtaatataatgaaaccttttgctcaattgatggtctttctctttatggtaggtgaaaatctggacaaagaaaacaacagtttgctagcaaatgaaactgcatcaccacccctcagcatgcgacttcaagaactatcaaacaatttgaagtcgatatgcaaattctcaaaccaactatcagtacttgagaaacatcaaactcccttaactatattacaggcggaagaagcatcagagcacagtgatattactgctgaagctgctgttagtatagaactaagaacgccggagaaaactatgccttcgaacattggctgcagtccttggaagacatatagcgcacacagctctaaattgaag

SEQ ID NO: 160362 - DNA, 451 bp, Arabidopsis thaliana landsberg; identical to SEQ ID NO: 14305

SEQ ID NO: 160363 - DNA, 982 bp, Arabidopsis thaliana landsberg
atgagcagaagttgctgcttgtcttacgattacgttaccgatgatgccactgatctcctcggcgatcgggatttggattctatttctcagctttggagcctgatggtttctcgtccggtggattcaagcttatctcacaagaacgctttggagcgttgtgttgagcacgctaagctatggttagctaattcggagcagcctattgaatcaaactgcaatacttcatgtaaaataaaatttactaaacctgttgtctcttacatctcttttgtttagtttctctgtgttgattacttatatttgggatgcatatgctgcattgagagagaagttgaagaagattatggcgtttgactatttcaccactactccggaaatgaaagctccggttgatgtggcggctgcagctggtaactatacttcttaccaggtgcctgtggacgtggaggcttcagggcattaccagcaaaaggtatccactttagattaggttttgttgattgcctgaagtctctgactttcatcaaattggtagtgaatttcacggactagttgttctgattcattacatactatatagttcagggctttgtggtatgcaaagctcttacttaatctgaaggaggaaattaacaatcacatttctttagttgtggtgagattgagcttaattttcaaggattcagagtttattattgtttctcctataaagtagaagatgtctgaagttgaattatgcagcattagagtgagatgtggtatgagatcattagtgagttaagttgtttggataggatggagaagtacattcttaatttttgatatggcctgttgcttatttgatttttcgactgttctcttggtatttggagaactctatcctggttagaataatcttctcgcggtgcgtctacgatatgagctgtcaatatatttttgattatacatgtgatcgatgttaacaaactgtgacaatatgtgt

SEQ ID NO: 160364 - DNA, 1248 bp, Arabidopsis thaliana landsberg
  unsure (1)..(1248): unsure at all n locations
attgtaggtggttttacctgaggggtcaaaggatatatcagttaccactccattcgccgtcaagcagtctcaagaggtaacaaagtcttggctttatctgttcctgatttatcctgtctggatactatctctggtgattataagtctttccctgattttgattctgatattttaattcttcatgttgcaatcctgttcatttgcagatcaaatattcacatttagatatagctggtagaccagttgttgtgctcgaaaagaacaacgttgtccctgatcacaatcagcatatccaggtaattatattatacgtcagaaatgctgtcattctacatccacaatattcctactttaattgattatgatatttgttttctgtacaggtctactataagttcagcaacatcaatctgctgagtgagccattgatgttaatctctggatttttcattttgttcatcacttgcatcatatacacacgggctgacatctcaatctccaagtcctctccgagttatttggcgaaacttcaatgggatgaggtacattggaaccttttctcatgtatattttcaagcgatttactgatattctctttctctgaatggttgatatttaaacggctccatttgtttatcaggtcctagcaacactccaggaagtccaaagcatcgtccaaaaatgcttagccacacatgataagcttgaagcatcgctgcgtgatctctcaagaactggtgacattcaaacctgcaaagcagctcgcaaatccnnnnnnnnnnnnnnnnnnnnnnnnnngaaagaactgaaaccgttgctgggtttcttacagtctttcccatcagcctctcacatatctccaaaggttctaaatttctccctctacctctcttagtctcagctctacttaaccgtcacttttgtcaaaatcattccattaatgcaggtcgaggagctagttgtgaaagagaaagaacttcaagagaagttaatggccaaacataccactgttgttgaagggtacgaaaagaaatcctcagggcgtgatatcgaaaaccggatcgcttctcagcagcaaaagatcatagctttgaggcaagaaattgaagatcttctagaattcattgatgagatctagaaaagttaaatgtagcaaatcctcttacgcttaaataccagacttttgaactcactcccattagaaaaattttgttcctcaatgagcagtgtttatcaactttgaaagac

SEQ ID NO: 160365 - DNA, 624 bp, Arabidopsis thaliana landsberg
accctataaagaaaggggagttagactggacaaaacgggacaacattatccggggaatcactcgaggaattctatatcttcatcaagactcacggctcacaatcatacaccgcgacctcaaagccagcaacattctgctagatgtcaatatgaacccgaaaattgctgatttcggaatggcgagaatttttgggatcgaccaaagtggagctaatacaaacagaatagctggaacacggtatatggctattacccttgttatggcctatgtacggaagcttcaagaatgccattaaatggttgtgtagtaatttagcttgtgttttactattgcagtggttacatgccaccagaatatgtgatgcaaggccaattctcaacaaaatctgatgtatatagttttggagtcttagttcttgagattatatgtggtcgaaataacagattcgtccaccagtcagacactacagctgagaatttggtgacctgcgtgagtaccaaagaagaactctgttcttgattgatgattaaatgataaattttggtttttgactctatgttcttgattcttgaatgataactaaattatgttacaggcttggaagttgtggagaaaggggtcac

SEQ ID NO: 160366 - DNA, 394 bp, Arabidopsis thaliana landsberg
actgagcttacgtatttgatgatgatttgtagattgaaggaggttggaatgaatgtaaaatgggaccaagtatatgggataagttcacgcatatcgaaggtttgttgtttcttctcagcttatcccgtaccaatcgatgacgactaggtagagatttaactgtttgttttcctcttatttagggaagattcttgatggaagtaacggcgatgttgctgtggatcattaccatagatacaaggtgatctttgtgaggatctttctatggtctgtataactctttgcttataatatttttttgtttcaataatgtttcaggaagatgttgatcttataggacaattaggtttcaatgcttacagattttctatatcctggtctcgcattttccctg

SEQ ID NO: 160367 - DNA, 886 bp, Arabidopsis thaliana landsberg
atcagatcaacaaaaccaagagaaaacatggctcagaacgatacagtgaagctgataggttgttcggatgaccctttttccattaggccacgagtggctctacacttgaaatctatcaagtacgagtacttagaagaacctgatgatgatcttggggaaaagagccaactccttctcaaatctaaccctatccacaagaaaacccctgtcctcattcatggtgaccttgcaatctgtgagtccctcaacatcgttcaatacctcgacgaggcttggccttctgatccatccatcctaccttctaatgcctatgatcgtgcgtctgctcggttctgggctcagtacatcgacgacaaggtaaaacagtttagagactcacttctacatgctctgttttgcttcttgtcaaagtttgatactttagtctctgttattaataaatctgtttagattagtcaaatcaagagttatgtgtctgaaacagtgcttcgaggcggcgaatgcgctgaccggagcaaacaacgacgaagagagaatagcggcgacgggaaagctgacggagtgtttggcgatactagaagagacgtttcagaagagcagcaaagggttagggtttttcggaggagaaaccatcggctaccttgacattgcatgtgcggctcttttgggtccgatctctgtgatcgagatgttttccgccgacaagtttgtccgggaagagacaacacctgggttgatccaatgggccgtgaggtttagggcccatgaagctgttaggccttacatgccaaccgtcgaagaggtcactgaattagtaaagcaaaggattgaggagggttttaagcgaaacttcaaaagcaatgtttcgacttcggaatatgaatag

SEQ ID NO: 160368 - DNA, 959 bp, Arabidopsis thaliana landsberg
  unsure (1)..(959): unsure at all n locations
ctttcacaatcgccactcgacgccgagacccagcggtggagatgctccggagcagaggagtccatgaatcgccaacgcggataccagagagtgtagagaaacgattcaggtggcttacggggagaagagttttgaggagaagcgaggaagaagaagttgttgtgnnnnnnnnnnnnnnnnnnnnnnnnntcgaagagagagttttggagaagataagatatatttttacttacctgcttcgtgatgaggatcctatgaaacgacaccgtttttaattaggcccattagatagtttgggcctgataatttcttaaatcattttctcataatttcaagcgccaaaaaaaaagaaaagtaaattgggaaagaaaaaaagaaaacacactttccccgatgtgtatcgtgaatatcgacactaagcacagacacagtagcactgtgttttggttgcaaaaagtctccttcatataatcatatctatggttttcgggtttcagcagaaaagtctttttttagatttagggttagcagagcaaaaatgagccgttattagttttcattcaagggtttttgagatggagcagatgatattcattagaaaagacgacaaagtagaagttttttctgaagaagaagagttaaaagggtcttattacagagcgattctggaagataatccaacgaaattaggacacaataagcttaaagttcgttacttgacgcagctcaatgaacaccgtttggctcctttaacggaattcgtcgatcagaggttcattcgtcctgtcccgtcggaggatgtgaacgacggcgtcgtttttgtagaaggcttgatggtcgacgcttatctcaaagatgggtggtggactggtgtggtggtaaaaacaatggaggatgagaagtttttggattacttcgattgcccaccagacattattcagcttgagaaaaagaaatag

SEQ ID NO: 160369 - DNA, 1819 bp, Arabidopsis thaliana landsberg
  unsure (1)..(1819): unsure at all n locations
ctaccatcaccattgacgttgagattggagttgttggagcatgtggttttgtctttgatcacgaacaagtgtggagtgaaagtgaacgtcacggatcatcatcgttaaacaacggcttgattgggtaaggaaaacctaatctatttatgccttctttatactggaattgtctctcttagccattgaatttggggcagatatatcaagttaacttttggggttttgtgtgaatatgtgaaagaaggaaacagttcaagtggtggtattggtgatccgtttcccgtcacgtccgaagaagtttgggcaagttcttaacggttctaaatagatctctttcccaagnnnnnnnnnnnnnnnnnnnatccaaaatcagaggtaagatcaatcgggaaatcgcgtttaaagttggtgaatagtcacagctttcagagcccagctttttctaaagtatcgagaaacattgtagtttcaggtagacgatttgacgatcaatttcccgttgaattagagagaatcaggtgatgcgtaaggtgttaatacaatgatctcgatgtcctgaatccatagccgctgatagagatggaatcaaggttatattcgagaagttatgcacgtttctttcatgacaagtaactacaaagtctgtcaaatccagaaatttctaaatgacagttcgagatgacttgttgacgacaacatttggagcttgtaatcaattctgatcattctgtcattttgtgtagttattcatgataccactatctacatattcaacggtgggattgcatttgtaacggttagttcttgacatatctttatgttttggagacagttttggatggagtaaatcatgacgagtttttattgttttattgggaaattgagcttggcttgagctgaagctttgtaggaactttcatgactcatgtaatcaggtccttgttgaaggagaaataatttagaacctatgagcatgtggttgcaggtaatatcgcctaagtgaaaagaaaggagaagtgaatcttcatcatcaactaggctaaggtaagggtggtatttgtgaaatatatgatcatgttctgttgttatgctccttgacgcatgatatgtaggcttagatcttattgtataggataagattacatgatgatatgacgttatgattgttgagtatgatgtttgataatgtgatgttatgtatgatattataagtgtgtgtatgttaaatatgattatgagtatgtatgtatgatgaatgtatgactggggaggaggtatgggccatggtctccctagtgatgtggacagtgatggaccgacgggttaacagctagtcaagaacggctgacgagcccggaatgagagtgtctgagccacgagggccagcttccatgtaacacccgcgatcctcaataggatcgtccggatcggggcctttcactccacctatgaggttctagtcgtcacgaggatgactggacctaacgatgtgtatgtttatattattatatataagatggttgtaatgaatgtgttattagatggtaaagcatgttaggttgattgcttgtgtcaaagtttatatgttatgatgatggttgtatagctttagaaagtgttctatgtttcagtgggcagagttgatttccttcactgagtattctttactcaccctcctttttcccttttttctcaggttagtaagcgtgaagagttatgtgaaataatttgttcgtgtatgaagtttaaagaaaacatttttggcaagatcatatgaataacatgccgtcttggcctataaggcggggcaggtgttaca

SEQ ID NO: 160370 - DNA, 326 bp, Arabidopsis thaliana landsberg
  unsure (1)..(326): unsure at all n locations
cagctgggtcttctgcttcatttgtaaagaaggcacccactctattttttctgctgctgnnganngacgcagcttgtgtttgtggatagagctgaactattacctttcatggtgattttcttattgaatttttccagacattaaattttgttttactctgctgaatctttttcatcccaatctgtgcctctgtttaagatctgatttttgctactcttctcttaccttgtcctttaattaggtttaaaacccggttagacaggccagtccaatctagtactgtcgagtttggtctaattgatgttcttagtcgaattatcaaataa

SEQ ID NO: 160371 - DNA, 265 bp, Arabidopsis thaliana landsberg
tgaatgtgtagtttcctttgtatttgcttacgtattcttcctttgtacttttatctcttgccgcaaattcgtagtccacaccaaaactcacagcccctttctcttgcattccgaggaatagcccaaagcagtggaacgagctttgctggtccatgttgcagtgcgctgagaggaagaaaccttgacctcctaagtggaaagcctgagaatagactcttcctgaagggaatagtcctgcgcattcctctcgcttcaagtccaggta

SEQ ID NO: 160372 - DNA, 1227 bp, Arabidopsis thaliana landsberg
atgaagaagaagatgctgacgagtcccagtaacgcacttcacagtagtactccacagttctggccagttcgccggagcagactttgccgttcccggaatttccctcgttttcactccggcgaacgcagcagcggcggaggaggaaaattgtgctcgctctctcttctctccggaagtggcgccagtaaattcagtgtcagagctctagttaggcctgatgataccgatgacgctgactccgtcggcgatgggtctctgggcttgttcctaaccacgtatctgtcaaaattccattcggaaatagagaggtaatttcttcataaagctgtacccttttgatttcattggttgtttcatctggtcaaatttgaattcggagatgattggtaggatttgagacctttcgctctatagtagagaagcaaagctcgctgctttagatgtatgtgttgaacttgttttagcttcttcttaagtttttcatctttttctttctttttgtctactgtgtagattttagttgagactggtctcatggggagacaagcaagttctgcagtcacggtgacagatggagaaactgtaagtgtgctgtttcattcaatttccaaaactttcaactttttttcttagttcctcgagtttgtattcttcagtttagcttctgttacatgcttatctcttaatcggctttgtttcattatctaatctgtctacttgtcattgtagattgtcttcacatccgtttgtctagctgatgttccgagtgagccatcagattttcttcccctttatgttcactatcaggagcgattctcagctgtaggtcgaactaggtaagcgtttttcaattttggagtctcttgctgtaagaagaccatgtcattgcctaaatgatgatctaaatggaccttcttgtggtacagtggtggattttttaagcgagaagggagaaccaaagatcacgaggtatgtactaatgatgtttttggtttcgtctatttcgccatccttcttaacatgttgatttttatgcaggttctgatttgtaggttacttttctttgccttcctgcagcctcctacatcaccggacaggaagagctaaaagcatgcttaaatgattggaaatccaatggtttagtggtgtctggtttggttagagatcagagggagaagttgattcaggaagcttcttttgcctttatttggcaagctcaacatcctt

SEQ ID NO: 160373 - DNA, 508 bp, Arabidopsis thaliana landsberg
tgtcgtctgtttcgtccgcggaactcaagagcagagagattgttagtgtacggatatgcagaagagtggtgttaatcggaacccttctttgaaagtagccattcctcaggcacaacagtcgcttagacgtttaggtttttgctcccaaatagctacgggtggatctcagcagtcatctcctatagtattccctgaaaagagaaataagaaggtgaaggcatcttcgagacgtggtgaggttactaatgatccacaggtgaaaccgaagcctgatgagcatcggatcgatattggtggaggggatgagaaatcagatttgttaggtagtcttgtttacgctgggaagcttgtgttggataagaggaaatctgcgagtggaaaagatgcaacagagatacagcaaccagccgctacggacatctctattaagaaagcagttgatgcaaagcttacaagcagcgctttggtttggggttctgacatgctacagcttaacgatgttgtctcg

SEQ ID NO: 160374 - DNA, 1418 bp, Arabidopsis thaliana landsberg
atgtcaacgggaatctcttccatcagtagatgcttttcggctcgaaaatcaagtaagaggtggaagcggagacaatattacttccagcaaagggcaaggcaagaacgcttgaacatcagcaggaaatggaaaggggaagtccctccagaaggtttaagtctgaagatggaagtcgaagaaactgggaaacagggcatgaaggttcctcagaacactgacagaggttcagttgataacagctgctcggatgagaatgataaactgttcgaggaggcttctgtcattacttctgaagaggaagagagcagtcttaaagctgatgttgtttctgacaattcccaatgtgtggaaacccaattaacgagtgaaagggataactatgaaagttgtgagatcaagacatcttctccctcttcaggagatgcacctggtactgtagactataattcttcttcagagagaaagaagccaaataacaagtcgaagcgatgtagtgagaagtatctagataacccaaaaggctctaaatgccataaactatctaccgatattactaatttatcgcgcaaatacagcagcaactcattttgcagcacagaagattctcttcctgatggcttttttgatgctggacgtgataggccctttatgactcttagtaaatatgagaaagttttgcctcttgattcacgtgaagtcatactcttggacaggtagttactatcacgttcagttatatcgactagaataatcatttatccatgagctaaatgttactttgcccttgttttggttttgttaaagggcaaaggatgaagtgttggatgcaatcactctctctgctcgagccttggtagctaggttgaagaaattgaactgtttaactccagatgtagatcaagtttccattgacaacttgcaagttgcatcatttcttgccctttttgtttcggatcactttggggggagtgacagaactgctattatcgaaagaacccgaaaggcagtgtctggtacaaactaccagaaaccttttatttgcacctgtttgaccgggaaccaagacgacttggctgctctcaacaaacaggtctcaacaacggctgaagatgcaattttgtctgatgtgtgtgaaaaatctctgcgttctattaagtccaagcggaactctatagtggttcctctaggtaaactgcaatttggcatctgtaggcacagggccttacttatgaaggtactcagtttaatctaatgctattggatatctgaccatctggtttcgttttagttaattgctaattcttgtttcttatatttatttatagtacctttgtgatcgcatggagcctcctgtaccatgtgaacttgttagaggctatctaaatttcatgccacatgcctggaatattgtccctgtg

SEQ ID NO: 160375 - DNA, 518 bp, Arabidopsis thaliana landsberg
gttattcactcttctcgcttgctcttttcctcggcctaaccacatgtggaaacatcactttcccggtttcctcatcagcctccgagaaccaccatctccgccgatgtatctctgcaaaaggtcccgcattagcggagaggctagtatcaagccatgtttactccttcagtttattcctcttctccagtctcatcgctatgtctctcaagcaagcaattaggacaacaacaacaacaaacgggaactgtttagaggaggaggcgcgtgtgttgaacgcgggagaggggcgtgtgaacttggcagctttaagggttgggattgttgcttcgtgtgttgcgtcggttttgggatgtgggttcttgacaatggcgttagtggatcttgttcagattaaacttggacctttggaatgtaagagaagctttcatgcacttgcagctattgttcctcttgttgtacttgttccttctgcacttattatctatgtgttccttgtgctctacgcatttatctattaa

SEQ ID NO: 160376 - DNA, 845 bp, Arabidopsis thaliana landsberg
gccttcaaccgatttatccacctctctcatctctgagatgagtgatgttgcggttagacggttccttcagtttcctccaacaagatttcacagtcaaatttgggtcaagacctgaaaagtctacttcggcttatcggtcttccatcaaatgaatctcgaatttaccggtgtcaacatgtatttgatgattccaaagcttcatcatcgaagcctcatcaagttggggttgtaagtagatgttttgatttcttaaatctagtaattatcaagagatgacgcgtagttcagagttttccggtggttgtaatgatctccgtcatcattaacaaaattcagttcagaaaagaagtggtgttcacagatggcatctcaattggagcattaggaattaacttttagattttgtttgtttgattctggtttggtacctttaattggcttttgtttttgtgttttagatctgaggaatactcgtttccgccggttaaatatctgtggacttacatgtgtcttccggctttgtatcttaaatgtgtgtttttttccttcgtttgaaagtgtttgattgtaaaaaaagaataaaagactcatagtaacaccaagaaatactacaaagtgtaaaagaagtcctctttaacttgataattaaaaccaaaacaaaatatacattttccacagttcttttttacctgaatatctcattgacaatgaatttataaagatagaaaaatctacctgaaacagaattcatatatatctcgaaaaccacacaggttcatatacttagcatacatagatgctacacgtaaatgtgctatgtcaacccgcaaatgcatcatgtgaca

SEQ ID NO: 160377 - DNA, 794 bp, Arabidopsis thaliana landsberg
  unsure (1)..(794): unsure at all n locations
gattgtacacaccttgtctcataaattccgcagtgctacccgcatagtccgtgcaccactacaattacccattggaccacaccaagttctcctgaaaatcatctatgctggtgttaacgcaagtgatgtaagatcatattatcgtctattgtgtgcaaaacgttttgttgtctcgttttgttgtctcgcttatcgttgtacatttaactgtttttagattccctatcattatcagttattaggtaatacacccttgttgtgaaatgtactttttaattgatccttattttgtaccatgaacaggtaaacttcagctcaggtcgttactttactggtggctccccgaagcttccctttgatgctggatttgaggtatattttgttctatttcaacttcaacagcttttgttcaattctaaatcgcttcaatattttccagggagttggactaannnnnnnnnnnnnnnnnnctgttaagaatttggaagttgggactccagctgctgttatgacgttnnnnnnnnnnnnnnnnnnnnnnatagtatgagaactactaaaccatatgagcaacaagttgacatttttcaagacttcagtgatcatgtgaacctgtctgttttggatttaggtatcttctaagcatgtgcttcctgttccaagaccagatccagaagttgttgccatgcttacctcgggattaactgcattaatcgcccttgaaaaggtcgtgctaacgagtgtcataactgtgttttcatcgtttttcatttcagactctcaaattcctcattttt

SEQ ID NO: 160378 - DNA, 1409 bp, Arabidopsis thaliana landsberg
atgaataccacatttatgattgtagaaggatgtaacatagaaaaggtatggccaactacaccttcaccttcaatagagacttcatccaatgaaagaaggtcttcgccacatgagtgtccaaccaaatcaatacgaaatgcattgatacaaattagggcgagtatagctgtgtatcattgtttagttagaatttttcatatgttaagatctttaagtagcaaatatataaaaacaataacattggagatagaacggatttgatgtcatatatagctccaaaaatacaagcaagatcgtcatccttgaaatttgccttcctcaagatattccataataaaccataaaagtcttctaactgaaataataacaagtcaatgactatacatgcaacaaaccactctatggaaacaatgaatttatcatgacatgttttattatcaattttgggctgtaataaatattacaacgacatgatgagcttcaaatagtgtaatgcatgaacagtcaaatcatatacaagaaattctgaggaagtaatccaaagcttacataatttccccaccaccatacgtctacatttctccaccaccagcatactactttccgtctccaaaggttaactaaaagaactccaccgccaccatacgtctacagctctccaccaccaccatactacagtccatctccaaagggtgactacaagtctccaccacccccatacgtctacagttccccacccccaccatactactctccttctccaaaggttgactacaagtctccaccaccaccatacgtctacagctccccaccaccaccatactacagtccaactccaaaggttgactacaagtccccaccacccccatacgtctacagctccccacccccaccatactacagtccatctccaaaggttgactacaagtctccaccacccccatacgtctacagctccccacccccaccatactactctccttcaccaaaggttaactacaagtctccaccaccaccatacgtctacggctctccaccaccaccatactacagtccatctccaaaggttgacttcaactccccaccacccccatacgtctacagttcccacccccaccatactactctccttctccaaaggttgactacaagtctccaccaccaccatacgtctacagctccccaccaccaccatattacagtccatctccaaaggttgactacaagtccccaccacccccatacgtctacagttccccacccccaccatactactctccttctccaaaggttgactacaagtctccaccaccaccatacgtctacagctccccaccaccaccatactacaatccaactccaaaggttgactacaagtccccaccacccccatacgtctacagctcccc

SEQ ID NO: 160379 - DNA, 3331 bp, Arabidopsis thaliana landsberg
  unsure (1)..(3331): unsure at all n locations
cagctaaggttactttgtctgagaaaggtaattggcagcttgtccctgtgcattactgctcttaaatatctgtctcggtgtattgagtgcgaactttggatccttgcagcatagaatttggaataggactcttacagaatgatctaaaaggttctacgagctcaaagaagtctctcaaggttagcaaatttcctttggaattgaattgttgtttacttattttcattatggcaatggctcctattatgtaagaactgttaattttctctgtggctttcaggacattgtggtagaaaatgtgtttgagaagaggcttctaagtgatgtaattctgcccagtgacattgatgttacatttgatgacattggggcacttgagaaagtcaaagatatcttaaaggaactggttatgcttccttttcaatggcctgaacttttctgcaaggggcaattaacaaaggtggttctcttatcggcatttggttttaggaaattcccatattgtttcactatgtcctgcctcgaattgatgacagatctgtgaaggaccttttatttgtgtgtaccagtatacatgttcataagttttgtgaagtaatgacgatattagtaatactagctgataatttggctttcctcaaaaaatttatctcctataatttagatgttaacgttatggattggtggcttcctaatcagtctgctcctgtacttctctacacagccttgtaacggaattctcttatttggaccttctggaactggaaagaccatgcttgcaaaggcagtggcaacggaagctggtgctaacctcatcaacatgtcaatgtcaagggtaacagaatatccttgaaaagttggactctaccaatttatacacggaatctcttgttcaaacttgtgttcttctcaatattgcagtggtttagtgagggtgagaaatatgtcaaagctgtcttttcgttggctagtaaaatttccccaagcattatctttttggacgaggtaattcctcatggtcaattcgtgggcgaatcttgcttgtagtcagagcattgactgtcttacaatattttactgtcttgtaggtggaaagcatgctacatcggtacaggctgaagacgaaaaatgagttcataataaattgggacggtctgaggacaaatgaaaaggaacgtgttctggttcttgcagccacaaatannnnnnnnnnnnnnnnnnnnnnnnnnnttagaaggttgcctcataggtaatttatatatagcttccttgttggactaagctttctgtcaaattgacatgtcgtaacaagtttttggtattggcttctgcaggttgatggtgggactaccagatgctcgtagtagatcaaagatattgaaggtgatactttcaaaagaagacttgtcccctgatttcgatattgatgaggttgctagtatgacaaatggatattctggaaacgatcttaaggtaaaattcctagtaattccttttaaccttttgctatggtctgacgaaatgataagtaatgctcatatatatccatgttacatgctcttttggtgcgtgcagaatatatgtgttactgctgcccgccgtcgaatcatagagatagtggagaaggaaaaaagtgtaagtagtctttgtgttaaaccaagaaaactaactttatgctgcctaaaactagtctatagaataaaaatatgcttatgatgagatatattatggtaggagcgagatgctgctgtggctgaaggcagagttcctccagctggaagtggaggttctgatctccgagttttaaaaatggaggatttcagaaacgcactcgagctggtatgatttttgcttatgagctttcttttctcaaatctgtctctggctcagagaactgtataactgttgtcgatgttgttgaatcaggtgagtatgagcatctcatcaaagtctgtcaacatgacagcgcttcgacaatggaacgaagactacggggaaggtggatccagaaggaatgaatcattcagccagtacgtgtaggattgagtctacttcagaagcagaatgtgttgtatataatatgttcacgtgaatagatagatagtcataaaacagtataaactataaaggtatagtgagttctgacagaataacaggttttagtcggagttttgatacaaacctgtcaggttcggtcactggtagtttcgaatgacttatattcttgtcgcagtcacatttcatcaatttgtttttagcttaaatagttaataacggttcacatttcaactaaaccagtcaggttcggtctctagttccaaatgttttttcccttttcgatcaatcggacgatctttgctttgaaagcatagaaacacttgaagaaatcaagaaccgtatccaaatgaagcttcatgtatctgatgacgactttcccatgtggaagttgcgttcatgtgaccatgtcaatggatgttgtttataatcgcttccagtaaatcgaacgagtcgactaaaccgaattatattgatcatccggtttgttttgattgaatttgagcgacacgcagttcagctccagaacttgaattcggcaagcagtaacaccgatgtataacggaggcgaggcttcttcccacacagacacagaggatataggaaactgcgaagcgaaaaagcttcgtggctctaaaggttagagctttattcaatttctcgaattgaatcagatttagcacactgtgagttatttgcattgtctttgtaatgtattctctgattctccatggaagaaagttggtccagttgcagaaatggcgccatttgagggtttcagtgaatctttttcaaaatggatcagctttttccaataccttctcctcctctgctattgctgctgatgtgagctcaagagatggtcgaaaaggtcacaactttacagtttcttacctcgttgattcattaggtttagctacaaaagtcgctgaatcgatctccatgaaagtcagtttcgataacaagggaaattctgattccgttctggatcttctcagaagttatgggttcactgattctcagatctccagcatcatcaggagtgattcaagagtgcttatagacaatgatgcgacatcccttggttcaaagcttcagtttttgcagtccagaggagcttcaagctctgagctcactgaggttgtttccacagttcctaaaatcttggggaagagagagggcaaatctctcagcagatattatgatttcatcaaagtcattatagaagctgataagagttccaagtatgaaaagatatctcattctttggcacagg

SEQ ID NO: 160380 - DNA, 676 bp, Arabidopsis thaliana landsberg
aggacacaggtctttcacccatatttttattaagcaaatttgaaatacacaattacaaagaagagaccaaggaacaacgaagcgaaggagtagatataaacttgccaattatacacacaactccatttccattattgcatcagaacgtacgttcattcttaacaatccaagaaaaaaaaaacaccttagaacaacaacaagtagataagaaaacatgttcaagtatcggtatgattcgtttgtttcataggtatgtcataggtattcaacttacgcgcactggaaactctttggagcattcctactacaaacattgaggagtacgctgagattgataggaaggttaatattgacaattccaagaatgctagctttgagcgcagtgcagaggcaggccgcagcctcaaggtcagccaagccttggatgagcgagcaacatggctttacaggtgggtttcccaatgttaggtccactagattgagcacattggcacaagtaccgatctctatggaatttttaggacaagtccctgtggttgcagaggtgcaagtgaagaagaggaggttgagagaaacgaagagtgcaagagaggttcttggagccatatgtttgtatagtttaaaagctcaagaagtagtagtgtatttaatttgctttgagattggtgggagaaat

SEQ ID NO: 160381 - DNA, 840 bp, Arabidopsis thaliana landsberg
acggcctttagtgttgaagcttaaaaagactgatgatggaacagaggagtatgcagagttccttcatcttcgcaaggagcaaatcacagatattggtatgtgccttaacaattatgtctatcaatgttatgtatatcaatgtatgtttgttgtgctacaagtgtgtttaagttgagagtgttcattgaatttttgcatgaaaattcttcgatgtttcagctttggttcgcagggagattcaggatgagactgatagaatcacagggaaaagcggacagatatctccagttcctattcacctcagtatctactctccaaatggtatcatttaataatctcagtctgattcctgtaacattcttgtttgttgatttaacattgatgtttgctcttttttatggaaacagttgtgaatttgacactcattgatttgcccggtttaactaaagtggctgttggtatgtttcttttgacctcttctttgggtttccatttctttattatttgatgaccgtatatgtagttattgatactgcctctgatttccagagggacagccggaaaccattgctgaggatatcgaatccatggttcgcacatatgttgataaggtgagaattgctagatctttcattttttaaaaaaaatgcaaaaaccttatacgacttttaaactatatgctcaagttctagttgcagatggttaacttttttagtagttccaatagcttaatttctgtttgtttgcagcccaattgtatcatattggctatatctcctgccaaccaagacattgccacatcagatgcaattaagctcgcaaaagatgtcgatccaacag

SEQ ID NO: 160382 - DNA, 571 bp, Arabidopsis thaliana landsberg
ttatgttgttaaaaaaaaaggatcaagatggtggtaataaggttcggttatatcaagagtcgtatgttgtcagaaatgcccgaaaatatcgtcaatttccgagagaaagaaattccttcaaaaattcaatgaatttgcaaagagttctatatcggtccctcttgatcaaaatcccttcaaatttttgaggatgaaatttctgctgcttttttgtagtgatactagatcttaacccgcggtacaccacgtaaacaatttattttttaaagttagtatatataaaagtttgcaaattgtatctatctataaaatatttttattttatagtttacaattgttattacgtaacgtcctgccaaacccgtcccgccaacccgtcccataaaaaaactatttattttattaatgttgatcttattcatgatatgtttatgaattattgtctaaatattttagtcgatgcggaacgttgaacccacacattttatgccaattggttattatatgttcatttttaaaatttcgaatcacaaaatataagggaaaaaatttgaattttttttaaactcta

SEQ ID NO: 160383 - DNA, 2055 bp, Arabidopsis thaliana landsberg
agaaaaatggagatatcagttgcatgcgtaacagtttctgtagttgtagttgttgttgtgtcatggtgggtatggagaactttacagtgggtttggtttaaaccaaagatgcttgaaagttacttgagaagacaaggtcttgccggaactccttacacacctcttatcggtgatttgaagaggaacgtcaacatgttgacggaggcaacatccaaacccatcaaactaaccgaagatatcacacctcgtgtcctgcctcatcccttccaaatgctcaagactcacggtatgtgtcctggttggccttttgcttcctctctgttttaaactgttgatcaagagaaaaagagtttcaaattttgtatatctatgtggtttgaaacaggaaggactttctttacatggcttggacccaaaccaaccatcaccataatggatccagagctaatcaaagaagtgttcaacaaagtttatgaatatccgaaggcgcaaacgtttcttttgggcagactactagccactggaatcattagttatgatggcgataaatgggcgcaacaccgaagaatcatcaatccggctttccaccttgagaagatcaaggtttaaggctttatttctcagtcacatatcaagttgtattttttcatttgggtcttctgacccaacttttgcgtggatctgcttctatctattatatatagaatatggtacatgtgttccacgaaagctgcagcgagcttgttggtgagtgggacaagttagtctcggataaagggtcctcgtgtgaggtggacgtgtggcctgggcttacgagtatgactgcagatgtgatctcccgtactgcttttggtagcagctacagagaaggacacaggatatttgaactccaggcagaactagcacagctagtcatgcaagcttttcagaaattttttattcccggatatatgtaatgaaaaaactctacttgtctagctttaatatagtgcttttaaatctggattcttgatctttaacttttagtgctgctatctattagagatatgacttgtgttgtcataatcatgtgcttattgtttgtgtagttatctcccaacaaagggtaatagaaggatgaaaacagcagccagagaaatccaagatatactgagagggatcattaacaaaagggaaagggcaagagaatctggagaagcaccaagcgacgatttgctaggtatacttcttgaatcaaacttggggcaaacggaagggaatggaatgagtaccgaggatatgatggaagaatgcaagttgttctatttggccgggcaagagacaacatcagtacttctggtttggacaatggttctgttgagccaacaccaagattggcaggctcgtgcacgagaggaagtgaagcaagtttttggcgataaagaacctgatgcagaaggcttgaaccagctcaaagttgtaagtaaaccgaaccaaaaaccttcaagtgacgtgagttcttttgttgcattgaagctgaaagatttgatccctcacagatgacgatgatattatatgaagtccttaggctatatcctccagtagtccagctgacccgagccattcacaaagagatgcagctaggtgacctgacactaccaggcggcgttcagataagtctaccaattctgctaatccaacgcgacagggagctgtggggaaacgatgcaggggagttcaagccagatagattcaaagacggtctctcaaaggcaacaaagaaccaagtctccttctttccttttgcgtggggaccgaggatctgcattggccaaaattttgcactgcttgaggcaaagatggcaatgacactgattctacggaaattctcctttgagctttctccttcttatgttcacgcgccttacacagtcctcactactcacccacagttcggtgctcctctcatcttgcacaagctctaatcgtataaaccccttgttcaaaaatatactttccaatttccatacacagatgaaacaactccatattatcatacaaaactcaaatcttgat

SEQ ID NO: 160384 - DNA, 787 bp, Arabidopsis thaliana landsberg
cccttttacttcatatgtgacagagaagacgagattgaagatatacagaaggtatctcttgaattgacgttagttttgttggtaagtagtagtgtgcaagattgtcgtgttcacattctgttatgaaccccaggaaatttcagtattgtcacaatgccgttgcccatatattaccgaatactatggttcttaccttcaccagaccaagttatggatcatcatggaatatatggctggtggctcagttgctgaccttgtatgttatttcacttctttgctgagttgagatataaaattgtttgtgtagtgatgcacacatctctgtggagttattatcctttaattctcgttggtgcaaataataatctgttaaaactatattgcgagtgtagcttcaaccgggtaatccattggatgaaatttcaattgcttgtattacgcgcgacctacttcatgctgttgaatatctccatgctgagggaaaaatccacagagatattaaaggttttctctacttatatattttaacatcttatggcttttcatgatactgtgtgttctgatcgcttattgcatgactatttttttttcctatttttgcagccgccaatattttgttgagtgagaacggtgatgttaaggtattttctacttcttaaacttatttgattaatttcttaaattttcttttatatccgagtggtttagttggaacttctttcacgcatattaggttgcagactttggtgtttctgcacaattaacccggactatatcaaggcgaaag

SEQ ID NO: 160385 - DNA, 985 bp, Arabidopsis thaliana landsberg
atgaaccggactaccttttgggtcaccgggtcatcgggtcaaccggcttggaccacgggttaattagttaaaatttatttaataaatttaatattaatagaaattttagagtattttattaaaaaaaaaatagtattataaatagaaaacaaaattaatcatatcatatttaatcaaatataaaattatattatgtttaacaaaatataaaatcatttacacccaaatatatatatatgtagaaaaaatcaaacaataataataaagtggttaaaaatttgaaatccaactaaatgtctaacaccgtaacaaatatattaggagatcatcaatgacagaactaaattaataaaacatcgtgaattcaaacaactaatctcggttgtctctctcaccattcgattcaattttaaggcggtattgtaaagtcttcaccaaaatctaaaacatcaaatgaatttaagaactgaaaaaacttttaaaaataaattgaataaagtctaaaatctcatattttattgtaaaatcaagagaactttttaaaacccacacccggtcggttcaaccggttcaccgggtcacgggttaattgcgagtttttgtgggttttttcggttttgaacttgttgggttttagcactaaatccaaaccgaaaaagtgttcgggtcacgggttaaccggtcggaccggacggttcgggtcgggcgtgaaaacactgctttaaacgcaatcacgatatatatatatatagtagattttaacccccggtataccgcgggaccaatttattttttaatgttagtatatataaaagtttacaaattgcatctttctataaaatatttttattttatagtttacaattgttattaagtaacgttctgccaaacccgtcccgtcaacccatcccgtaaaaaaacccatttattttattaatgttgatcttatttatgatatgtttatgaatcattgtctaaatatttt

SEQ ID NO: 160386 - DNA, 631 bp, Arabidopsis thaliana landsberg
gtactcaatcatcatcgttagaaaagagatgtgtgagtgtgacataaaaaaggttatggcaaacagaaaaccttggtaccagagagctatggcggtcgccagattcgcaacgaattggagaacaatccctaaatcatcgtcacaacaaccagagaattttcgtccgtctcgaaaccctagcgtcaacagcaagtcatccaatcataaccaaatttatcaccagctgagaaaatgctcgtctctaaaggtagctgcgaattcgttcactagggtttgcctctgcgctccgattggtccatacgacgacgtttttcggaatcacgtcccgccgagaagaagttcaagctatcctccgtcgaagcctcttcctatggagacggcggtggcggtggcgacggccaggatgagtgtggattcagggaggaggatatttagagggaagtcgttgagggaaaacgcgttgatgaggagattcgtggtggcagaagaagaagcgataatggagaatagaaagagagatcaaatggagattgtgaggaagagaaatcagatgaggaggaagaagaagcttggacctagtcctcttagtcgtatggttatcgctgaagatcaagaagtttgtcttctttga

SEQ ID NO: 160387 - DNA, 1246 bp, Arabidopsis thaliana landsberg
aaaaaaaaactcgaaacacgatcctaaatggcccaacgtcctaacttgttaactcatttccaaaatctcgtcgtagaatctcaaaacagggcaatggcggcacaagataagtacaagttcgttttcactgccaaagaagcagcatcggaaggtgtcaccgaacccatcagacttccaaagctgatcagaaaggcgatgtctctggctcggggtccaatctccaaatacaaagtcggagccgttggacgcgcatcatcgggtcgggtctatttaggcgtcaatgtcgaattcccaggtcttcctcttcaccactccatccaccccgagcaattcctcgtcaccaacctcgcactaaactccgagaaaggtctccgtcagttagcagtcgccatctctagtgactgcatcgaattcggcgcgccgtgcggaaactgccgccagtttcttatggagaccagcaacgagcttgacatcaaaatcctgctcaaatcaaagcatgaagcagaaggatcattctcgagccttaagctcctccttccgtacagattcacccctgacgacgtcctcccaaagggttcccctctccttctcgagaagcgcgataactgcctcaccctttcgggttctaccgaagagatatgctcatcagattgttcccatttgaagtgcaaggctctagccgcggcaaacaattcgttctctccgtacactgagtctccgtcgggagtggcgctgcaggatgacgaagggaagtggtaccgtggatggtacattgaatcagtggcgtatagcccaagtttgggaccggtacaagctgctctggttgatttcgtggctcgtagccgagggaaagggttcaataagatcgtagaagcggtgcttgtggaaaagaataacgcgagggtgagtcaagagcgcacggcgaagatgattttagacactatagcagctccgaactgcgatttcaaggttttccattgctacgtggatctccaaaaaaagtttattactgaatagtgatagataagaaaaatctatactactagtaaggaaaataatagccagtagggaattacactggccttcgttatttaactattttattatcctatcataattatgctttgtttacttcttggttgggttcgttaaaccttttgatatgtcacagaatcatatttatgttgtggtttcttctttggttcaagtacctttcagtggtgtcagtataaaatatatttataat

SEQ ID NO: 160388 - DNA, 702 bp, Arabidopsis thaliana landsberg
taaagtctactttcacattcaacaacgttactcatctcaagaacgatacccgaaccaccaatatgaatgctttcaaagagagttaccaggtattacattgttattaggtttggaattgtaaaccattttatttatctcacaaattgacaaacacaacgcacattgcagaacgtaattagagtttgttctatagacaattaactcccccgatccctaaattcaatcccaaaacactccataccttaaacatttgaatattccctcatatatagcttaagttggtgactgatatactggtctggtagtagctacatctcatgggtttatttctattggttagaacatcttggaatgaatgaaacctgatgtatttatatcataattgataagtcaaactactatttttggtatatctttgtcggtgaactgtgatacttataagtagaatgtagcaggaggattccgtccactcaacttctaccaagggacaggaaacatctaagagcaacaatattcctgctgccattcactcgcataaaagttctaacgacttcctgtgtcttgcattgcacggaacatattggctattactagtaatagagccacaagattggtggcggtaacgaatgctgatctagagcagatggcacagaacagagataatgctatgcagcggtacaaggaaaagaagaaaacgcggag

SEQ ID NO: 160389 - DNA, 3888 bp, Arabidopsis thaliana landsberg
ccatggaccatccacctctgaacacaaaacccaccattaatgaaccaaatctaatcacacaatacaagctccgattttgtaatgtaagcgtgagaaatcacagtgactagtgactgtaacacacctttgagctcggagatttcaagctagacgacggattggtaagagtacaacggctgatccggtgagatcggagaaaaattgtctctgtctctctctcacgctccttttgtaaaccgttctccggcgacttctccgtctggatccgatttgctcctccaccgtcctctttctctcaattcctttatttccgccctttttaaagttgtgttcgttgatgttttccaagtataggccacgtcagcaataagacaaaggtcaaaaccttctaaaggacccagagggtttccgtttatgtgatagttcttcatgatcaacatgtgtggcccatgagaaacaccagttaagttagtacgatgacgacgaaagaagataaatcctaaactcgtggtcgtgatttttttcccttccaaccttaaaaatatgtctgaaattttaaaattttcagattttggttttgtgttgagaacaactccaaagagacgagaagcagcgaatcgtacgagcagagagattcgtacgagcagagagatatatgtttcattacgtcgatgatggattctgctttatatcatcctcgaatctttttcgctcacagcttcatcaatggcttgtatagttctcctacgtttgctaatacttgctggagattggttagtcgttcaagttgggagatcaaggctagtgagaatagtgatcgcaatgtgttcgatgaaaatcctgttaggaaaaccgacgggtcgttgtttgattctgcttcgtttgagacagttgacgcggaaatcacgcctgagactgatgatttcttcgtgagtgacgcagagggtgatccagattgtcctactcaaggttattcctctattgaacttgctcttcaagctctacgcaaaggaaaggtttgttctttgacgattttcttgaagaccagtgattatgatgatctgtttttacagttgtatagatttggtcttactaaaaaattgtcacttatgtttcagtttgtgatcgttgttgacgatgaaaccggagatgttgaagggaatctgatcatggctgcaactctaacgagtccaaaagacatagcttttctgattaagaatggttcaggtattgtctcagttggtatgaagaaagaaaaccttgaaagattaagccttacacttatgtcacctgaaatggaagacgaagattcctctgctccaactttcaccatcactgtggtaacgatttggatatagttctcaagagggtttcattgtgtctatgttctgataaagttcttggttacaggatgcaaaatctggaacatcaactggagtatcagcttcagacagggcgatgacggttcttgcactttcgtctctcgatgctaaaccagatgatttcaggaggcctggtcatgtattccctctcaagtacagagatggtggagttttaaggagagctggtcacaccgaagcttcagtggatctaatgatattggctggtttacgtcccctctctgttctttcagctattcttgatcaagaagatgggtctatggcttcactgccgtatatgaaaaagcttgctacggaacatgatatccccattgtatcgttgactgatttaatcaggttagagaagaagaagaccatgtattgaaaagatagaaaacactggatacaagtaattatctgaagttttatatacttgtagatatcgaagaaagcgagataagcttgttgagagaatcacagtgtctcgtttgcctaccaaatggggtcttttccaagcttattgttatcgatctaaactcgatggaaccgaaaatatcgccctcgttaaggtacaaaatcacgacttacttctaaatcttgatcaatgtgcattggtgtcatctcagaacaaccaactggatattcgaatttaagaccagtcttgtgtttgtttctgtctgaatcgtgaccagggaaacgttggaaatggtgaggacattctggtgcgagtgcattcagagtgcttgacaggagacatttttggctcagcacggtgtgactgtggaaaccaattggacttagccatggagttaatcgagaaagaggaaagaggagttgttgtgtatctccgtggccacgaaggaagaggcattggccttggtcacaagcttagagcttataacttgcaggacgaaggacacgacactgttcaggccaatgttgaacttggcctatccattgattctcgtgaatacggtatcggtgctcaggttagccatattatatcggtttgatttggctacattaaggactaactcatagccattgatatgattgctttctctcaattttattggttttggaatggcccaatgtagatgctacgagacataggagtgagaacaatgagactaatgacgaataaccctgccaaattcactggtctgaaagggtacggactcgctgtagttggccgtgtgccggtggtgacaccaatcaccaaggagaacagaagatatatggagaccaaacgcaagaagatgggtcacatttatatctctgataacaacgatcagccattagcttgacccaaaagcttttgatagaaacacacacttttgaattttgtatttataaattgattcattcttatgtaatcatcaaccacaattactttttttctggaagatttgacataaaatcgaattatagttttatatagaagggacaaaaataatcacccaacaacttataaaactgctcgtagtagtaggaatctagaatcttgtaaaatgatcgattcgctactctaatctctgcctctttccggttaacattgattgatcgataaccaaactcgaaccgaacccaaaactattaaccgaaccagaacacgtcatagaatcacatttactatcaacatcggaccctctaaacgagatagaaggtaactcaaaacgctgcgattgcgtttgaggcggcgggtttatccattttggtagcggtccagccaaaagaagcgtttcaagaagcggtccagcttcaaccaccgctttcaaaagctttcccgtttctggaaaagctttccccatcacaagaacgtctagaggatcaatctgctgatgatgattatgagccgttggatcttcaagattcgtcaacggctgaggatggatgttgaggaaggtggagagttctgaggaagaagaagaagatacatcttgagagtgagagaagctgtttgatttagtgaggcttcttgaattagggttttgttgggtatggaagatgaattgagataactgttgtctagcttcgtctctttcttgctgagtgaatttgaggagattgagaagttggttcacttcttctctgtgtgttcttgatttctcattagcttccattttcagtgtctctagttcgaacagagtgctctgtagattctgcctcatctcatcaatgctctgcatttcaaaaagagtttcatatgagtatatatattaaagaaaagtaatgatgatgatgatgatgatgatgatgatgatgatgatgatgatgatgatgatgatgatgatgatgattatattgacagtgatgatgatgatgtcgacggagatgtcaatgatgatggctcagaattagatgggattaactttgatgattttgcggttcacctacccaaagatgtcaatgagcagaaagatgagagcatcttaagtgttaggagaggtattaatgtgaaagtcatgaaatgttttctttttcagtttttcttttgaaatttagataa

SEQ ID NO: 160390 - DNA, 955 bp, Arabidopsis thaliana landsberg
cttgcaacgctgcaaactcaattgggtacagtaacttaaagtcactttttctctgttgattttattaatttgttcctaaatgtgaattggaggatcataattagggaaattaaggccatttctataagattagatactctcttgatgttgattaagttgaatcactgatttggttaaattctatactcttaaagttgtgacctttcctttttttttgtttggtgtagctacaagtttaacaacatcaaccttcttcgccgtgcaatgactcatgcttctttttctcaagagaacaacaaagccttgagtacctttggaacccatatcattgaaaccgcggtctctcttcagtttctcgctaaagatatcgatatttcctcgaaagcactgggccgtttgatatcagaggtttcaaatgtggagtcctcatgtgctcttgacggagaccggttgggtttggggaagataatcagagtttctaccaagacagatgcatcgaactcggccattctttgtactggctttagggcaatctttggagctatagctattgatgctggaacggttgatgaagccatcaaggttttctggaaggtacatggagctcgagctggaagactagtctctatgttgtaaattagagctttattaagttattaaagtcatgttttttcggatgccaagttctaagagactcttctccaatgcttagaattttatggttgatgttaactattagctgctgttatgagggtgtaagtgatcatactatagtgttgactccaaaactatctatttttgttgcagtacctgcagtgacttaatgactgaaaacgttaaaatgacaacaaatcagtcaattgcaaagaattatggtggtatctccatagaaaatgtgaaagtggtccaaaatgtgagagatgtgcatgcagacttgtggatccaacagttgtga

SEQ ID NO: 160391 - DNA, 599 bp, Arabidopsis thaliana landsberg
tactgagactgactctcttggtcagaagactagtaatgagaaagaaaccagcaatgttgttgactctattttggttgtggaagatgactatacaaaaaccgaatcgcttacaccggtggtttcaggtctctcttcagccaaaactaagcagattgatgcaatgccattagagcaatctgataaacagttcaacacaacagggtttgtagcttcgtttaatattgtctttcgaaattttcggttttactctgattggtggtttttgttgtttaattttacagaatggttgatttcattgatagattgaagcaaagcagctcagtgaaagtgactgatgcacatgtaagtactctgattttctaactgaatcttactttcttggtttaagactagattcatatagccaataattccattgaaatttttctaggcaagagtcaatgaaacaaaggttacaacaagcaacggtaagaaattctacctacaaactttgtatcaaatactgttcagttactgacttatgttcttctaaaaggtcttgctctgtggcctggcctttcttcaacaactgttcattcaggagctcaagttctttcaaa

SEQ ID NO: 160392 - DNA, 352 bp, Arabidopsis thaliana landsberg
tttttccctttctattctttcagatttacagagtttcagatatggaactggtgagagtacttccaagctcagaggatgaagttaatgttgcttgctttcatccttctcctgggggaggtcttgtctatggaacaaaggtaattaatcctaaatcgtaatgtgaaaaacttctcggcgctaaaatgttgacttgtattgatatttgctcaatatttatctcaggagggaaaactaaggatcttccggtacaacacagctgctgcgtccaatctcactgcaccaaatagctctcccgatgagaacttggccgaggtagaattattaacaaggttgatcttcttgaaataataat

SEQ ID NO: 160393 - DNA, 1682 bp, Arabidopsis thaliana landsberg
atgacatgcattgcttttgtgttgaaggctttgtgcttgtctctcttgttaattgttgttgcaagtcgctctaccatcagaccaaaagttttcaacgttcaacgccatggttctaaaccggacggaaagactgataacaccaatgtatgtaaacgaatattttcttatttttatttttaccaccaattagtttttcgatgaagatctttgagtattattcacacaccaacatatatgatcaccaatatacatacatgaaagataaatatagtttttctaatattttctggtttattttgtttagtaaataacctatgtcattcttaatggatatgaaattaggcattcacaactatatggagccgtgcatgcaaaaggataagtggaagtagtaaaatctatgtaccaaaaggaacattttacctaggtggtgtagagttcgtgggtccatgcaaaaatcctattgaattcattatcgatggaacattattagcgcctgcaaatcctaacgacattaagcaagacacgtggatcaactttaggtacatcaacaatctttctatctctggttccggtacacttgatgggcaagggaaacagtcttggccactcaatgactgccataaaaatcccaattgtcctaaattagctatggtaacatttcttcaactttttcacttattgcttcattttgaaaaaatgattattatttatttaaaacgtatttcaaaatgcacatgttatttttatacaaaaacttatatgaaattttctagtcttttttttttcatttgagaaactaaaaactattatcataaacttgattttttttaatagactatgggatttgcattcgtaaacaactcaaatatcaaagacataacatcactcaacagtaaaatgggacacttcaacttcttctccgtccatcactttaacattaccggcgtcactataacagctcccggcaatagccccaacactgacggtatcaagatgggttcatgtagtaacattcacatctccaacacaaacattggtaccggagacgattgtatcgccatactctctggaactactaacctcgatatctctaatgtcaattgtggtcctggacatgggattagtgtcggaagcttagggaagaacaaagacgagaaagacgtgaaagacttaacaataagagatgttattttcaacggtacaagcgatggtattcgaatcaaaacttgggaatcttcagcttcgaagatccttgtttcgaacttcttgtacgagaatattcagatgattgatgttggaaaaccaatcaacatcgatcagaagtattgtcctcacccaccttgtgaacatgagcaaaaggtttaaatttctattcaaaaaccaagcttcactctcttttattttatcacccaacaacataaaagaaaacttttgtttattttcttcagggagagtctcacgttcaaatccaaaaccttaagttaaagaatatatatggaacgtcaaagaacaaagttgcagtaaatctttaatgtagcaaaagattttcgtgcaagaatattgagctaattgacattaacataacgaataatggacatgtagatagtttttccactttggtttgcgagaatgttgacggttctgtaagcggtaaaatggttcctcaacattgtattaat

SEQ ID NO: 160394 - DNA, 980 bp, Arabidopsis thaliana landsberg
ctatgtatccggctacaaaaacagattccagaatttcattagatacctccgtgaaatgggagacgaggtttcttcttttactatctcattcttcaacttaagtatcttttcagtcagctcataagtaactgtttccagaattagaattacttgacaagtgttaactgttccttttttttttttttaataacttttttgcttcataggttatagtcgtgacgacacatgaaggtgttcctgaagagttttatggagccagagtcattggatcaagaaggtagcaccatttagtttactcactggatgttctctatttggtaatatcgctaatttcttcttctcttctgtagcttcccttgtccttattaccaaaaggttccactctcgcttgcgcttagtccaagaatcatctctgaaattgcacggtttaagcctgacattatacacgcttcatctcccggagttatggtaaatccctcaagaattcacattactaaaacattagcaagaccagtgaactggagagaatccagaacttgactctcttttttccctgactaaaatttttaggtctttggtgctctggcaatagcaaaaatgctatctgtaccaatagtaatgtcttaccacacacacgtccctgtgtaagtacctttttctgcctcatttcacaatgttgttataaaaaaatttttgtctaagattaagcttgtgttgatgtgcagatacatcccaagatacacttttagttggttggtaaaaccaatgtggtctataataagtatgtaaaacccgcttttcaaatgtcaaaatttccttcttctttttctggtttattgtgatgtataatatgaaactaaacttgaatatgcttttatcagggttccttcacagagcggctgatcttacattagttccttctgctgccattggaaaagatcttatagcagctggtgcaactgcaggtgaagaaagatcat

SEQ ID NO: 160395 - DNA, 461 bp, Arabidopsis thaliana landsberg
ctggtttcattcaacctcgaatcttcacattatacaaatacacttaccagatagagaaaatattgttttttaaacattacattagaaagtatgaaaagattactagtccaatagtaaggctgaagatgagatgattcaacactccaatcatgacgaaggaggaggaagacgtagcagtcttgccatttcctctcagacatatgtaaaaaatgacaacaagttaacttccttgcacgttcttaattatgatcctttgttctatataaacgatgacagtttgagcaacagagaaaacaaaggaaatatgtatgtaacaaagcgtttgtctgaatatcagaaaaacccatcggagctaacatcgcttccgacagaaggtccaaactccggagtattggtgattcaagacgaagaatcacggactccatgctgctttggaaaatgctttgattggaaactccatg

SEQ ID NO: 160396 - DNA, 4348 bp, Arabidopsis thaliana landsberg
  unsure (1)..(4348): unsure at all n locations
atgggcttcgtgatccgatggaggtcaaggccgcttccaaaccgtttgtcttctcctcttctcttccttgtgctcagcttgtctggttgagtgcggatttgagtagattgtgaagacgtgatcgagtgtccggtcgagtgtggtcaggtggtgtggcgaagtgatactcgaccagggggtcgagtagcgtcatcgagtggcctgagctgaggatacttgaccagggggtcgagtagatgggaagaatggctccaagatactcgaccagggggtcgagtatggtgctagatgtacacggcctggaggtcttgtatgtcctctgattctggctcgcttcttccactttactcgccaatagctccaaatcacctgaaaacaacttagaaatgcaatatgtatgcaaagctattttgggttctgaaatccacactagagatttgtatttaagagtatgagaaaggaggcctagatcttcactgaaatcttgagagttgtattgctaaaaacgaatggacttttgtattaattatgacaaagcttttacaatgtgaaaagggattacaagtgtaaaagtgtgtgtatcaatgtaagctggattgaatgtctcttccaagtcgtcctagctcccttatataggtctacgcacgtggtagctccgtccgggatctgcgaagatcctcctggatattcggcaggtcagtttcgagatatcaggtctgctccgcgaatatctcctcgtcaattcctaggtcattgttcgcttatctcccttcatcaggtgactgggcttatctggcccaaatacctattcgcgtatgtgggcttgtcagctgcgtaggtcctctacttggtgggcttggtgggcttttgtgggcttgcttagtattttcgcaggtggattcctggaggggaatccagctccaacattggccccccagcccattgagtgagttggcgaacccgatgaacggacatatatatcagatgagattgcaaaaatattctcgatgagatgatagatatggcgggatctgttggttttgaggataaactcaataaaaatgatttaatttgaagtcctgaaccgaaagatattgaggagatacgtgagatatgtgctgctgacgtggaccactgagatggagcgccttttcagcgcaccatatctaacggtccagattacgcacggagaagagatctctgcaatctcgaaaatcgtggtgatgatggctttaaataacttcccacctctccacttgacgtcacgtcaactcaagcgactctcaaggtaaattctctccacctttattatttactgcgttttgtctttagagatagaaaaatttcatctttttctgctatctccatcgtttctctgctactctcgtctttctcgatctgccctctttgctcttttctttcatctctctcgtctttctctatcgaaaccaaaagatgagcgccttcgaggattcccagaacaaaagcaaccacagttacggcgacgatgagagttcgtccgagacgaggtcgacggcgtcactgccgcaagtacaaaggcgcgtcataaccctagacagaatgggtccagtccggccgatgtcaaccagagccgacaagccgaagaagaaaaaggctgccaagcaaaaaggaggcacgctgatgacaaacagcgacctggtggacctctgaaggagatgccaggttccggtgggggtaactatgatactcctaaggccaccgctgcatcctgagaacgtgccggccgggtagtgttgcgcttatgccaatttctttgagaaatgtggcctagttttcccgattccggcgtgtatcttcgagatgctctactgtttgggcctcgcctttccccagatgtgcccgaacttcgtccgccatgtactggcgttattcacctgggctcgggaagtaaacagataattcagctgccatgaccttcttcagctctgccaggtcaagactaatgctaggagcgaccaggggacgtactacatcagtggtcgtcccggattcctggtcctaggcagtttgaaggcttgtcgagacaccaattggcgatccaagtacttcttcgtcagagtagatcgtcattcaatcggcagctttgatcctgcgaggataacgaggacctggtctaccaacctgggtcagatagagacctgagcctcttgagtttttttttttgttgtttgtgtcgaatccttgattgcttttgctgaaagttagtactgaaactaattgcttgtttttgttgatttgcagcaaggaccaaggaagttactctctcggagacggaacttgagctgttaacccttctccgaggtggtcagactgactggtccattttcagcataaatcacatcgtagctgctcttgtcgtagctccagcagttcccgtagttccagcagttcccacaatcgttcctccaggagcactgctagatccgatcgaagaggtcccacggattgaaccagttcccgaggctgatctgcctataggtacgagttccgttatattttctttgggttaaaaaaggtacgagttatcaagacagctgcgcaactcgaattgttaactaacaaatgtcgtgctctattagttcagttcctccagactccagctccacttcagaactcccgctcatcggaagaatgaggnnnnnnnnnnnnnnnnnnnnnnnngccaacgctgggggtcccgctcgtgccggtgatctgtcggccgaggtgaccgcggctcgaaacactctagctgtttctagcgcatctgcctcagcatctcatcccttgcttcctgacgtcaacgcccggacctcagctgcagcaggtcaatcggataacgatcaagtcgctcaggtatctgggccatctgcagttgttcattctgatggtgcaccgtcctctccgaagagggctcggacccagccggaggtgaatctggcggctgagttggtcttgagcgaccagagggtcgcctctcctagagaggagaggatggaacctgcggctgttactccggaggcagctgcgtccgtagataggcgatcctcgggcaggtcccatggaggaggacgaggctccagaggtgggggccggtcttcaaaccggtctcaggaagtgaggcagacgtccaactccgacggaggatccgcgggaagcaggcctttccactggtcttacactcacgaccgtgatcacctgatcgttgaggacaaggctgggttagcgaacctgcttcgccacatcaaaaggaggaactgccaggtttctggagtgaagaacatggccgaggcggcggcctatgctgacatgatggcgaaggagggccaggtaattatcgataattgtcttcttctaatttatatctttgcgctagttgtgactttctgttttgctttcggaaggcgatagctgccacaaacaagctggttgctctctatgagcagcgtttgagccaggtcccctcggcgaacgagctagaagaaggaaaggccctcatccgggagctgacgtcgagtgtgaaggctggtcaggatcgcgaagtctcgttccagttacaccttggttttgacttgtttataaataattcgtcgatgatttgatgattctgacctgattgttatttcagggagagatcgagaggctgaaaatggagctgtccactttaaaagacctcgagaaaggttttgctgagaagatcgggttcatggagatggagatcggggggttgcaagccgacaagcagacggcgaggagccagattcatcgcttggagcagaagagggaagagctctccaaaaaggtgattgacctaactttgactgtacaaggggcgaagaaggcggttgacgatgctaaggttgagctggctgctgcgtattcgaagctgctagctgggatcaaggagaagtgggtcgccaaaaaggagtacacggttctggaggggcaagcggccgaggtggattcaaacttggctttgatcgaccagatcaccaaggctgctatcgatctgaccatggagaaacctcggctgcaagcagagctggaggacctggaggcgcggtgcaaatcgaaggaggtatcagactttactctaagcaagttggatctcccgcaggtttccgagattttggtggtacgtccgatggacgtcgacgaacaagggacgccaattggcttggatgagtttgggagcaacaaagacgcgttttcgggaggtctcgccgaagtttctagtactgtctttgtacgccagccggagaatcgagggagtaatcactttcgctccttgcttgttttaggattttgcgttttgtttcatacttaa

SEQ ID NO: 160397 - DNA, 1155 bp, Arabidopsis thaliana landsberg
aatatgccttaagagctcatgtttctttgctcagtctaaatgataaaaatgccgaaactgttgagatggctcctagcccatccagctcatcattgacagactcgttgacagctgtacgtaacgctactcaggcagcagctcggattcatcaggttttcagggctcagtctttccagaagaagcaactaaaagaatttggagataaaaagcttggaatgtcggaggagcgtgctctttcgatgcttgctcctaaaacacacaaatcaggaagggcacatagtgatgattccgtgcaagccgctgctattcggattcagaacaagttccgaggttacaagggaagaaaagactatttgattaccagacaaagaatcatcaaaatacaggtgcataaatgttttgataaaaccaaactaaaggtcttgattcgtttaatgtatgtcatattcataacggtttttaactggcaatggtgcaggctcatgtgagaggttatcagtttaggaaaaactacagaaagataatttggtcagtgggggtattagagaaggtgatattacgttggagacggaaaggagctggtttgcgcgggtttaagtcagaagcacttgttgagaagatgcaagacggaacagagaaagaagaagatgatgattttttcaaacaaggaagaaagcaaacagaggataggctacaaaaagctcttgcaagagtgaaatccatggttcaatatcctgaagctagagatcaataccgtagattgctaaatgttgtcaacgacatccaagaaagcaaggtaattatactaatacactaaccttaatctccttagaatcaataaaactaaacaatcttgattcttggtttataggttgaaaaagctcttgaaaattcagaagcaacttgttttgatgatgatgatgatctgatagatattgaagcattgttggaagatgatgacacattgatgttgcctatgtcctcatctttgtggaccagataaatcactacaagctttgttgtgatattgtgtcacagtattattgactcattaaacgtgtaaattcttctgtaatcactcttctcatattctgtaacagcattcatgactctaatttccatgatatatatttgcaacataaatcaaacttatgt

SEQ ID NO: 160398 - DNA, 320 bp, Arabidopsis thaliana landsberg
agctatttcatcttgaactggttgaaggcgaaacaattagagagtggctcttctttgacaaacctagaagagcatatgatagcggaaaccgaaagcaaagatcacttccagattacagtggaagaggttggcatgaatcaagaaaacaactgatgaaggaacaagaaggccagaagagatcttactatatggatccacaacctccaggtccctttgagtggcatctctttgaataccaaatcaatgaatctgacgcatatgcgttatatcgcctagaacttaaagtaggaaatggaaagaagagtgcgaaggaaagatta

SEQ ID NO: 160399 - DNA, 470 bp, Arabidopsis thaliana landsberg
atcattgcatcaagaaaggttgtctttatgcggtgcattcaaaatgtgcctctcaaccttatgtttgggatgggatagaacgtgaaggagagtcagaagatgaagtggaagaacttgagccgtttgtgacagtaagagatggaatcatacgacatttcagtcatgaccatcatcatttgacacttgatgagaacattgacagagattacaacgagaataagttgtgtcaagcatgcatcactccgatatatttcggtaacttctactcatgtatgcaatgtgatttcattcttcatgaagaatgtgcaaaactgtctcgcaaaatacatcacccagtacatccacatctgcttactctagtgggaagatctgaccttgttatggatgctacgaaatcatgttcaatttgttcttggaggtgcacaactggtttcttctatgagtgcagtgaaagagaatgtcgttttaag

SEQ ID NO: 160400 - DNA, 446 bp, Arabidopsis thaliana landsberg
atgatgcagtgaaactgaagcctgtctgtgattctgcagattttatgttacagggggggaaattttttattcccaccagaagtagctgaaaaagggaagtatttcttcaaatattatccgatcaatcgacacaaaatgactgtcctcacaccgtcttatcacgctgaggtacttgcttatttgaaacatgtttgaatctgtcttgagagagagaacaaaaaaactcatttgtctttttgttgcagagttactccccagaggacaacagattcgatctgaggcagtttctgtacaacagcaagtggccataccagtttaagaagattgacgagattgttgacagcttaaatggtgactcagttgctttcccggaagaagaagcaaactccaacaaagaaattggagttgtagcagcaaactccggagacccaagtgcgggtctctga

SEQ ID NO: 160401 - DNA, 371 bp, Arabidopsis thaliana landsberg
ataacctatagtttgtatatttcaattattccatcatttaccatttagtcgtctccttggtgatccaaatacttcatcatcttccttcatagcaaattatcttcgtctatctcatacatttaaacaaacatagacatacactaatcaatcttccttaatttaaaaaaaaaaacatggagaaaacccaagaatcagtggttagatatggaaaaaagatcgagaaaatgccatatcttatgcccgccggccgagttgtctttgcatctgcgttcctcgtgtctgcttggagagagtaagcactaatgaaattgttagttctgaatgaaatatattgttgtctcttcatgctagctattgatttttatattcat

SEQ ID NO: 160402 - DNA, 847 bp, Arabidopsis thaliana landsberg
tatgacgatcattccttttgtaagatgaatttacaagctttatgttttttaaattttaatactttagggttcatggaagatcaacccattaaccagtgctctagtagcaccaatgcgtcggagaaaactccagaatcaacccttgagcttaacatcaaaacgttagactcgcggacgtatactttccaagtgaacaagaatgtaagaaatcttcttcttcttctgcttcacctgcatatttgcttaagtttagtttgcttatatctgatactatttagggcttgacttgttgcaggaaactgttttgctattcaaggagaagattgctagtgagacaggggtgccggttggtcagcagcggctcattttccgaggacgggttttgaaagatgatcatcctctctcggagtatcgtatcctagtgctagcgactttgttaacttgttgattgtatgttatagtgtagctgtttgttgcattatgccatgtgccctgtgtataaaatgcatgttaaccaaatctgtcggaagtctagtttttgattgatcaagtgcatctctgcttttgtgagtcttacaccgtagaggaagctgtaatccagaaagagaactatatatatatataccttcgataagcttagtttttgtttatgtctgtcgtttccttccatcgcttttctactttcagtatagttgataacttgacatcgtcatagatttggaaaatgggcatactttacacttgattgtgaggcagccagcagaatcagctccttcctctggtacaccttcacaaggggcaaatgcaaatgatgagtaatcaagttattttttatcccctttctgag

SEQ ID NO: 160403 - DNA, 733 bp, Arabidopsis thaliana landsberg
aggtgtacacgctttgaatacacctccacttttgcaaccgtctcctgtaatcactaaccaagagaagcaaattgttgcaccaaaacctatccgaactaccccaaacatcgttacccgccttgaggatttatcgcagccttggactagatctcctacgaaatcccaaatggaaccgatggttgcaacttggcatttcacctcttatgatccacctcattcagtaagctctgtagtaggtatgtccgaattttttgaagattgatggtgttttccctttgatattttccctcgcttagtgttatggtcgatgaaatgtatttcagtagcattattattgcatttatgcctaggctttctcatcaagcagctacagattcctctttcagggataatatgcggcttgttcctatgcctgattcatacgacttggatagagggttgctactttctgttcaagcaatacaggtaatggggttgcaagaagatagaagaaataatcgtctgttaagtaaaaaagttgctacttaacgcggagaatttgttctttctagtaagggttcttttgcttgtaattttcaggcattgctggagaataagggaccccctgttattgttggaataggtaatattgcttgtttgctgtttgtgctgttttgttttaacacggagcctaaagcttatgttgagtatatattgtcacactgtttcactgtaggtggtcctagtgggtctg

SEQ ID NO: 160404 - DNA, 622 bp, Arabidopsis thaliana landsberg
cctacctcaaaagctgggtccaggtctagatctgcaagcgtcagcaaaccaagtcttcatactgggataaggttgaatagtgtctcaggaaaaatctcatggttattgttgtctgaacacgaggaaggctgccgttatatacctcagctaggggatgaagttatttacttcaagcaggtacgtcctcttggctgctaattcgttgttcacttccttgtattaatttgccagctgtgatattaataaactttccttgactgtcgttttcagggtcatcaagagttccttaaaactaaagaattaaatgacagggaccgatcaaggtaccttccccgaaacctaggagcagtagagatttgcaaagtcgagaaacttaactatgatacatatcctggttctggagatagctgctgcaaaatgaccctcagggttctggattcttcttcatcacatgcctcccgcaaagagtttcaactgacacttcctgagctcattaatttccctgattttattgtggagaagactcgatacgacgctgcaattcaaacaaactggaaaattggtaatgagtgccgtgtgtggtggagagacgcaaccggtgaaggcggggcttggtgggaag

SEQ ID NO: 160405 - DNA, 768 bp, Arabidopsis thaliana landsberg
aaacatgtctaattcaaaggacgagaaatcacaagatgcagctgatagaatcaaggctgcaacactcactgctgctaaaggtctaagccgtacacaagcggagagagcagcggctgcagcagcgagaaacgttaacgcttatggcccagaaggaagaaggtccgagtagatggcaggagaaaagagaattaaattaggcagatgtatttgatgagtactgagaaagctgtcaggcttggtgaaaggaaagataaaacaatgtcagcttcagccgtgggaagcagtgcttcggcggcttcacagtgtcagaaatgtttccaagctgggcattggacttatgagtgtaagaatgaaagggtttatatctcgaggccttcgagaactcagcagcttaagaatcctaaactgagaacgaagccttctgttgatgatcttgatggtagtgatgatgatgatgaagaagaaaggcctgatgcaactaatgggaaagcagaagttgagaagcgatctaagaagagtaagcgaaagcataggtcaaagtctgattctgaaagtgatagtgaagcctctgtgtttgaaacagatagtgatggctcatctggagagagtagttcagaatacagttcatcgtcggactcagaggacgaaaggaggaggagaagaaaggccaagaagagcaagaagaagcaaaagcagaggaaagaaaggcgaagaaggtacagctcttcttcatcgcagtcatctgagtcagaatcagcttcggactaa

SEQ ID NO: 160406 - DNA, 420 bp, Arabidopsis thaliana landsberg
gtgataaagaagtacggtccacggaattaaccgacctcaatcccactaacaaaatacataatacatctgttggcgatgccgactaccacagattgcacaatagagctataacaacccatcccgtgggacccgcccacgtggacatactcctccacgtggcatcatgttggctctgtatcgcatcgatcctaacctctctccttgggccacctaagcccacaggtaggttattggtgcgcttggcgttccacgaactcaagacctcaccctataacaacgttcccacaagacaagctgttaccaattgatctaagtcgacttttatataacaacccgtcccgtgggacccgcccacgtggccatagtctgccacgtggcatcctgttggctctgccacgatatattagggttgagagatag

SEQ ID NO: 160407 - DNA, 5976 bp, Arabidopsis thaliana landsberg
atgcaacatattcaagtactaacaggtaactcaaaaggatgaaagtaaataagaggtgaatgaaatgcaataaaagggtgaaggcaaataagcaaataaatctaagaagaatagaagtcctaaggatggattcattgatatgggcatatctagggtctataaggtggctaacagacgaaagacaaatacctcataactttaccacttcctaatctcaactctcgttaatgaaacatagcaaagcaggcattaagcaacaatctattaaagttaataagcagtttaaacatccaatctcttgggctagaatatacaaatctctggaattagtagaacaagcattccattcatcttttggatgctggaataccttggagagaattctaattgatcagaaagaaataaggattaggcccaactaatccaaaagggatctaacctaaccttaaccacctgacaaacctcgaatttaccctaatctaatccatcctcaataaccgtaatcaccactctagcaacataatcaagaacacaaacctagaaattactctaaacatatcaaaatgtagatctaaacaagataaacaacttaagagtacgagtaattaaggttcaaagattctaaaacacaaagaaaaactagaggataaaagcttggtcctttggacaaaccccaaagtgacctatttataataaaatcccgaaaaccctaaattcactagaagacaagagacttgaggcagtttggatgaatgctcgacccttggggattgagtgatagggtgccacaaagattgcgcctttgcctttatgattcgagtgattaattggtcgagtagttgcttcttcctctcctcttcttatgctcagctgtttggttgagtggggaatgaggaggatctaaagactctttgattgctcaacaagtcaggtggaatctgttggccttgatcaagtgacaggtagagtagaggatcgagtagagggtcgagtgattgtctactgcttcctctatagctgctttgatagagtaactggtcgagtagctgctctgctgcttcccctctggggcaatgaataactggtcgagtagctgctcctctggttcccctctggggcgatagggtagagggtctagtatactccttgtaaactcattgtgcacctgaagacacaccaaaacatgcaatatgtatgcaatatgattctatatgcctaagtgtgcaaaataagctaaaataatgcaaaatgatatgatacaatgagtgatcactaagctaaatgatgataaatacatgtataaaatgagtaaaatatagtgttaacccatatcgagcgtttgaggacctcgtcctgagcatcaaagctaatggagtctcagaggactacctactgtgcaagttcttcccttattcccttgttggctgaaataactcaaagcaggttccctcaagacttggagaagcatcaagatagcattcttgattaatttttacgatgatgctaagtttgaggcgctgaaaaacaagctgtctacctttactcaaggtccagcggaggctttcaaaaccgcttgggttcgtttcaaggagtatcaacgggactgcccgtatcatggcttcagtgaggtacaacttcttggtaccttttttagaagagttgattggaggtacctgatggctctagatgcagctagtaatgggaatttcatgtgaagatatccagaagatgcaacaattttgattgatagcttagcttccagcattagtaccaaaagcgttgacattgcaaggaaaacgcaagttcaatatgttgcacaggttgacagtttagccacttcagagaagatggatcaacagagatacatgagtttcaatcaacaatctatacatcaaaaaccggctcaggaaactacaagcttcattcagaatcatgcttcttcaacccaaattcaccctccacccgagaccactaggaagattgaatctcttctcgaacagattctcaaaggtcaagagaagcaaacaacagattttgatcacaaaactggttgcattatccgacgatatgaataggaagattcaaatattgaacaattggatcaagcaattgactacaaacaaagaagatgttcgtgctattgagttaaggagtggaaaacagctaaatccagtgcttcaacgagagcttcctacagccaaaatcgtcaatttggaagaaaatgatgttgcagtttttgcagactagacaccagtgtcgaccgacactactgggtgtcgatcgacaccagccacggtagacactacagaacgcgacagtgtcgaccgacaccaacagggtgtcgatcgacaccaacccagtccaaacctgcgaattctccaaaacctgatttcagctgcagcaaaggtaacaaaacccaaggttccttttcccaagagtcctaagaagtccaaataggagcttgatgatgatgctagatgcaaagctatgatggataagttgattgtagagatgccacttatagatgatgtgaagtcttctcctatgatcagacagtttgtgaagaggatggttactaaggatatgcttactgagaaagctgtgatgacgatgtctacacagaatagcgacattattcagaacaagattctaccacagaaacttccagatccaggtagctttgttctcaattgtggtatctttacgagagttttgattaatgcttgtgcgatcttggttctagtgtcaacttgatgccatgttcagttgcgcttaggcttggtttgacaaatttagaacctacgcaaatcactcttgttcttgctgatcgatctgtccgtagacccgatggtatcctatgcgatgtccctgtataagtcggtaccagctacattcctacagattttgtggttttatcttatgagaaagaacctaaagatcctctaatcttaggaagacctttcttagccacaactggtgccattattgatgtaaggaagggcaacataggattgaatgtaagtgatcttagaatgcagtttgacatgaataaggtggttaagaagcctaccattcatgggcagactttctatgtggatactatctcttctatggctgacgaatttctcatgaagatgacacctgctgatcctttgaagcatgctctgattccctcaattgacaaagttcccaacgggtatagtaagctgctggataggactgagcatgtgatgcaattggttgctcaagaggagttaatttgcacatctacaaaagcagcaatagttggcgacgtgagcccagaaaaagctcctaaagtagttgatctaaaaccatttcttgcagggctaaggtacgcatttcttggtgcaaattctacttacccagtcattgttaatgcttctttaaacaccgcaaagctcactttattgctaaccaagctgcacaagtatcgcaaagctcttggctattctcttgatgatattataggtatctctccagacttgtatatgcatatgattcacctcaaggatgagtctaagccctcagttaagcaatagagaagactaaacccaaatctgaaagatgttgttaagaaggagataatgaaactgttggaagctgggatcatctaaccaatttcagatagtgattgggttagtccagtgcatgtggttcctaagaagggaggtgtcactgtagtcaagaatgagaaagacgagttgattcctactcggacaatcacaggacatcggatgtgcatcgattacagaaagctgaatgctgctaccaggaaagaccatttccccttactatttattgatcagatgttggagaggttagcaaatcataagtaatattgctttcttgatggatactccggattctttcagatcccgattcatccagatgaccaggagaaaacgactttcacttgcccctatggtaaatttgcttatcggagaatgcccttcggtctttgtaatgctcctgcgacatttcagagaggtatgatgtctatcttcacggatatgatcgaggatatcatggaggttttcatggatgacttttcagtttatggatcatcatttgaggattgtttagagaatctctgcaaagtgttagcaagatgtgaggagaaacatctagttttgaattgggagaaatgtcacttcatggtacaggatggaatagttctaggacacaggatttctgagcatggtatagaggttgatagagctaagattaaggtcatgacaagtcttcaagcgccggataatgtcaaagcagtgaggagtttccttggacatgttggtttctataggagattcatcaaagactttagcagaatcgcaagaccattgactgctttactctgtaaggaagtcaaattcgagtttacacaggagtgtcatgatgcatttcaacagataaaacaggccttgatcagcgcaccaattgttcagccaccagattgggatttaccttttgaggtaatgtgtgatgcaagtgattttacagatagagctgttctaggacagaggaaggataaaaagcttcatgcaatctactatgcaagtagaactcttgatgatgctcaaaggaattatgcaactacagagaaggagttgttagctgtggtgtttgcttgcggaaaattcagatcttatctcgttggatccaaggttattgttcacacagatcatgctgccttgaagtatttaatgcaaaaaaaggatgctaagccaagacttttgagatggattttgcttcttcaggaatttgacattgaggttagagataagaaaggagttgagaatggtgtagcagatcatttatcacgcattaggatcgatgatgatgtccctataaacgatttcttgcctgaagagaacttatacatgattgatacaactgaagaagatgactgcaaacgtgatagcttcagtgttgatcgacactcttactatgtcgatcgacactcacatttcagaggaagtagacattcgaagttgcgcgatggtgtcgatcgacaccaggacgcttgtcgatcgacacccttctgaatcgacaagaaattggtcaccaactgagaaatgcgccctcacagcagtcgagaaagattacccatggtatgctggtattgttaattacctagctgcagatgtggaacctgataattttacagattacaacaagaagcgattcctaagagagatttggcgatattattgggatgaaccttatctttataagcattgttctgatggagtttataggagatgcattgctgcaacagaggttcctgatatactatcgcattgtcacagctctagctatggacgacattttgcaaccttcaatacagtatccaaagttcttcaagcaggcttttgatggcctataatgttttgggatgctcagaagttcatatcgcagtgtgatccttttcagaaaaggggaaagatcagcaagcgtactgagatgccttagaaatttatcctcgaagtggaagtcttcgattgttggggtatagatttcacgggacccttcccaccttccaacaagaatctctacatcctagtagctgtcgattatgtctctaagtgggtagaggctatagctagtccaaaaaagattcagcaattgtcatgaaacttttcaagtctatcatcttccctcgttttggagtgccacgcatagtcattagtgacggaggtaagcatttcattaacaagattcttgtaaaattgcttatttagtatggagttaagcatcgagttgctactccctatcacccacaaacgagcggtcatgttgaagttttcaacaggcagatcaaagagatttttgagaagaaagttgaaaaatcgaaaaaggagtggtcttacacgttagatgatgcactatgggcttacataacaggtttcaaaactcctcttaggaccacaccttttcatcttctgggtggtaaag

SEQ ID NO: 160408 - DNA, 5694 bp, Arabidopsis thaliana landsberg
  unsure (1)..(5694): unsure at all n locations
atggtgagttaattggttgaagaattgcgagggaattgctagacgcaatcgcacttcctcgcaaattttaccataaaccctaaattattaaaaatcataaattgcgagggacttgctaggagttctggcaattccctcgcaatatgtggtgcgttttaattggtttaaaaatctttctcgcaatttcaaagcaaactatgcgagggttttgcgaggaaataaatttctatatatactcgaagacctagtctgagcgaagctcaaaccagccgcatcaaaccctaaattttttcttcttcttctctgatctcctcggcgccggagctcttcttctccgatctgattccgtcgccgcctctcttcttcttcttctctaatctgttatactcatcgccgcctctcttcttctccgatctaattacggcgcagagtctcttcgccgcctcttttcttcttcgatctgtgctccagaaccgccgagtctcctcttcttcgactcgatccgttttgcctcaaaagtaacctttgtttctccaatctaagttcttctctcaaatccgacttattcttcttctccgatcttactctttttcccagatctaactcttcttcttcttctctaatctgttatactcatcgccgcctctcttcttctccgatctaattacggcgcaaactctcttcgccgcctctcttcttcttcgatctgtgctccagaaccgccgcggctcttcttctctgactcgatctattttgcctcaaaggtaacctctgtttctccgatctaagttcttctctcaaatctgacctattcttcttctccgatcttacttcttttttcccagttctaacacttgatttgttttttgtgcaagatgccgtcagataatacttatgtccggtttagacaataacagcgtgacccgttgcatgtcaattctccgcttagtggtgggaatatctcaggggttcaaggttcaggttcaggttcaggttcaaccgttccaccatcgccttcaacgccaatgactcagccttctgtcaatcattctgatgttcaagctgaccgtctcaacaatctgacactggaagagctcctcgatagtcctggtcgtgctggcttgacaaggctagacccaaagcgtcctccgggaactctatggtaaggttaagcttatagtctctggaattaggtcttgtaagttggttagttctgccttagaagtttggtaagttggttggttctgccttagaagtctctggattttggttggttctgccttagaagtttggtcctgccttagaagtctctggatttaggttggttgtacttagcattgtagtgtcttagaagtttaaagacatagagatccttatgtgttttgttgctgttgttgtaggtttgacgatgactctacagttgcagcaacagtccgcagcatatttgaaagagatttcaaagaacctcatgccaattggtcacagacatcaaaggctacaatcgatcgatggtatgaaacgtntgcggtaagttttgtgctcttttgatgtttatgcttgttttgtttgctttgtctgttttgtttgctttgctttgtctgttttgtagtctgatgtttgatgcttgttttgtctgttttgtagcaagtatataactgggaccgttcaattaacaaaagagtaagggttgagtttgaagcaaagctaaagtctaggatgtctgatcaagtgtcaaggtggaagggaaattggaaggagaagggtgatgaagccaagccaaaatggattgatcctgatgtgtggaaaggtctagtacagttttggcaagatccaaagtcagagaaaaaaagtaacaacagcagaaatgctagatatcatgatccggatggcaaaggcatctataaacaccgttcaggccagacctcttacaaagctcgtgcaagaaaacgggttagataagtattcttctctccttaccattacttaaactacaatgttatgaatctaacttgtttatctctttgtgtttcagtgtgagaagactggagaaacaactcctgatttcctagagctgctagatgagacacacagaaaagcggatggaactttcatcgatgggaagtcagaggaaatttacaagcaagtgacatctaggatagaagaggaagagtctcatatgtgctctctggacaatccggagagcactggatcaggtgggttgacagttcatgccaaaaacaagatttttactgaggtaaatcttctgtgctttttctttgcagcttgttgtgttgtgtacttgtctgaattttgttgtgtacttgtctgaattatgttgtgtacttggcaacttgttgtgttgtgtacttgtctgaattctgttgtgtacttgtctgaattatgttgtgtacttggcagcttgttgtgttgtgtacttgtctcaattctgttgtgtacttgtctgaattatgttgtgtacttggcagcttaattctgttatgttgtgtacttgcaaacttgtctgaattctgttgtgtacttgtctgaaatgtttgtgttgtgtctctagtctttgatatcaagttctcgtaatcttggcagcttattcattatactttgtgtctgaattctttgtgttgtgtacttgtctgaattctgttgtgtacttggcagctgaattctgttctgttgtgtacttctgtacttgtctgaattctttagtgtacttgtctgaagtgtttgtgttgtgtacttgtctgaaatgtttgtgttgggtcgctagtgtttgatataaagttctcttagtcttggcagcttattcattatactttgtgtctgaattcttttgaacttgttttctcacttgttttctgttgtgtccttgtgagtgtttgtgacctttgcaggttgctccgagaaagaaaggaaggatttatggtgttggatctctgcagtttgaagcatcctcagttcatagtggtccaacacttcctagtgatgatccggttatactttctgcgaagctggctgccgctgaagcttgcattcaaaatcaggctgagaagatcaacaactttgatatcctctttgactatnnnnnnnnnnnnnnnnnnnnnnnnnnnnnnnttcttcgatgaggttcctcgacacagacaagaccggttagcgcaaatgaaccacctgtagctacaactccagaacagcaagccaatgaggagacacctgctgctgctgccctagctaaccttgcaacaggatcctctccatcatcagtattttgagaacattgtctttctcttttttccttgtaatctttttagaacaagttgattatggtttcacacattataattgttgtatacattttatataacttgtgaaatttcagctttcaattgtgtttctatttaagaagcaaaaatcatctctaagcaagccataatttattaattaggactagttaacaactaatttacaactaattaactaggtaattagagtctaatcagacactaatcaagtcttaatatatcaggaaaacgttgcagaacgcttgcaaatccatcgcaatatttgcgatggatttgctaggcggtaaaaaagaatcgcaaatccctcgcaacaattgcgagggaagtactagaactgtagttgcgtgtgttttgcgaggaaaacagttcttcgcaaagtttgcgagggaattgcgactttttaccatttgcgagaagcgatttgcgaggaactgggtttcttcgcaaatctctcgcttttagctgtttgcgagggattagctagtaattcttccctcgcaaaacgactgttttcttgtagtgctactagttttgcaaaacggagttggcagcatcggtgaggacacaagatgacaagtcatatgagctgtggcatcatcgcatgggacatccgtgtgcacaagttgttggctctcttaagaatgttacagtttcaattcgttctgatattttgaataaagcgtgtgatgtctgtctccgcgccaagcaaactagatctccttttccgattagtatcaataaaactacacaagcttttgagttgattcattctgatttgtggggtccgtaccgaacaatttcgcattgtggagctcgctattttttaacacttgttgatgatttctcaagaagtgtttggattcatcttcttaacgacaaaacagaggctcctacttggataaagaattttattgccatggtagaaacgcagttttcaacaagagtaaagagttttcgcagtgataatggaaccgagttcacaagtttggcaaactattttcgacagcaagggattctttaagagacttcctgtgtgggtacaccacaacaaaattgaagagccgaacgcaaacaccgacacattctgaatgtggcaagagcattgcgctttcaaggacacttaccaatccaattttggggtgagtgtatcctcacagctggttatttaattaatcgtattccttcatcagttctgaatggtctaacaccatatgagaaattgtataagaaagagcccgattatacacatctcaaagtatttgggagcttgtgctatgctcataatcaaggtcataagggagacaagtttgaatcgagaagttgaaagtgtgtgtttgttggctatccatatggcaaaaagggttggaggctatatgattgcgaaacagaggagtttttcatctctcgcgatgtggtgttctgcgaagatcagtttccgtttgataagtcatcttcatcatcggcttctcctgtacacgaagaagaagaagagttatgggcttcattcagtatgaacccattagctgaaattgaagataggcccgataagggcaaaagcccactaactgattcaagtccatcttcattatccagcccagatacaaacattgcttcttcatcctctacgagtctctcgacgcctccgtccacttcctctgattcatcttcgtcaccaccgacctccacaactcagtctgacaattccgatcaaggattgactaccctcgaagctacgtctaactccacgaatcctgtgccaccatcatcaaatctgttgggtcgaggaaagagaccgaaaattccatctgtcagactcaacaattatgtggttaatacggcacatggaaaattgctcaacaagtctggtaaaacccaatatcccattgcaaactatgtctcttgtacacgtttttcagagacacatcgtgtttatctagcggctatcactgagaatattgagcccaaatcattcaagtcagctatggagaatgaacgatggaagaaagctatgggcacagaggtgggtgcttcagaagaaaacgaaacatggacattagagaatcttccacctaggaaacgagccattgggagcaaatgggtctacaagatcaagtacaattcggacggcacgattgaacgttacaaggcaaggttggttgctcttggtaacaaacaaattgaaggtgaagactatggagaaacgtttgctccagtagctaaaatgggtacggttcgtttgtttttaaaggttgcagctgggaatgattggccggtttatcagatgcacgtttacaacgcctttcttcacggagatcttgaagaagaggtgtatatgaaaccaccacctggtttttatccaaaagatgagcagaaagtttgtcgg

SEQ ID NO: 160409 - DNA, 143 bp, Arabidopsis thaliana landsberg
acagttacccccaaaacgtaggcaaatcgtaaccatcttgctaaagaagtctgatatagctttagcaatggctattgtcagcgaggctaagaaacaaaaggatggtgctatagcagaagtcacagagaagtcacatgaacctg

SEQ ID NO: 160410 - DNA, 557 bp, Arabidopsis thaliana landsberg
cctccgatgtggctgcctggatcgagtgagtgggtcgagtacaatgctttgctgcttccctcctggttggatagagtagaaggtcgagttgaatccttttgagctccttctgcacctgaaaacacaccaaaacatgcaatgtgtatgcaagatgatcctaaatgcctaagtatgcaaaataagctaaaatggtgcaaaatgatatgatacaatgagcaaatgcaaagctaaatgatgataaatatacacctaaaatgagtaaaatacagtgttatcaactcccccaaacttatctcttgattgccctcgagtaaacaaaaaatcttaagttgaaagagaggtttgaaggtggggattcaaaaatcgaagcatgcatatagaacaggtaagctcaatgtccaggtagctaattctaggttgcaaagtgatagacccttacttaaaaccgttagccatactcgtcacaatgcaacctaacaacctgccttaatctatttaagcacgaacagtggatcaagcaaagcaatggttatgaactcacttggtttcgggcttag

SEQ ID NO: 160411 - DNA, 908 bp, Arabidopsis thaliana landsberg
gtaaattgttttgtgtgggtggttcagtatgtatgttcctcctccggatacacatatttactcaattccgagagttcttgctcttatgcctcaaaaggtcagtcatttatccttatcggttgctgtttttgtaatgcctatgcgttgttgtgagacttccttttgttcagcaagataattgcttttcatattgtgcttaattgctaattgaacccatatacctccactctacctagtaattgtatcacttaagaaatcttatctgcacagagctctacctagtaattgtataacccatataccttcactctacctagtaattgtataacttaagaaatcttatctacacagagctgtacacgtttggtattgtttggaacttctactcacactgatagactggaattttgaacatataatctcaaaaagtgccgtaaatggtcagcatttagtatgattagagagtcagaatgtagcagctgggtgtttgtttagtcactttcctttcattctgtggccagttttgtactctttgctgctttcatgattgcgtatgttttacattgtaaggtttatttataagcaagttgttacaatgagtgagtggtgctaacaagggcttgtttaatgatgttacaagtacagtatattcgatgtgcaatgagtgactatggatgttacaatgtcactgaaccacctattgatgcccccagagatccactgtacaaatctgagagggagatatccaaggtacatattggaccatgtacattgatgttaaatccattaggtctttgatgcagggagtcttgagcaacatgtattaacaaggatgtacttagttttgatttgacaacatttttggaaaccacaccacgaactatgttttttaagcattaaggatgaga

SEQ ID NO: 160412 - DNA, 8087 bp, Arabidopsis thaliana landsberg
  unsure (1)..(8087): unsure at all n locations
tggcattcaaatccagagaaaacgggaaaaataaatcaaaaataaaagaaaagaaagaaagggaaaagaaaaatcaaaccagtgtgttgcctaccactaagcgcttgtttatagtcaatagcttgactttgatggaatttggggatcaggtggatcagatggtggcagtaaatattgcggagaaagacctctcatcatccatactggtgtataagcaattagtgtatgaggtctatctaggaagagaggagcatcagcagggtggaactcaggtatgggtggaatactcctttgtcctgcaaaagcattagaagaaagaacaagcgctcgacgaaaaactcgtggcttgcttaaccgtaaaacagtttttggaaatttgaaggtcttattgatgaaatcaggaggtttaggaggaggaaaagttgtctaaacactcttaatccatctttaacacttctatttagtcaaatgcattggattatgacatattttgaccatagaaacaataacaaagctatttactgcttataaacaattgattgttggttttagcctcttttaggacaaaatgggtatacgtgttgtctaaacattcttaatccatctctaactcttataattagtcaaatgcattggagtttgacaaattttgaccatagaaacactaaccaaagttgtttactacttttaagcaatttttggttggttttagcttcttctgggacaaaatgggtagaagtgttgtgtaaacgctcctaattcatccctaactcatataattagtcaaattctttggattgtgacaaattttgaccataggaaaactaataaaactatttacttcttctaagcaatattttgttagttttaccattttttgggagaaaatggatataaatgttgtctaaacactcctactccatctctaactcttatgattcgtcaaaagtattggattgtgacaaatttttaccatagaaacactaacaaagttgtttactacttctaagcaattttttgttgattttagtctcttttgggacaaaatgggtataagtgttgtctaaacactcctaatccatcttttcctgttataattactcaaatgcattggattgtgacgcatttttactatagaaacactaacaaagctattgactgcttctaagcacttttttgttggttttagcatcttttgggacaaaatgggtataattgttgtctaaacactcctaatccatctctaactcatataattagtcaaatgttttggattatgacaacttttgaccatagaaacactaacaaagctatttactgtttctaagcaattttttgttgtttttagcctcttttgaaagaaaaatggtatatgagcagtctaaacactcttactccatctctaactcatataattagtcaaatgctttggattgtgacaaattttgaccatagaaacactaacaaagctattgactcattctatgcaattttttggttggttttagcctcttttggaagaaaataggtataagtgtggtctaaacactcctaatccatctctaactcatataattagtcaaatgctttgaattgtgacaaatgttgaccatagaaacactaacaaaactatttactacttctaaacaattttttcttgattttagcctctttttcaagaaaatgggtataagggttgtctaaacacacctaatatatctttaactgttatagttactcaaatgcattggattgtgacacatatagaccatagaaacactaacaaagctattgactgcttctaagcaatattttgttggttttagcatcttttgggagaaaatgggtataattgttgtctaaaacctcctactccatctttaactcttatgattagtcaaatgtattagattgtgagacattattaccatagaaatactaacaaagttatttactacttctaagcaattttttgttggttttaccctctttttggacaaaatgggtttaaatgttgtctaaacactccgaatctatctctaactcttataattgagcatagaaacactaacaaaactatttactacttataagcaattttttattggttttagcctctttttgaaaaaaattggtataagggttgtctaaacattcctaatccatctctacctcatgtaattagtcaaatgttttggattgtgacaaattttgaccatagaaacactaacaaagctattgactacttctaagcaatttttttgttgggtttagcatcttttaggagaaaatgggtataattattgtctaaaaacttctactccatctttaattcttatgatttgtcaaatgtattagattgtgagacatttttaccatagaaatactaatagagttattcgctgcttctaattaattttttattggtgttagcctcttattcgacaaaatgggtttaagtattgtctaaacactcttaatctatctctaactcttataattagtcaaatgcattagattgtgacacattttgaccatagaaacactaacaaagctatttactccttgtaagcaaatttttgttgggtttaacctcttttggaagaaaataggtataagtatggtctaaacactcctaatccatctctaactcatataattagtcaaatgctttggattgtgacaaatgttgaccataagtgttgtctaaacactcctaatccatctttaactcttataattagtcgaatgcattggattgtgacacattttgacaatagaaacgctaacaaatnnnnnnnnnnnnnnnnnncaattttaattggttttagcctcttttgggataaaatgagtataagtgttgtctaaacactcctaatccatctttttctgttataattactcaaatgcattggattgtgacgcattttaactagagaaacactaacaaagctatcgactgcttttaagcaatttttgttggtttgagcatcttttgggagaaaatgggtatatgtgttgtctaaaaacttttactccatctctaactcttatgattagtcaaatgtattggaatgtgacacattttgaccataaaaatactaacaaagctatttattgtttctaagcagttttttgttggttttatcctgttttggtataaaataggtataagtgttgtttaaacacacctaatccatctttaactcttataattagtcgaatacatgggattttgacacattaacactaacaaacatgtttactacttctaagcattttttgttggttttatcctcttttgggacaaaatggttataagtgatgtctaaacactcctaatctatctctaactaatataattagtcaaatgctttggattgtgacaaagtttgcccatagaaacactaacaaagttatttactgcttctaagcgattttttgttggttttagcctcttttgcgagaaaatgggtataaatgttatctaaacactactactttctctctaactcatataattagtcaaatgcataggattgtgacacattttgagcatagaaacacaaagctatttattgctactaagcaattttttgttggatctagtatctttcgggaggaaatgggtataagtgttgactaaacactcgtaatccgtctttaactcttttaattagtcaaatgcattggattctgatacattttaaccaaagaaatcttaacaaggctattaactgcttctcaggaatgttttgtgcgttctaatctcttttgggagaaatgggtgtaagtgttgtctcaacactttaggtggataatttcttggcttctccggttattcttagctatagatatagggagtttcgcggcatgcccaccggttattctgatattagagtttgagtttaagaacggttggataacaacctagctttcattagatctactaaccaatagtttcctgagaataccctgttcctagctctttattaaatcgttcacaacacaatcatcttgctgttttcttactttgttttctaactatttcactcataccctgctagcttaatctcgacatttaactcactgtttgaacaaaacaactccgtgaattcgatcctaaaatactgtaattgatcttttatttgagagaatagttctcggtaatttgaacaatatcaattagtcaaatgcattggattgtgacacattttgaccatagaaacactaacaaatctattaactatttctaagcaattttttgttggttttagcctcttttgggagaaaatgagtataaatgttgtctaaacactcatattccatccctaactcttatgattagtcaaatgcgttggatagtgacacatttggaccatagaaacgctaacaaagctacttactacttctaagcaattttttgttggttttatccgcttttgggagaaaatgggtagaaatgtgttctaaacactgctactccatctctaactcttatgattagtcaaatgcattggattgtgacacatttgaacatagaaacactaagaaagctgtttactgcttctaagcaattttttgttggttttagcctcttttgggagaaaatgggtataaatgttgtctaaacactcctaatccatctttaactcttataattagtcaaatgcattggattgtgacatattttgaccataaaaacactaacaaagctatttactacttctaagcaattttttgttggtttttgtctcttttgtgagaaaatgggtattagtgttgtctaaacacccctaatctatctctaactcatataatcagtcaaatgcattagattgtgacacattttgaccatagaaacactaacaaagctattgactgcttcaaagcaatattttgttggttttagcctcttttgagagaaaatgggtatatgtgttgtctaaccactcctaatctatctctaaatcttataattagtcaactggattggaatgtgacacattttgaccataaaaatactaacaaagctatttattgtttctaagcaatggtttgttggttttagattcttttaggagtatgataagcagctttttcaggtctgcttatggtgaatgtgtgtcagattcagttcaattcccctaaaacacaaacatgtcgatgcagtccactgtattgctagcaatcaagatgtgcacagaaacaatctaccaaaactaataagtcaagccaaattataatgatggtgggtttctagtaacaatcctaggtcaggattcaaacaagtaaaaataagaacttaagagccctactcgatcattgggtcgagtagaacctacatgtgacaaaattaagaaacctaaatgcaatcaacaggggatacaaataggggatacaaataacaggtaaataaaaatgcaatcaacagggatgaaaataaatctaattgaagttctaaggatggattcattgataaggacaactctaggatttaccaaatggctaataggcgaaaggtagatacccatgacgatagattcaaaaaccgggtcaatccactctcgtgacagagacccccataactctaccacttcctaatctcaactctcgttgatgaaacatagcagagcagggtttaagaaacaatctaccaaaaccaataggtagacaagccaatcccttggtcgagtctacaaatctctggaattcgtaggtcagacatccatttgaacgtcttttggacgctagacgtctatgatcgaatctccacattagccagcgaaaaccgcataggggccaagcgaatccagaagggtataacctaaacactaaccacctaactaacctagagattaccctaatctaatcaatcctccagaaccctaatcactactcatgcaacattctcaaaaacacaaacccagaaattactaaaatcataccaaaaggtagatctaaacaagctaaacaactttactaaaacaactaaatgcaaaaccgaaatagattaagagtaattaagttttgaagattcaagaacacaaagaaaacctaaagataaagcatatatcctttggacaaatcccaaagtgatctatttatactaaaatgttggaaaccctagatttactagaagacaagtgacttgaggcggtttgggctaataatcgatcttggggatcgagtaaagagggtgctacaaagtctgcgcctttgtgtctatgctccgagtgatcaattagtctaatagatgcttcttcctctcatattcgtatgctcagatgtctagttgagtggggaatgaggaggatccgaagacgctttgatagatcaacatgtttggtagagtgggtcgcccttggtcgaggagaggatcgagtaggaggggcgagtagatcgatctgaagtttcttttgaggctgccttgattgagtaaatgggtcgagtgaattgctgcctcctctgtggctgcctagatcgagtgaactggtcgagtagaatgctctactgcttccatcctggttggatagagtatagggtcgagtagaatccttgtaagctccttctacacctgaaaatacaccaaaacatgcaatatgtatgcaagatgatcctaagtgtgcaaaataagctaaatgtgatgcaaactgatatgaaccaatgagtgatcactaagctaaatgatgataaatacatgtctaaaatgagtaaaatacagtgttatcacttaacccattcaaaatctgctagatccagaaaaacactatccgatacatgatcacatttaatcacatatgtgttgtggttaaaacccattcgatagctcaaactcgatatcttgtacttgtcaaacgaaggactcaaagtgaaggtatcaatgatcttccaatcaccgatctttagtgacctgtgaaacttgccaatataatgctttctaatggaacaatgcatcttagatccctatatcaaaaccaagtaaacaaaaacacataagaccttgttatatatttcaaacagaaatatatatagattcatatatttaatcaatagcattctgtttaatcaaggattcacacaaagatttgtttaaaggaggaaaacaaatctagtaatttctcttcattaggtattccatccaagactctattacaaaagaggttctaatctcttatgaaatacattagggttttgctcaagaacagagaaagaattagggtattagaaggtatagttgcatccgtgatggattgcctacgtaccctgtgaagggatcaagccattcgtagttctctttgggtataaaattgtgtctttttgagtatttaattgtctcctttgagaagtccttgaggcgctttatataggatccttaaaccgcatctctagcgatattcttggaagatttccatttatctttaagtcggttctagaggatcatcgtcctaaagatattttccttattcttcagaggctttgggaagatttcctgattcgacattatcttcaaagattctactttatcatttccgaaagtcccataaaagatcctattttaccggaaatgatcctttgagaatgaatggtttttacaagtctttgcctcggctcttttcacggctcggtggtcgtttgagaggtggcttcaggcaaacggtatgtaccggttcggggcgcgcttgatgactgtccattaagctcagttggctgtctcgtgaggcgatatagttgtttttcgcagcgttctcacgattggctcggactgtgtttataggattaacacccgagccattttacgaactctctccgagacggttgattgaataaagtcccgaggtgctttcttctaggctagaggccaatcatatgtttaaccatgaggtgattgttactcttagactgtttggctcggtcttgcttgtgggggaattcgaccacaacacattctctcatacattttcatcacatataatgatatctaacgtttctcctgatgcatccatggtttgcctccacagatgaagaatcttgactcggacacgccaattcgttttgaaaggcttgacatcactaatatacgttaa

SEQ ID NO: 160413 - DNA, 546 bp, Arabidopsis thaliana landsberg
gcatgtagatctttctacctcgtgattttttgggtcttattcgagaatgtaatggctatgcatcggaccaaaggcactttcatcggtttacttgaaggagggagagttaacgaatgggttgtcaccgagaaattaggtgatgctcttgagactaagttacttccccaagtaagaaaacctcgcaacgggtttctcgaaaggtaatcaatcaagcaaataataatcagtttaggattttttcttcatatgattcatcttcaaactttgttgcaggataaactcaaaacagatgatggtggggatatacatattgtgctgtgcatcatataaccttgtctttgggaagccagtgttatatatctatctttacatgcaggctcttgcttgtattattgccggaattggttttataggaacttgataagtgtaattagtaatttatatatccgttagtattctcgttcttttctttttcaaatttcagaataagtaggtgaattattttatttaatacaattcttatgcattaatatcttcaattttttg

SEQ ID NO: 160414 - DNA, 4560 bp, Arabidopsis thaliana landsberg
cgtttgctcgatgagtaatttcccggcaacggaagagaggaggaggaagagtgtaagcaataaattcctacttcttctacgaaacattggctcttctcctctttatattctcttatcttctactttgcttctccgattctattacttttttgttagttgatccgactactcaagctttatttctgttcatggatggcttcaatcatcgcaggtactacttaccttcttcttcgatgaaatttctgctaatcggtttgatttttggttattaatcatatgaaattttgtattccttatttgtttgactgctctatgattatcatgtagtttgattgtgactgttctgatttttttttaactcaaaactgatcatgatttttaacgagaaaacaagttgatactctctttggttccgtggaatttaaggatcatcgaatcgggtttaagctttgatttgagtttattgttgtctctaatgatgctttgtcgccacaagcagcaaaattttcttttcatcgagttgaccaactcatggtcttgcttcgattttcttcttctcagttatgtttgttgatgtctggactactaggaaacacatgattagcttgtgatcgagaactaatgagcttagcaagttacagttctgctttattatgcaaaatcagaaattgactaacaggtctttgatatttgattcatatatgcagttgtttcttgtttttgtttgcagttgcagaaggcaaaaagatggagcaagaacccaatatatgctggtatgaatagattcagccactagctcgtctcagaaacagcaacaaatttcagatagggagaagctgtcaaagagaaggtactgattccacactctttcatgcatttctctgtgtgtttccttatagaagacgagaattgtagttgtatacaacatctagttttggagatatgccctgtgtagtagggtacctttgtgtcttgttaatgaagcttcactttcatatatatgttgctgagtgtcgtgcttaagcttcatatgtgttcattagccgcattgtttttgaatcgactttattctttgcattgattatcttttatgggactttctgcaactttaaacgatttcttggattggatttcgtgtcttattctgttatctactcttggtcaaaggttggtattacttaaatctcacaaccatgtgttaagaattaccctattaaacctctaagctctctttatgtcatcaaactctctgtatcatccacaattaaattgtcttagaattgacttaatgtcaaaaaacgttttgtaatgttttttaccttagaaactagtttcagttcaagttaagtgcttttgagttttgacttaatcacttaacttaaatgaacttgtttagttaacgtcgttaactaaatgaaagaaaacaaaccttttgtaccatttagaagctttgaagttagtatttaaggaaaaaaaaccctagacgactttagcataatttctttgacaagaaactgatcacgacaacgacacaaagtctcaacttctcaaactctccaagtctgaagaatttcaaaccaaaatctcaaagtctgtgagatatagattcgtaatggtaagctggtttattgattatgaatcaattttgtagtttgattggaaaattgtcgacaattattcattgttttgtactttattaattattataggattcagaaggtttttctgagtttggatcaattgacttagagtctcaaagatccatcgaagctgaaatccatcgtagtagatttgaggaaaacgagcaaagtagatttgatggagctgaaacatctaaatctcgtaaaagaccaacaattgatattgaggatgatgatgtcaatgataatgatgacgaagacgacaacgtcaaaggaaagacatcagcacaggaaggtccagaaccgaagaagagaaagcagtatgcaaattgttgggaacattttactgtgatatggaagaaagataggactgggaaagaagtagaaagagcgcaatgcaaccactgcaagaatgattatgcatatgatccacacaaaaacggtactaaatcttacaatcgtcacttggaaaagtgtaagattcggcttaggaatgctgatattggtaaaatgatggtcaatgcagaggcaaaattataagctaggaaaatagatcatctggtttttcgtgagatggtagccaagtgtatcattcagcatgatctcccgtttgcgtatgttgaatatgagagagttagatcagtgtggaaatatttgaacccagatgtgaagtttattactcggaacacaactgtaactgacgttttgaagttgtatgagaatgagacagagaatttaaagagagaattagctcagcttcctggcaggattagtttcacttctgatttgtagactgcaactactcaagaaggctacatgtgtttgacagctcactacattgatagaaactggaaattaaacaacaagattattgcgttttttgctttcaagcctccagatacatggatgcacatagccatggtgattctacagaagtggcaggattggggaattgagaagaagtgttctccatcacgttagacaatgctactaacaatgacaaaacacatgagattttgaaatttcagcttatgttacagaatgatttgttatgtaaaggagaatatgttcatgtgagatgtgctgcacatattctcaatatcattgttcagatagggttgaaagacatagggcatacgttgcataagatcagagagagtatcaaatttgtgcaagattctgaaaaacgtgagatattgtttacaaaatgtgtggaagttgttggtataaattaaggttaaggtgggtttgattttggatgtgacaactaggtggaattcgacatacaagatgcttgataaagcactcaagtatcgagctggctttactaatctcaaagtcattgatgcgagaaactacaattctctccctatagaagaagaatggcacttattgaagcaagtgtgtgaatttttagagccttttgatgtgatcactaatctgatttctggttcttcatatccaacttcaaacttgtatttcatgcaagtttggaagatcaatgactggttggtatcaaatacgagtaatcaagatgaaatcatcagaaaaatgattatcccaatgagagaaagatttgataagtattgggaagaaattggtgatgtctttgcaatggctacggtgtttgatccacggttcaagctaacacttgtagacttttgttttgcaaagctgggtaagagtgatgctaagataaagattgatgatttacgtactaagctgaagactttgtttgaatcatatgagaacaagtccattttcacgtcatcgtctacagagacacgtgaaaccaatcagcaaagtaagaagaatgcagaacaaaagaagtgttttggcaattatgaagtacgtaatcaatcatttattccaatttttagtgtggttttagtaattgtttctttagtgtttttgtggctgaaattgatgtgtaatctcgcaggatttttttgccttccgcaaagaaactgttgttagtagtgcaaagtcttctttggagatgtatctagatgaacctccattgtacacaaacaattttgagagttgggatattttgaactattggaaagataacactcaacgctatggtacattggcgttcatggcttgtgacctccttagtatttcaatcacaacagtagcctctaaatcctcttttagtattggagctagagttttgaacaagtatagaagccgtcctctaccgaaacatgttcaatcactaatatgcagccgcaatgggttaaaaggttttgaagcatatgaaaatgctaagcaaataattttcataatttttgcgcttacaaaattataaatcatgcattgattttgttatttttatgggacatatgtagaggagactaaagtatatggtgaacttgaagatgagaaagttccttcttttgtgtcaattgttgacgatgaagcttaatattgatgaagagacaacttgagttggagattcatgttttcagctttgaaattcagtttatgactttagtttaatgtttcagtttaagtacttgagttaaatgttccaacttaaaagttggagtttatgtttcagttttagtttggattttgtttatgtttcagactttcagttttagttttattttcagtttcagtttgactttttgtttctattcaagttttgccaattacaataactttttaagtagaacagcttctttgtggcactttaatcaggaaacaggttttatttctgttcagattttggttggaactcggagtcatcatggattgatggttctctgcttgaataccatatttgatatgatcaagagtgacaagagctcagatgagtttgaagtgacttgctcatatcttgaagtttacaatgaagtaaaacttacagctgagaacatggaggatttctacaatgagatatcaactcacg

SEQ ID NO: 160415 - DNA, 338 bp, Arabidopsis thaliana landsberg
acaacgcagttggaaagcgagaaagtgcagaaagaagcagaggttcagaaactaatggaagagaatgtaagactgacggctcttgtggataagaaagaggcacagcttctggccatgaatgagcagtgcaaaatgatggccctaagctctatatgatgcttagagatgaatattgctctacttaatctttcttccacttgtaacataaagaaactcttatttgatacaacttccatgtttgttgatatcctaaaggcaacaaaatatttgtcctggaagactctgtatgtgattgtacattcttagcacatgaaattgcgttattgtttggcttaacg

SEQ ID NO: 160416 - DNA, 713 bp, Arabidopsis thaliana landsberg
ctaaagcactatcatgtcgttgtagtactgaaggttgtcaatccaaaggagtgtgatgctaacaatcaagatgtgatcagaagtcactaagtcaagccaagcaataacaggttttggtttattctagcagtcctaagtgaacatgcagaaaacagaaaatcaaacacaaatagtaaaacactcgaccaacacagctcttggcagagcactgggtgaggtcgagtgacaggtcgagtaacagacagaaaataaaacacagatactcgactgcacagtctgttgccaaacaactgggtggtcgagtatgaggtcgagtaacaagaaagaattgcagaaactaagcgacagataacaagatgcagtaaacaacagtagagtaaacaaagaattcaatccgataaagaattaccgcggatagtaatgccattccatcagtgaaattgtgctgcacaacaaaaagagcaaaaaaaaatcttcattttctcagacgaatcatctcttggcaatctttcatcatcccgatcgaagctatctctttaatatttcaaaagggaacacgtacttacaacaccatcagagaacaagttgaggtaaccaaagactaggctcgaagaacgcgtctccacctgttctggtttgtccgattttccatcggaagtaatttctgttcctgaatctgatttatcagtagcgtcactagcagaagtctttct

SEQ ID NO: 160417 - DNA, 2914 bp, Arabidopsis thaliana landsberg
  unsure (1)..(2914): unsure at all n locations
gacagcaacatggaaaactcgacacagttgagacagttgttatgacttgtaacacccctattttacaattagaccataaagcccaagtccagctcgctaatgttttgaacctaagtgaaaacctaatgatcccacgagattataaaaataaaacgcaagttgcgagtcacaccacaaaaaccctacgccgtcaaacacggtaagtctcgatctcaactcaagcctttgttcttttgtcatttttaagtgctcagcctaactcaaacccttgttgtgaaccgacgcatcacaactcagacctacggtgatcgttgttgtgttgagccggagccacgcatgaatcatcctcacggagaggtaaccacgtgaatcaattcggttttgatctcttagctttctttaggattgttgaataaatctaatcatggatttttccatcacagatctgtgataacaagtcctgcacttttccgttcgttccgtcacgtgaaaccgaccagaaagcttgttgaggaaggtaactcatcaaaccttgtctcgtatctggttttgttgttgttatgtttgccttgattactaaaccatgatctaaaccagttaaaatcaatgaatcgtttgttgagttagaggttacgtgaaattgtgtcgtgaggaagaagaagatgacttggttcattggtttagttattaaagtgttggttaattgctgctaaaccggaagcttttattcacgtgcatgcgtggattcaatttatggttgtagtgttacgtgtagtcgtacacgttcaatagttaattattagacttggttgggttaatttattaaattatttttagttaatttattgaagtatagtcaaaccaattaatcaagagttataatttgggttggttatgaaattaattatagattatttttggaaattaatttttgaccggttatttaaaccgtcgcagattgagatcgctattggaccaatttccgttgttgctagtcctaaaccgtgttatccaaccgagttgctaaggcgagggcgggatccgtggaaacagagtatcacctttctacttttgtacttttgaagttcatttgtataggattagacattgggtgttgattgttaattattaggaattaattgttaaaatattataaaatgtgttgtgtgatgttatgcgttaggttgttagcgtgatatacatgttgatttgtttgacgtctttaagacgtatttttaaataaaaatatagaaataaataaagagaataatgatattaaagaaaggataagattgaggatgttggactgtaatggaaccgacgggtttattacaggttattaatcgctgacgagcaatgagaggaaggatcgagttacgagccgtggtcttccataaataagcttgaggaaccataagttaacatatgttaaaaactaagaaaagaaaacaaaagatcttgcggtgagcaagacggaagctagtctgttatagcttactaggaaagtttaagctatatgctttttgtttgagtctatgcttatgaaatggatattgtgtgaaagtataatcgtgtattgtaattcggtggacagttttgactgccttcactgagtaattaattactcacccccttttcttttcccctcaggtgaggaagagaatgttgagtagctgctcgcttggtgttatttcgggaactttggggtttcatttgatttatcgttatttcttatatttctaaacacggtttctttatacatttttatccaaagattttagtttatttatgctactattttaagataatttatttttgattcttaataaaagaaagtttcccgaaataatgatatattatttcaagatttaatttgaagaagatgaataaatgaatggaaaagatgaaagtacgtcatctcaacattgagagagacgggtattataactggtatcagagtggaggtttaaagtcaagcatgtgttgacccggaagactaactatatctatatttatttttatgaaaaaaagttttcttgtgttttatagttttagaaagcgttttaaaaagaaagagttttcagtattgatataggaacaggggtttaaaaaaaaaaaaaaaaaaaacaccaaatgtgctaggcttaattataaagtagtagtgtaaattgttggttattataagggtcctaatgtttagtcttgtgtaaacagaaaatcccgccaagaagatcagtacgtcctgcgaacgctcgggtaaaacgagtagcgaatgcgccagttgttggactaggccagccacctgtggtagctcaaccagctcaggcatttcaagcagatgaggcagctcatgcagctaatgcagctcatgcagcagagattgcagcgaatcagaccaagatgcaggagctccgaaacatgatgcgtgagattttggatcgaccggtgtatgcaccgccaccgccaccggcatctcgagttgctgcacctcagtaccattagccaccgccactgccaccagcacctagggttgaagtacctcagtaccatcagccaccagtgccgcttgcacagaccgaatattttgggacgatgatgctcatgagtaccatgggcacaaagtattttagtggtggatnnnnnnnnnnnnnnnnnnntgattggaggcagatgttggagaaannnnnnnnnnnnnnnnnnnnnnnnnnnnnnnnnnagaaggatttttcagtgcattacctgaggggagaagcagatcattggtggaaaaattttgagaagggcttgcctgctggatatgtgcctacctggaaggatttcttaagggagttcaataataagtactttccgcgggaagctatggaacagttagatcatgagttcatggagcttcgtcagggcacaagaaccgttc

SEQ ID NO: 160418 - DNA, 442 bp, Arabidopsis thaliana landsberg
tcattgttgggaatcgtttgtttaagttcggtgaacgagttgctataggtgcctccggtggaaaaggtaatttctttacactccaatgatggtttcgcttcaaagttcaaatttttacgaatcactctgttttagtttgatgtttgcgccataactcaaaagtttgtgatggtgcagattcttcagtgctggcatatgtgttatcagaactaaacagacgtcacagttacggactcgatctttttcttttgtctattgatgaagggataacgggttatcgtgatgattctctcgagactgttaaaaggaacgaagttcaagtaagcttttgaatttatgtgttatgtgttcactctaaaattttgccatgattcgtcattctttgttttcccagtaagagttgcaaattcagattgtttcatccaaagatctgtatggatgg

SEQ ID NO: 160419 - DNA, 341 bp, Arabidopsis thaliana landsberg
ctaggcccgtcgttaccggcggacgcacctgtgaggattcctttcctcatcgcgtgaacgacccgacggatatcgaatcggaagagtaatcggcgattggaccgccgatagagatggagataatgtctacgccgtcgtgaatcgctgcttcgaatccggcgagtatgtccatgtcagcacagccggatctcgcccaacaaaccttgtacatcgctaacctcgccgacggaaccgcgccgcggcggatgccgtattgctatgccatagagactcgcgtttggactaaaacgccggctacggtggatgacgtgtgcgcccatgtccgtcgatatcgatcggtg

SEQ ID NO: 160420 - DNA, 304 bp, Arabidopsis thaliana landsberg
tcaagcagcacaccttcgttaaagacatcaacatgggacacactagcaaggcaaaaggtgcatttatttatcttactcttttacagacataagctttgctacttgatgccctcttaaagttgaacactatttttctttaggctgcatttgttccggcttcagagagtgaaattgacacaagatacattagaagccgctaatcttggaacgcatcggatgagcaatttttcctgaaaggtaaaagtacaagattgtagtgatgctgatagcttgagtggcagcagtagttgcttgcgcaatcatc

SEQ ID NO: 160421 - DNA, 1288 bp, Arabidopsis thaliana landsberg
tttctgttgacagcattctttctacctttgatacttatctgactgatacctttgacacacttgctgcagttcccggtagaaatgcgtgtgagatcaaaatgtttcaccaggagaatgctgggttaaatgttgagatggccaagctcgccttctcaaaaggcatatggagttacgtttgtaagatggaaaacgctctttgtaaatacatagcaaccagtcatagaacccaaggacccattctatctgctgtcaccttaatgaaagaggtgagattcatatgaaaattctgttctgtaaaatggtatttagtgtcctgaaaatatgcttaaagcaaccggttgggttgggtcttcactgacattgattgttgtatcttcaggttccatcagagttagaaactgggacagataatgtcacaggctccatggaaacaagtagtggtgaaggagtgttgagtcatgttgtagccgccaaacagaagaaaaaaatgagaaagccatcaacgaaactgatagcaaaaggtctagtacttgtgggcggtgcgatctgcttgtcccgtggtccctcagccttaggtgctaaagtcgcattggcttacctcttgacgaagctgaacaaacgtggaacttctctgaatcagaccacccagaacaccaccatttaagtaaatttctcctgaactctggtagcttttggtatcaaattgttgtaccacagtagtactaccactagcgtatacataatgcaagtcggtgttgatatgaatgtaaaagcatacattataaacatacaagcctaaaggttatcattcttgtaattgtatgtactatgtaaggtctttatccttaaccaatcaatctttacttgattcttgagtcactacaaattgttcgattgtagttgatattgggacagatgaacattagtgatattaaagttgagactaaagagaaagcttatgaggtctacttttagcccttctttttggaagttgtagcaactatagctcaaccctagatgctaagcggcgagtgaagagtccaacaccacaataaatagaagacctttactatgatattatctcattacaaaactgaaacgtttttttatcttgacaacaaaaggaaaaaaaatgaaaagaataacaaaacttttggcctcccactctctcaaaagtttgatggccaagaaaaacaagcgttcccaacagaagaactagtgtctcaaaccggagtaagatccatcggcggtgaagagattgttggaagatcggtggaggaagataatg

SEQ ID NO: 160422 - DNA, 2843 bp, Arabidopsis thaliana landsberg
atgcatctgcatggtgccaaacatttgaaagaaattccagatctttctttatccataaacctcgaggaattagagcttgttggaggcaaatctttggtgacacttccttcctcgattcagaatgccactaaactgatctatttagatatgagtgattgcaaaaagctagagagttttccaaccgatctcaacttggaatctctcgtggacctcaatctcattggatgcccgaatttgagaaattcccctgcaatcaaacgtatgagatgtatgccttgtgaatttcacccagaatatctcgcttttctcgatgtgagcggctacaagctcgagaagctatgggaaagcatccaggtacattgttaatgctatgctgatttttgctttccttctattatataactaattaagtatacccaaaaatgtttttatggcttgtgatccacggttatgtcttacatacatacataataatgtttaattataattttaaacatacataggtataaaattaacatgattataattgataatgattgaagcataccaatgtttttttcagtcgcttggaagtctcgaagggatggatttgtcagaatctgaaaacctgacagaaattccagatctttcaaaggccaccaagctcgagtctttgaaactcaacaactgcaaaagtttggtgacacttccttctacaattgggaatcttcatagattggtgaggttggaaatgaaagaatgcacagggctggaggttcttccaaccgatgtcaacttgtcatctctcgaaaccctcgatctcagtggttgctcaagtttgagaacttttcctctgatttcaactagaatcgaatgtctctatctaaaaaacaccgccattgaagaagttccctgctgcattgaggatttcacgaggctcactgtactactgatgtattgttgccagaggttgaaaaacatctccccaaacattttcagacttacaagacttaagctcgccgactttacagactgtagaggtgtcatcaaggcgttgagtgatgcaactgtggtagcgacaatggaagatcatgtttcttgtgtaccattatctgaaaacattgagtatacatgtgaacgtttctgggataagttgtattatgatgcatccctccaggtaaattggaacccaattagattagatagggaatattttagcttctgtaattgcttcaaattggaaagagatgcgcgagaactcatcctacgatcatgcttcaagcctgtggccttaccaggtggagaaatccctaagtatttcacgtatcgagcttctggagattccctaactgtcactttacctcagagctctctttctcaagaattcttgcgatttaaggcttgcgtcgtggttgaacctctctccttgggtttttctccatccttgaaggtaaaagttagcttcaatggcacacagtatcagaaatcgttctttgaagatgcacaactgcagttttgtaagacggatcatctgtttttctgttccttcaatatcgaccctggagatcttccatgtaaattgactttcaaagatgtggagtttcagttttgttgctccaataggataaaagaatgcggtgtacgactcttgtatgtctatcaagaaacagagcacaaccaacagactacgagaagcaagaagcggatgcgggtaagccttttgccataattagagctgaaacttgtaaagcaatcttttgacttttgatttgttttctaggatcaaaataccgtagcgacagactatttaatagaatcgatcgtttgatttataatgcagatgacatcggggacatctgaagaagaaatcaacttaccctatggccaaattgtagcggactcaggattggccgctctaaatatggagctttcgttagaggagggagaagcatcatcagtttgttcttatacatctctggagggggaagcttcgtgtgttgattccatgataagtgagcaacaagatgaagaaattccgatcttgaacagactcattagctgtcatcatggtaactgaaacatcgtcttattctttttttttctgttttaggatcaacttgggattgactatgactatagtgataatgccacaagcccatttttttctgcagatgatggagagctctcggagaaccaaaatccgtttaatcatccaactccggagcctgaaagtgtttgtaatttcttctttatctgaatgcagaaacactcttgtgtttcctttgaacattttgcctgcctttttttgaaacatagatctcaacgtgtatgttagcacaggttgtttttctctttattagcaatgaattaaaaaatcagactttgggtaaacaaaaatgtatatcgcaaattcacaagagaattgaaaacaagaatgtgttggaactaattttaaatagtaagatcctcgtcatcaacaatatttgcattgctgattcaatagccaaaaggcaggagcgtttttggcctaacttcggccaaagatgtaaccagcataaggaacaagccttcaggtgaaggaacgagctctgcaggagacattgtctggtccacttccaaaccatgaagtatcatccagctatcctacgtcgatgagaaaacatgtcgctgctgttcccccatgccgctgcactctttaattatatcataaagagttaaagttgtaggcctgaacactagaacatctaggatgggaagctaattctctggggctgttcttgactgaattggtttgcttcagatctttgcatcaagggcctaacatagatgtgtggtccgatggggacgacacctttcactgctga

SEQ ID NO: 160423 - DNA, 581 bp, Arabidopsis thaliana landsberg
atggattggatggaacaagagcaagaacgaggaatcaccattacttcagctgcaaccacaacgttttgggataaacacaggatcaatattattgatacaccgggtcacgtcgatttcactctggaagttgaacgtgctttaagagttctcgatggagctatatgcttgttcgatagtgttgctggtgttgagcctcagtctgagactgtgtggagacaagctgataaatatggtgtgcctaggatttgctttgttaacaagatggacaggcttggagctaactttttcaggactagggacatgattgtgaccaatttgggtgctaagccgctggtgcttcagataccaattggtgctgaagatgtctttaaaggtgttgttgatcttgtgaggatgaaagctatagtttggtcaggagaagagcttggtgcaaagttcagttacgaggatattccagaagatcttgaagatttggctcaagagtatcgggcggcgatgatggaattgattgttgatttggatgatgaggtcatggagaactatttagaaggagttgagcctgacgagccacggtaaagaga

SEQ ID NO: 160424 - DNA, 336 bp, Arabidopsis thaliana landsberg
ctcttccaagcttagagagtcttagagcgagaaaatgatggcttctcttaagtaagtgattgatctctctctttctctctactacgattcttcttcttcttctccattcatcgttttggtttaagctttgtcttaagttttgggtacctgactcgcttcttctcgttattattttgttttccgatgatcctgatctgtttgtgttgtttcggattcatagagctgaagaaacgagccaaatgcagcttcgtgagcgtgaagaaaatgatgaagacgaagatctatttgagatgattgacaaatgtaagatttgaattcgttttcaacttttacgat

SEQ ID NO: 160425 - DNA, 1180 bp, Arabidopsis thaliana landsberg
ctatggcgagaaaagaaggagaagtgacggagacccttctgaaaaagtcgacggagaatcgcggagaagatcgggatgggttagggatgaaggagaaggtttggagggaatctaaaaagctatgggttgtggctgggccggcgatctttacgaggttctccacgtccggactatctttgataagtcaagctttcattggccatcttggctctaccgagttggccgcttactctatcaccttcaccgttctcctccgttttagtaatggtatcttggtgagtttactatagcgatcttggtaatggtatacgtagcttcatttatatcaatttttccaattttatttaatctaatgaatcccttgattactatggattcttctccgcttcagtaatggtatcgtggtggtgagtactacttcaatttttatttaatctaatctcttgattattagtgattaagaaataactatattacaaggtcagaccatgtaggtgaaaattaaaaaaaaaaaacatgtaggtgaatttatgctataactaagttgcatggaaacggaaacagaaacgcggatgcgaaacgtttcagaaacgggaatcaattttttattaaaattagagattagaaacgttttaaaaacatataaatatatatatatatatatatacataaaactatattaaataaaaaatgatttaaacaatataagtctaaactatcaatattaaataagctaactaaaattctaaaagataaaaattaaaaggttcaagttcaaatagttaatttagaccaacattttcattagttttatcaaagataatataaagctcttttcaaatctagtttaacaaaagaaagatcttaaaactcaaagtcttccaaaattatttatatgtaataataattttaatattttcaattttagttattaaatttttaaagtcaataaaaaagatttgtcgtatgtctatttcggaaacgtgagtttctattttggaaacgtaagtttccatcgtgtttccaaacctagatttttaggaaacgcgtttccgtgacgtttttcgtgtttccggagagtttccgtttccgaaacgtttcggaaacgagaaacgcacctcggagcgagtttccatgcaacctagcgcataatcttgcaaaaaaaaacattaatacatag

SEQ ID NO: 160426 - DNA, 140 bp, Arabidopsis thaliana landsberg
tgtgatgctaacaatcaagatgtgatcaaaagtcactaagtcaagccaagcaataacaagttttggtgagttctagcaatcctaagtgaacatgcagaaaacaaaaattcaagcagaaacaataaaacactcgaccaaca

SEQ ID NO: 160427 - DNA, 416 bp, Arabidopsis thaliana landsberg
cttcttgataaaccctagaattgacctatgttaatgttttgagatttgatctttttgcaagttttttggttgtttttgttatgtatattttgattttgatgcctgtgatggtgttaaatatactttgagagatgcgtctctacgaaaaaaaaatcaactctgaggcatttagaatcttctttttttctttggttatgaaatccagtttgaagtttggatgtgaataggtttattttttctagtttttattacaagtttagtgtgtgtgcaagtgatgataaaaagacagggacatcagattctcctttgggagaagtataatgatgattaagtctagatgggaatctctctgatgcaccttttaaattgttaatgatgttttgttttgtgccggtgatgtatatctattgatgtgt

SEQ ID NO: 160428 - DNA, 107 bp, Arabidopsis thaliana landsberg
tttacactttttatatatatatatatctagttatggttcgcaggagcctcccgggctagtctgataactaaggtacttgaggaactaagccccggagctcctgctag

SEQ ID NO: 160429 - DNA, 205 bp, Arabidopsis thaliana landsberg
cgaactgagagctgttgccaacagggcttcctccaaactggctgtctccagcgaatccaccattgctgctaccataagtattggcgctaccataaccactacttccattgtagtcaccaacagcacctgcacttgcacttgaaccctccccataagtgttgccgctagatccaaagccaccgcttgaaccataacctccaccggg

SEQ ID NO: 160430 - DNA, 253 bp, Arabidopsis thaliana landsberg
agtctcttcagatcttcgagtttttgttcatccaagctcggtgattcgttttcttcttcacaaatcagctagatcaagctcagatttcgcgatggtttcccttgaaaagttacgacgtcgcacaaggaatccaagcaagatctcagctgagaagactccagatcgtactcaaccttcaccgattccgccgattccaccaattccgtctccgattcaacaaaattttgctacgagatcatcagtttatccattg

SEQ ID NO: 160431 - DNA, 195 bp, Arabidopsis thaliana landsberg
aggacacacacacaaaaaaaacacagagtgtatgagaatttggcaattaggtcatcgccacttttattgtttatgagaattagggcaatgaggtcatcgccactttattcaatcttctgattaacagtttgtgagtcacttaaagaaccttcttagcagaaggcctggaagtgatgtcagcgacccaagcactga

SEQ ID NO: 160432 - DNA, 575 bp, Arabidopsis thaliana landsberg
aaccggaactcatgaaccgaaaatcaaagtcaggttggttacaaacaattcaattacacagcacaaaatctggattacaaaagagttttcacacgcatatgatctcgtctttattttcaaacagaagcaacgaaaatgtttccccgggaaaaacaagttgaatgaagcagagactgttgtagaatggttcagcggtagagactctccgacctcagattctcagcaatctctgtctcccatcgatctccattctcaagaagcttctctttgtcatagagaagttcctatcatagagaatataacaaaaatttcaataagcatgcctcgaaaattattagggtctagaaaatgtgaaaaacagacctcgtgtgtctcggttgcgaattcaaagttaggtccttcaacgattgcatcaacggggcaagcttcttggcagaaaccacagtagatgcattttgtcatgtcgatatcgtacctgtacgatacagctcaaatcatcatgaaagggtaataaagaaagcagatggttgataaatgagaactaaagggatgatgacctagtggttctgcggctt

SEQ ID NO: 160433 - DNA, 179 bp, Arabidopsis thaliana landsberg
ccgaggaatggatttattgatgacccaaccattagtatggaaaagtagaatcaaataaaataaaatgaaagattcttgtgttgatgttacaaaagaaaagaaaagattcttgtgttgtatgcttcgtcaccattggattagtaataaaatccaaataagagactctgtatattccattc

SEQ ID NO: 160434 - DNA, 409 bp, Arabidopsis thaliana landsberg
aacgtccagggagactaaagaagggacgttacttaatctctccccttttcctaaaaatccatataaaaaggaaaccaaatacaaaaacaaacgacgtttcatcctcaaaactcgtctctatggtttaacaaattaacaataacaaaagacatctagagctcatcgtgagactcatcttcctcctcagtcgatgattctcctcctgcaccaccgggtgctccgcctgatctctggtaaactgctgtgatgattgggttacaaactgcctctacctccttgagcttctcgtcgtactcttctttctctgagttttggttctcgtcgagccactccaaggcctctttcgtcgctgcttctatcttctccttttcatctccttctaatttgtctgctagcttgtccttgtcgc

SEQ ID NO: 160435 - DNA, 395 bp, Arabidopsis thaliana landsberg
gaaactgaaaacgtggggaaaaaaaaggagatttacaagtagaaaacacaaatctaccaaatggtataatttgtttttggtcttgaaggaagaatgcaagcaaaactggacagaatatatatcaactaagaatgtggaaagacacacgaatcacacaaaccaaataatagtgaacgctctttgcattttggcttattcatctagcttttccacttttgtgtttatccaagtgaggaaatgcttgtagaatgttataagcccttagatcttgccttgttaagatccctatcacaggtgacatctgcaacaacacaagacacacgtttagtagtgttcttgaatcttgaatcaagagagtaaaaaagcaaacttacccctgaagcttgaatcttggg

SEQ ID NO: 160436 - DNA, 284 bp, Arabidopsis thaliana landsberg
ttaaataagaaacagcttcaattttggatgaaaaaaatctgataatacataaaaatttgaaatgagtacaaatgagtacaaatgagaaaaaaataaaaatattattcggattcgtactagttaatacgatatcagaattcccatcttcagcatctgaaccatcttcggcttctactactggatcatcaagatcttctggttggccatctacatatgatagtgtctcgacttataatgaatcagcttcaacaatagaatcatcgttatcatgttgcattgcactg

SEQ ID NO: 160437 - DNA, 770 bp, Arabidopsis thaliana landsberg
  unsure (1)..(770): unsure at all n locations
cgatgtctctaacttctactatccccaacacacactgttactcttggtcttcttctctgtcactgtctattctctcttttggacctttcatggctatgtttctctgcaatggaagtccaagctcgtgatcaccaacaccgacacgctaatggctattggagatagagctatgtttactgttttgcttctattcattgcttcgatctctggattctctgttgttcgttgtgttactgatccatctgatggtaaagtattcagctttatgagttttcttcttctctgcttttaacctcattgttttgattgatcatctatgtgatttgagagtgaagggtttttaaaagttgattactttagatttagaagatgaaacccttttgcattaatgtagatttgatgatttttgacaccgtctgttttcctgagaacccgccggaaaataatatttctgctttacttacttttttagctcaaaaaggaaagttgtaaactttatgaaagatttttcttctttcttgatagatcctttgatgtgtttttctgacttgtgagctgttttcttctttctggtattattgcagttcaagcccttcaagttttgtatacttcactaaatagtccttcacagctaaccaattggaaaaatggtggtggtgatccatgtggagagtcatggaaagggattacttgtgagggctctgcagttgtcactatgtaaagaatcaagatntgagtattatttttgttctttccacttgcattgattt

SEQ ID NO: 160438 - DNA, 420 bp, Arabidopsis thaliana landsberg
accaaaagcagagcatttgattacatataacagtttggtaggagagaagaagtccccatatgcttgtggagtcattgtacactaaagatatggggatgagaagctgtcggctggaacattggggtgatcaatccaagtctgcaaaatccataaactaatttctcattccaagtgaaatgcttgttcctacaaaagtgaagcttacaactttgtagagacaagactctccattttctttcctaaggagatttttcagccgtttggagcagagtctattagtggaggacgagagctggtttcaaagctccgatggtttgcagccttacatgagtgtgacagagtctgcaagggcaaaagatgagatcactgagcacaccaaggcaacgtgtagggctcatggattctttgtttgataactac

SEQ ID NO: 160439 - DNA, 494 bp, Arabidopsis thaliana landsberg
aatcaaattcagagtatacaaaccctaatttactaattcaagagcttgtgaatttggtaacagccttggttccttcagaaacagcgtgtttagcgagctcaccaggaagaacgagtctaacagcagtctgaatctcccgagaagtaatcgtcggcttcttgttatacctagcgagctttgaagattccgatgccaatttctcgaagatgtcgttgatgaaagtgttcataatacccatagccttgcttgaaataccaatatctggatgaacttgtttcagaaccttgaagatgtagatcttgtaagtctcgacactcttcttcttcatctttttcttcttgtcgcctccggcaccagcttccttcgggagcttctttccggcctttggtttcttctccgccggagctttctcggcttttgatttctcctccaccggcttctcggaagctggtttcttctcagcgggcttcttctctgctttcggcgccattgat

SEQ ID NO: 160440 - DNA, 404 bp, Arabidopsis thaliana landsberg
ctcagacagagagtgagagatccaatgcagtgctttccacctcacttatggtgcacctccttggtcgttttcttgtcggttaccggaaccctagccgccgatccttacgtcttcttcgattggactgtttcttacctctctgcttctcctctcggcactcgtcaacaggtttcaaaaatcttctacattaatcatctatgtccaatctcaaagtttcaatttttgaaaattcccaatttgaaagtttcgatttttgattgtgtattcgatttctaggtaattgggataaatgggcaatttcctggaccgattctaaacgtaactacgaattggaatgttgttatgaatgtgaagaataatcttgatgagccattgcttcttacatggtaataatgtctattatt

SEQ ID NO: 160441 - DNA, 357 bp, Arabidopsis thaliana landsberg
cctcctctgtacctgcctagatcgagtgaatggatcgagtagaatgctctgatgcttccctcttggttggatagagtagagggtcgagtagaatccttttaagctccttctgcacctgaaaacataccaaaacatgcaatatgtatgcaagatgatcctaaatgcctaagtgtgcaaaataagctaaaatggtgcaaaatgatatgatacaatgagcagatgcaaagctaaatgatgataaacacacacctaaaatgagtaaaatacaatgttatcaactcccagaaacttatctcttgcttgtcctcaagaaaacaacaaatcttaagttgaaggagaggtttgaaggtggggatt

SEQ ID NO: 160442 - DNA, 85 bp, Arabidopsis thaliana landsberg
agagagagagagagagagagagagagagagagagagagagagagagagagagagagagagagagagaggaggtggcttttgcgtt

SEQ ID NO: 160443 - DNA, 450 bp, Arabidopsis thaliana landsberg
ctatgcacagaatggtataatattgaaagttcccaaatctcaaagcatataatatacaaaaacaagtctgaaataacctgaataggcagacaaatacattacacttgccttgttctatggtgatctcactggtttctttctttttaattttgtatctctctcagcaaaagcattgaactagcacagctccacatttcacctggaccataatatcgaacaatgcatgtcttttgtgtccctaactcgttattcatgcctcattcttcccagagtttggatactcacaatcccaccaagaatccaacaagtaaatcatttgaatgtgtgttaatcttttttttttcttttatattttagaactattttttttcctttctaagcttttagttttcatatttaggtgaacttaccggtggtggggggtgtttattcgttgttacttccaagcgg

SEQ ID NO: 160444 - DNA, 364 bp, Arabidopsis thaliana landsberg
attacaatgcctaactttcttcgaattccaaaccctttactaaactaacactttcttttctatcccccttaagaactctaaactcttactcctttttttcttttcttttcattctcattctctttcccgttcattccatacacaatcccaatcccaaatacaagtctccacctagtcctagctaacccaaaaagcatgggctaggcctacatgaaagactgctcttgtcggctcatacctaacacgttatagcaagctcagtcggaaaaaagacctcacaataacacacaaaagatctttggctcgtaataaggttaggcttagagtatgggaaactgctctaaacgtgagagtcagctacttg

SEQ ID NO: 160445 - DNA, 296 bp, Arabidopsis thaliana landsberg
tgattgaagattgagatttttaagtattcgtaatatttttgtaaaatacaaatatgtttctgatcagctattattcgatacgaaatacatgggcgaaagcaggcgtcataattgcgatgctttcgcccagtgaaagactccgacaaatctacaagagttcctccaagtaccttatagcttaagtcactgatttctctctcaagtgtcatttgtaaagtctctgtttattgaatgtgtctcatttccaatcaagattgaccaccaaattgcttctggagatccgtgaaggatacggt

SEQ ID NO: 160446 - DNA, 336 bp, Arabidopsis thaliana landsberg
gactaggttagcttgagagtctctgttgcggtggcacttatatttggttgatgaacttgttgcctagggttaatttattgagcatgtcaatcacctgtaaactgagaaaacgaaactacttaattaccccatcctcgggaattctttgtctgattgaattctttgtttactctactgttgtttactgcatcttgttatctgtcgcttaatttctgcagttctttcttgttactcgacctcatactcgaccacctagttgtctggcaacagactgtgcagtcgagtatctgtatttcattttctgtctgttactcgacctgtcactcgagtagctgt

SEQ ID NO: 160447 - DNA, 432 bp, Arabidopsis thaliana landsberg
cacaaacacacacaccaaaaaaaacacagaccttaaaaaaataaaaatggttgatatggattggaagaggaagatggtatcatcagatttaccaaactcacctaagctttcttcaaagcttcacgtaactattccatcaccgttcaaaatcgtccctgtttcatctccgatctcatgttcagcacctgctctttgctctgcttacgagctttaccttcgtctccctgagctaagaaagctctggtcatctcgtgattttcctcaatggacatcagagccgattctcaaaccagctcttcaagctttggagatcagtttcagattagttttcgccgtttgttctgatactagaccgtacatcaaccaccgtgaatggaaccggaggctagattctctcatcacgaagcagatccagcttgtagcagcgatctg

SEQ ID NO: 160448 - DNA, 1077 bp, Arabidopsis thaliana landsberg
caaagcttaatgacagggagctttacagcaataacattactggggagatacctgaggagcttggcgacttggtggaactagtaagcttggatctttacgcgaacagcataagcggtcccatcccttcgtctcttggcaaactaggaaaactccgcttcttgtatgtactatactctctttcttctcgtgaccgcttcaatatgcagcttcattgtttacagtttcaaagtttggttgtattttttttgataaagaaactattgcgtctaacattcaagacctcaatgaaggtcacggtctagtgtaattgtttcagggagagggttgttacaggcagctttcttttgctacaccacatttagccaagtagaagaatttcgaattctttgataaaaggatacccattgaatatatgatatcacaccacatataaagttcaccctgattgactgtgtgaacagacacctcttactcctctgccacattgtgatcctcagtggaagctagtgaatggttgaatttagttgtatggcattactttgtgcctgagggtgggtcctatcgaaagagaaaccggcgaaactcctatcatcacaaacttcagtgtacatgtgtagcgtgaatgtttcagaagtagctagaggctaagtttacaaattcaataaacaaattcactcatcgccctacaagttctatggaattgaataagattttacatcagctctaatttcttttcttattattttgtagattagtcgtattttgctggatcttaagtcattttaaattcctttagtggttattttcaatgtcagacattctactatatgtggttaggcgtcttaataacaatagcttatcaggggaaattccaatgactttgacttctgtgcagctgcaagctctgtgagtgtaactttgtctctcctgcattattctgttcattttcttaacattctctggacaatcttgagttctgaaaaatggtatcatcctgaaatgcagggatatctcaaacaatcggctcagtggagatattcctgttaatggttcattatcgctcttcactcctatcag

SEQ ID NO: 160449 - DNA, 188 bp, Arabidopsis thaliana landsberg
taataaaaaaacagtccactccatgagcttgttgaactatgcaggattgagtcaagacttgaggtcaatccacatgggagcttctggtggctcgcttatgacctgtgttgatgaatggagagcggagttttatcttcagcccccccccccggtcggaaggaacttgcaggattcttctaatcctaatc

SEQ ID NO: 160450 - DNA, 174 bp, Arabidopsis thaliana landsberg
aaaccacctcatccaataccacagcaaatgatattgctgggcaaatccttctccctgctccaaacgggaccagctccgtatcctgacctcggtaatcgacatacgaattcaaatgtctctctggtctaaactcctccacgtctggtccccatgtcgcagcctctctcccgattg

SEQ ID NO: 160451 - DNA, 356 bp, Arabidopsis thaliana landsberg
cgctaaaatcaataaagacaaacctagtccgcatgataaagagtttccggaggtctctggactgatttctgctggacctgagggggagataacagggggttgttattctaatatacacctacccagggactgtctaaaaagtttcattatgctttttcactcccgatttgctttccttacgttgcatgattttattgctgcaaagctttgctcttagtccaagtgcatgatttcttcatgtctttttcttctttatcacttaaaactaacttgacaaaactaacttccaaggtagataacaaatacttactcttttcatttagggtacttaatgaagaaaagtgcaaaaacaaatg

SEQ ID NO: 160452 - DNA, 308 bp, Arabidopsis thaliana landsberg
gcagaatccttaaacgagatacaagaagccttaggtccgaggattcggttaatgtcgttcctgttgtagagctcgtagtcgtaaccttcagggacatggatcttcttcgatggatctccgtcctggacgatgatcagatggtaaggctgaagaaaaggcctccacatctcgaggaaatcgaggtttctgatagtcggaatcacgatatcgagctcatctttcagcaacggagtcgggttcaccggaagaccaacagtattcgccggctcaaccatggtttcgaaatgagagagatgagatcggatcgc

SEQ ID NO: 160453 - DNA, 234 bp, Arabidopsis thaliana landsberg
  unsure (1)..(234): unsure at all n locations
tgttcagtgacgaagttacagatatatgagtttcgaggaacaattagagagttagagatgattaagcatttcttgaagatttttccatgtttgaaggnnnnnnnnnnnnnnnnnnnnnnnnnnagtcatacactatttaaagaccctacaatttttgaacgtgttgggaaggtgatgaacttctacaatatgttatcgagttgcagtgttcaattactagtgcgcggttcattg

SEQ ID NO: 160454 - DNA, 335 bp, Arabidopsis thaliana landsberg
acgggtccgagtggagatgcttataaaggtcagtgggtgatgaacctgaagcatggacatggcgtcaagagttttgcaaatggagatgcctatgatggtgaatggaggagaggtttgcaagaaggtcaaggaaagtaccaatggagcgatgggagttattacatcggcgaatggaagaatggtacgatctgtggcaaagggagttttgtttggacaaatggaaatagatacgacgggttttgggatgaagggttccccagagggaatgggaccttcaaatgggataatgggagtttctatgttggccattggtctaaggatccagaggaaatgaa

SEQ ID NO: 160455 - DNA, 423 bp, Arabidopsis thaliana landsberg
  unsure (1)..(423): unsure at all n locations
gttaaaggaaacactaaagcttcagcttcaacattgaaatatatatacatgagtaggctaagatgaaaatgtgatgacaagtttgtatcgaataataatacaggcccctcaaagcaagtaaagaagagttaaatcttatctctaccttttccataatgaactttttccctctcctaaactttatnnnnnnnnnnnnnnnnnnnnnnnnnnnnnnnnnnnntaccctacgcccaaattgtctccacgttgacgcttcttcattgatgcagcagatatagagctcccatgtgtgatggaagtcagagagctttctactgaacagttggttgtgatgttgtttttgttgtctattgctactgcaagctctgacaatgatggcatcatcatcatctttgttgcatcgaagtacgggactgatgttcc

SEQ ID NO: 160456 - DNA, 140 bp, Arabidopsis thaliana landsberg
tgtgatgctaacaatcaagatgtgatcagaagtcactaagtcaagccaagcaataacgggttttggtgtgttctagcagccctaagtgaacatgcagaaaacagaaaatcaagcagaaacaataaagcactcgaccaaca

SEQ ID NO: 160457 - DNA, 318 bp, Arabidopsis thaliana landsberg
attttcataattattttgaatcactgataaataaataaaatcagaaattctattttgattcttttatagtatagaccaaattttcaattttaatgatagatctaatgataaaaactattgtataagccggggaagcaggaaaagtgaattaagtgattcccttttttattctatctttgaaagattaagaaatactatatgttcataatatactaatttagttaagttcattttcaaaaacacgataattagcagttcaacgggatcccctcgaatatgacaaagaaagaagagttgggcctcattgagttcttttgt

SEQ ID NO: 160458 - DNA, 140 bp, Arabidopsis thaliana landsberg
tgtgatgctaacaatcaagatgtgatcagaagtcactaagtcaagccaagcaataacaggttttggtgtgttctagcaatcctaagtgaacaagcaggaaacagaaaatcaaacagaaacagttaaacactcgaccaaca

SEQ ID NO: 160459 - DNA, 609 bp, Arabidopsis thaliana landsberg
ttgttgcacttattttcttatgctttgttgaaccttattgatgtgtgttatcgtgatttaacagtttcatctaaaggatccatgttaaaacactaagataagctcagcaatgctgagctgaaatcgcaaagcaacacagtaacgactagagtgtcgattgacaccaacttggtatcgatcgacactgcttaatggttaatgtggcaactttgtttctctaactttttaactcttaataaatttttcttttgatttctgtagcttaataactcttcggacaatgttatctaagtctagggagtctattgctaactttatcttatcttttcttaagagtcagttgcgttatttttaatagagtgtcgttttattgaatcaaaattttgtctgaaattatgatctttctctcgattttattgcatgtattgatgaagtactgcatattcgattcaacccgactaatggaaaatccagagggcaagccaacagaattaaggacatccatctttccaacataatccataaaggctggagctaatgtcactgctcttccttttacctcatcaaaaatgttaattgttcataggatttgactccttgttcatacct

SEQ ID NO: 160460 - DNA, 140 bp, Arabidopsis thaliana landsberg
tgtgatgctaacaatcaagatgtgatcagaagtcactaagtcaagccaagcaataacaggttttggtttattctagcagtcctaagtgaacatgcagaaaacagaaaatcaaacacaaatagtaaaacactcgaccaaca

SEQ ID NO: 160461 - DNA, 940 bp, Arabidopsis thaliana landsberg
atgtatttcatactatgaatcctgggtgggatgaagcatgcttgtatctgtgcaggtcttggtttgctttacaacgttagcagattcttttactttaaaggttatgctactggagatcccatgaagcgtcttactatcgggtttgttcttttatcctcttatcagtgttcattatctttattgattaatttagttatgttagtcaataggatatagattagacttatatataaggttgttgtaagtatagtttcattgattctaatgaatgaaaatattttcgttagctgattttttttggttatggtatcaaagcattgatctaagctcaaccattttccgttttgcgtatcaaatgtttctccctttctttgtctttgatctcgggaaatttctttgtttctgcatcacagcttttctcattccaattctttactcagttctgtatttactacgacttgattccgtctctaaatcgagtttgcgatagataatctttgtaatctatattgttgcagttaagttagtcagagtaatagtaagtgaacattttcttaaaactgagttcttctgttagggtatcagagcgtgaagctaagctcaacaatttcttcgtgtttccgcaaatttttctgtcttcgttcatttcaatatttctacattccggatttacttggacttgatttcaatatttctacattccggatttaagttcatctctgagtcgactttttggttgagaatcttataatctctatgttgcaggaaatacggtttcttgggattgctaggtctgatgatatgtaccatctcgtttggtgtcactctgatccttggttgagccactcgtttctggggttgatgattctctgggtttgctctaagaatatagaaccaatccttgtaagctgtccacaaaacttgtgtaatactttagagt

SEQ ID NO: 160462 - DNA, 205 bp, Arabidopsis thaliana landsberg
ttgttttgtttgtatcatgttgtcgtcgtagaaattaaaaccaaagatggaaacagagtaacagaacaaccaaacaattaaaacagggcataacagataaaacttgacacaaggtcgattgcctacacacaatgagaggcagaagacaaaaaaggcccccgattaagagatagaatctgtgacctccattcccgagtggccatat

SEQ ID NO: 160463 - DNA, 140 bp, Arabidopsis thaliana landsberg
tgtgatgcgaacaatcaagatgtgatcagaagtcactaagtcaagccaagcaataacaggttttggtgtgttctagcagtcctgagtgaacatgcagaaaacagaaaatcaagcagaaagagtaagacactcgaccaaca

SEQ ID NO: 160464 - DNA, 288 bp, Arabidopsis thaliana landsberg
aaggtaaaccttaatccctttctacgtaagaagatcctcgacgacaataaattgtctgagaatgtcttagagatggaggattcgttagagggtggggggcgggtactgcaaaataagcttctgttactccaacccgagaaaaaccagaccaagttaggtcagagccgtgcggtttcttccacaacgaatctattgtcttctcctgagaatcaccataatcaacaatggacagaaccattggagaatggtgtgtcaaacacagagcaagagctatcgacttcatcattg

SEQ ID NO: 160465 - DNA, 391 bp, Arabidopsis thaliana landsberg
agaaattaggaatttggtgacgtgtgatttgaagaagcgcatctcttatttctccatcacttgacgaaagaaaccattcagagtttatggtcgtctctctaatgactaatcggtgactgaaaccaaagtatcggatccgtcgcgaggtatttatctttcctcgtgaatcttatcatgactttttggattgatttgaaagtaaaatctgttgacaatttctttttttttgaactatacatctgtgtacgaatcggatgttattattagaccatctccatccgtaaaaataaggaaaatttctcaaaaaaaaaaatattaatattttaatcaaaacaaatacattaattattatttaatagttgaactaatagtgtgattacacctgtccaaa

SEQ ID NO: 160466 - DNA, 140 bp, Arabidopsis thaliana landsberg
tgtgatgctaacaatcaagatgtgatcagcagtcactaagtcaagccaagcaataacaggttttggtgtgttctagcagttctaagtgaacatgcagaaaaccgaaaatcaagcagaaacagtaaaacactcgaccaaca

SEQ ID NO: 160467 - DNA, 159 bp, Arabidopsis thaliana landsberg
taaatgaatctgctttattgattttgtgggtatacagagtaagttgggaggaggaaatcagcagcaaggtcagagagttagctacaacaagaggacaatcagacgttttagtgttagagctaatgtgaaggaaatagcttttgaccagcactctagagc

SEQ ID NO: 160468 - DNA, 974 bp, Arabidopsis thaliana landsberg
gagagagagagagagagatggtgacgaaggagcaagtcgaagcttcactgacttcgaaactaaagccaattcatctcgtgagttttcttagactgctttcttctttcaatttcatctattgattagggtttgaaacttttgggggaaactttgaaaccctaatcatcaaattgatctgggaaaattgccaaatttgagatttttgacctgctcactttgatcaaaatcagaaactttgatagttggatcataagaggtactatgtattgtaataatctcagcatctagattatacatcactatgtgttgtctttgagctctgaaacagaatataaaaggtggttgtttgcgtaattaggtgtaatatgatgcagtggaaaaactgagctcaggatatgatgacgtagtgttcctgatgtattagcaacttagtagtgagtgttcttgtcggaaaattttatttgtgtcatggttttttgtgaactagaactcaaaaagcggatccaaggatgtgtatagtttctttgctttataacatgtgaagattgaagttacttcaatgtcaatctatttcccttttcacttgattcatgtgttccaattgtttcaatctttagcttttagaattttttagtgacattgtttgtttttgtgtgtaccaggaagtcattgacatatctggagggtaagtaccggattgtcaatacacatttaattctctggcttatggcataatttcttgttcttaatatcagcaaaactgtttattgcagctgtggcgcgagttttgtggttgagattttctcggttcagtttgaggggaagagattgcgggagagggaccgtattgtgaacgctgctcttgaagaagagatgaaagaaatccatgctctctcgataacgaaagctcaaactccgcaacaatggaagccaatatcacaagactctgcaacaactccaaccacagaggcttg

SEQ ID NO: 160469 - DNA, 140 bp, Arabidopsis thaliana landsberg
tgtgatgctaactatcaagatgtgatcagaagtcactaagtcaagccaagcaataacaggttttggttcgttctagcagtcctaagtgaacatgctgaaaacagaaaatcaaacagaaacagtaaaacactcgaccaaca

SEQ ID NO: 160470 - DNA, 258 bp, Arabidopsis thaliana landsberg
tgagattctgaagaaagaaaaggaggagggaacatccaagatggttgctagttgtagtagagctcttttttggctcactaggtaggtatattcacttcttcttttttttgttaaaaacccttcttcttttttcccggcgatatttaccttaattaatgtataattcatcacctaattacagaattctcataattgatatgcatgcacattaggattgtattctaagttctaattcataaactgcacttttcgtaatta

SEQ ID NO: 160471 - DNA, 316 bp, Arabidopsis thaliana landsberg
aagactctctttgatacagatggttgttgttgctgctgctgctccgggttactactctcactcgtgctcgaaagtggcagcgtcaaagacgatgattcaagatccagattattgttgttgttgttgttgaaactgaggctaagattcagcgagattggtttgtaatcttccccaaccggagacaagtttgaggccacttggctgctactactgcccgatgaagcttcaatttcgaggtctaatattggtctcatgatttatggcagaaactttacgttgttttttctttttctgcaatgattttgtattgaaggga

SEQ ID NO: 160472 - DNA, 441 bp, Arabidopsis thaliana landsberg
  unsure (1)..(441): unsure at all n locations
aaaaagctaggaccctcgattgtttcttctcgccgactgaagttttggctaagcatgatgagaagtatatgccacagnaagttgcggcggcgattgagaagnnnnnnnnnnnnnnnnnnnnnnnnnnnnnnnnnnnnnnnnnnnnnnnnnnnnnnnnnnnnnnnncttcttagattggtataaacttcattctttttaagttaatcaaaattttccccaagttcgagcttttggtgagtattgttcatcttataaggttatatttgattatagtttctggaaaagagtaggaagattggaatgttatattcctggaaaacagagatttgatttttgagtctatttgagaattaagtggagaaatgtgatacactatacaatagctttgtttgattccacaaagctataagctaatctactttcttgttgtgttgatcaaat

SEQ ID NO: 160473 - DNA, 73 bp, Arabidopsis thaliana landsberg
atctctctctctctctctctctctctctctctctctctttgtctctctttgtctctctcgatctcctctgctc

SEQ ID NO: 160474 - DNA, 380 bp, Arabidopsis thaliana landsberg
tataaatccaataaccccaaatttatgaagattttagattactttttacaaatcttacaaatcttaaataaataacataaaactttaacatactttaaatcaataaaattgactcatgactacataatcgccacatcttgatcttgcgatgaaacgcgttatttacaaggacttaattacctatcatgaaaattcaaaagaacgtcatcgtggaaataagattttatgtgaagatacaacgtcattatttgagaaaaaagatttttttttttcttttaacaaaacattattctgaaaattttaattgagaataaaaaagaaaatacattttcaacgaaatcattttaggcaggaagagataaaggaaacctaaggttacg

SEQ ID NO: 160475 - DNA, 477 bp, Arabidopsis thaliana landsberg
cacgatcccttgagaataggattcatggagagagtggttactccttcacgtcgtccactcctagatttgtggttgaataaatttgatttgttgaaaaacaaatttaaaccttgtaatctaatctctatataaacatacgcttcaagtctttgatagacacagtgaagtctttgatcgttacacacaaatagcaatagcaaaagctccaacaatctctctatgttaaaagtaagtctcgagagtatcgtagtaactatgttcgttagagctgagtttcgaatgatgcgaaatcagtaaatagaggttgtatcctgggatctttgaatcacacagaaatcatcacactacgagtgattcaaagggttaaggaaagagttcattaactcgactcctcccatgttttttccttaatgtttgtagtttcaatttcaattacctttatgtagtgtttgcgaattttagctccgacaagaatca

SEQ ID NO: 160476 - DNA, 326 bp, Arabidopsis thaliana landsberg
cactcctgaagaagaagaaagaagaaataaactaaaaaaattcctcctttttctggtcattgcttgtctaatgccaattcctgaattgggttctcttcatgggtgattcttctcttattccatcgccatgggagctcagaagagtatccacgctggtagaggtcatcactcttatcttagattctcgattttttttgaattttgtgttggttgttggatcaaatattaaattgtgatacttggtgctggaaaaatgggtaacaatttcttggaaattttaatttgtgggattttaaacctttaaaccaaatgggaggggctttttg

SEQ ID NO: 160477 - DNA, 512 bp, Arabidopsis thaliana landsberg
ctttattaataatcttcacataagagtgtcaaagtaatggcatcatgtgatgcatggaaccaacgtgaggatctatcgcatgagtactcagctttgttcaccaaattctccaccacgttattctttcgtcacgggcggtactatttcttcaactcttattcttgtgcattcaccgtcaacttttaatgttttgaattattcgttttatcaacctcttgtgaaatttaggtacgagatgaagttcttagtgcatggagaatggcagatctcacccgagtttcctacttcaggagaaggattgatggagatcaatgttttagtggtggaatagccgctcatctttctgcattacacatttaggtaatacatccgtgaacatattgagattggtgtggtccagattgtagactacagaatctgagctattagatacaagcaatagtataataggtgccagcagtcatttgaatttcttatattttgttcacgcaaaagccaatcaatttttccca

SEQ ID NO: 160478 - DNA, 124 bp, Arabidopsis thaliana landsberg
tggtttctttaaagaactcagctttgaagttaaatccaaaaacaatggttgcatttgaagtacattaatggtctttgaacaccaaaaagaacattacaaaaaacgaatacgaaaagcagcaaac

SEQ ID NO: 160479 - DNA, 480 bp, Arabidopsis thaliana landsberg
aagacgaagacaaacctggtgtttatggttcatgtaatgtggttattctgttaccaattgctttttaagttttctgaatgttttatggtttctttttatactttgttcatataactgtaactcttgtcccttaagcttttttctttttggtttcgctatggaaaaagtttggaaactgtagtgttggaattaaggattgttttgttttgatgatgaggtcttttaagaacatttgtctatatattttggtgtgttataagtcgaggttggaaagcttcaaaattgcgtctcgagtcatgggatgatcttcagaagctgtgctatgttattttgaaagagaagaacatgttgatgactcagcgtcagatgcttcaagcccaaaacatgcagtttcggaatcctttcatcaaaagcacatggctgtgtctaatcccattttaaggtgagaatatcagtgtgccgtttaaagcatgtctcgac

SEQ ID NO: 160480 - DNA, 140 bp, Arabidopsis thaliana landsberg
ggtgatgctagcaatcaatatgtgatcagaagtctctaagtcaagccaagcaataacaggttttggtgtgttctatcagttctaagtgaacatgcagaaaacagaaaatcaaacagaaacaataaaacactcgaccaaca

SEQ ID NO: 160481 - DNA, 269 bp, Arabidopsis thaliana landsberg
gactccggcggagatgaagagtgtgttgcgtattgcggcggcgatattctggctttggctgtttatcgtgttaggtgtgattgggagtgggaatgtgagagatacagacgatgagatctcgttactcgaaagtcaattggtggtgacatctccgtcgcagcttcttatggtgcctctccctttgattcaggctgatgcctcccaaggagcccgttggtactctctttctctctctaaaagcttgcaaactgattccacagaagatgttg

SEQ ID NO: 160482 - DNA, 241 bp, Arabidopsis thaliana landsberg
aagcaaaagttcaaatttgatttactctgtgtgatatttgaatgtttttcagattttggtggtcagtgtctgatggagtgtaatgcaaagccaccgtttcaatgggaattggaaaacttgatatcttttggcacttctacagctgaagttcctagaaagctaaagccaatggagtgggaaattgatggatttgattgcacctctctgtattcttcaagctttgatgcagtagcttatggtg

SEQ ID NO: 160483 - DNA, 101 bp, Arabidopsis thaliana landsberg
  unsure (1)..(101): unsure at all n locations
ataaaatcagaaaaataaacctctttcaaataggaataagaanaaacataggaattaatcattttgatttcctagttgatgtattgatcatatagttgagt

SEQ ID NO: 160484 - DNA, 116 bp, Arabidopsis thaliana landsberg
gggggggggggggggggggggggggggggggggggagggggggggggggggaggggggaggggggggggggggggggggggggggggggggggggggggggggggggggggggcgg

SEQ ID NO: 160485 - DNA, 197 bp, Arabidopsis thaliana landsberg
tcattgaaggatgttgaagattgaagatgaatgaagtttaggtggaatctttgattttttaaatcttctttgtagcttcatataaaaaaagagttggattatgtaaagtcttatgtgtaatcaaatgtttaactttttcctttattcaacaaaggattcgtatccataacattttagagagagagaaaaaaaaaaaa

SEQ ID NO: 160486 - DNA, 259 bp, Arabidopsis thaliana landsberg
cttaaatgttcttccgcctttgacgccttaatctcatctccacaacccttgcagtcaagttggtaagtctcttaaaaatgactttcttttgtttaaactttaaatggcactgagtttttgtggtatcactaaaatcaaacgattcatgatgaaaaacttgacttggttcaatatttattataatcaatgactactttatgtaaaagagtttaggcctttgagcaatgattttcaaagagaagaaaataaagttggacat

SEQ ID NO: 160487 - DNA, 203 bp, Arabidopsis thaliana landsberg
aatctcgtgttaatttacttgttcttacaaaaaatattaaaacgaaaaacaaatgcaacaacttgcataaataatattccttcttgacaaaaaaaaatcaagttttgccttgtaaaggtgtagtaagcacctaatacggtaacctttattggattagacgcgcaagtgtgttctttttagcttcgcatcaaaacaaaatctgt

SEQ ID NO: 160488 - DNA, 98 bp, Arabidopsis thaliana landsberg
aaaaatggaaaacaaacaaaaagaggaaagtcaaatccacgattaagaagagtgactttgcacgcggattctagatgaggtcgtagagcaagagcgtt

SEQ ID NO: 160489 - DNA, 150 bp, Arabidopsis thaliana landsberg
ataaagttaccacaacacacaaatcttacccggactagagacactcactccaaatgtccaagtttgctaggttttgagtcttgggaatgaagagaatcaagaaagtaggagagaaacccttaaaagggtaaatgacctaatctcaaagtg

SEQ ID NO: 160490 - DNA, 370 bp, Arabidopsis thaliana landsberg
atagaataggtcaggcctgttgaaatccccaatagtacgacgtggttccgcaactggaggaataactgcaggaatctggtgttggtgtcgatcgatacctctgttgtgtcgttcgacaccatctgcatcgtcattctgctcccgatggtgtcgatcgacacctctgttgtgtcgatcgacagcgagccctgctgcgtctctggcagctatttgcgcgttgaggcgcgcctgattctcatcgacatcctcaggtaggatgagtccatgatcatccaatctctgaccagcctcattgtaggcttgcccatcctcatctctcaaaactccttctgcatcagctttgatgactctgtcagccattgctaatttt

SEQ ID NO: 160491 - DNA, 375 bp, Arabidopsis thaliana landsberg
ttcaaactctgttcttgacataaacaaacaaaacagaacatttcagaatcatcaggaccaagacgatacatggacacaggggaaacacttgaagctactaaaccggataatcgatatcaaatcaatacaagtcagaatcaaaaccggtaagtgaagcaattaagcataaggagggataaaccaaattgaagtcgattatcaaaatatataccgatcaattttaccatgaattctcgggaaggtaatcacgataacatataaggaaatcgaattaaagagtaagaagccgatatgaaatcggaaaaataaaataaaaacactcaccggcgaatcgcagaacggtaagatccctaatccgttggctgtttcttctct

SEQ ID NO: 160492 - DNA, 370 bp, Arabidopsis thaliana landsberg
  unsure (1)..(370): unsure at all n locations
ccatcttggaaatggtgaaaacgtttccggtctcgtaccgttatttttctcttgtaaactttggagatgagtttgatggacgaatgacaatcctcacagatacgtaggttcttaacaatgcgtattggtttgccagggctcgtgcttatcaaccnnnnnnnnnnnnnnnnnnnnnnnnnnnnnnnnnnnngtacattttctttatcttcttcctccaagtttaacaaaacctgtgtggtgattggtctatacccagctagtctcagtttgtctgagatttctacgagcattgagttgatttctttggcttttgggtgtgaatcatcttccacaacaaactcatgaagcacgccatcaatgtcgatccaac

SEQ ID NO: 160493 - DNA, 82 bp, Arabidopsis thaliana landsberg
ttcgcgcttgtctccttctcctcctcctccttccgccgaagaagttaccaagaaatatggccttgaagttggtctatggaag

SEQ ID NO: 160494 - DNA, 325 bp, Arabidopsis thaliana landsberg
acgcaaaacacatcttaacttttagatatatgaataggcatacacgtgtattgtcaaaccgttccaaaaccaaccacaacagtcaccaaatcgaattccaaaacgatttacaactatagaaagaagcagagacatttttgctatatcatatgtgatcatttttacataatgatcatttttacataatgatatagacatatttttcccatctcagccgcagcaccctcctccttgcgaggttgatccatctcttccacctgatggtcctggaattcctccatatccaactttgattccatatgactcatttgacacatcaaacaca

SEQ ID NO: 160495 - DNA, 414 bp, Arabidopsis thaliana landsberg
agctttaaaggataaatccaactgaaacgagagtaatgatcaataaacactgcataatagcgaaagccttgtacagaggttattggagagggtccccacaagtcacagtgaaccctctcaagaggtctactggcagtaaaagaagaagaaataaatggcagtctagtactcttcccgagttgacatgcttcacaaagagacttagtagtcttattgatagatatagagtgattctgcaccagttgctgaaggatctgaggatgtggatgcccaagacgtctgtgccacacttcatcactagctgagcgttgacgagtggagaagaaggcctggaactgcttgtcatccttcagacaatacaaaccatcacgattgcttcccattaagagaagcttcttggttgccttatcattc

SEQ ID NO: 160496 - DNA, 131 bp, Arabidopsis thaliana landsberg; identical to SEQ ID NO: 75976
  unsure (1)..(131): unsure at all n locations

SEQ ID NO: 160497 - DNA, 140 bp, Arabidopsis thaliana landsberg
tgtgatgctaacaatcaagatgtgatcagaagtcactaagtcaagccaagcaataacaggttttggtgcgttctagcagtcctaagtgaacatgcagaaaacagaaaatcaagcagaaacaaataaacactcgaccaaca

SEQ ID NO: 160498 - DNA, 85 bp, Arabidopsis thaliana landsberg
aagttgaatgtctttttcaacaaataatttgcaaagtaggtagtttttttagaaataagagaaataaacaattttctctttcctc

SEQ ID NO: 160499 - DNA, 109 bp, Arabidopsis thaliana landsberg
tagggttcctcgagccgattccggacgactttcttttggcttttcacgcgttgtcggctcggaagtgcgattggctgaagcatttttctctggagcgaattgaacgtgc

SEQ ID NO: 160500 - DNA, 257 bp, Arabidopsis thaliana landsberg
agcaagtaaaccatcctcttgacaaatttaaagaaaaataatcctcaaaagtaaagaacagcagaatccaaagtcagagagagggagagagagatagagagagatgggaatgttttacagcataaatgttttcatatgatgataagactccattgttaggcttagcatttcacctgcaagatggcattaatagggtccgccgtaaaacttacgggacataaagaagttgaaatcgctgtgggagaagccgcgtattc

SEQ ID NO: 160501 - DNA, 106 bp, Arabidopsis thaliana landsberg
gaggaaagagaatagtgtctatttctcctatttttaaaaaaactatctactttgcaaattatttgtagaaaaagtgtctactttccaacttattattttgcatacc

SEQ ID NO: 160502 - DNA, 119 bp, Arabidopsis thaliana landsberg
gggggggaggagggggggggggggggggggggggggggggggggggggggggggggaggaggggggggggggggggggggggggggaggggggggggggggggaggggggggggggggg

SEQ ID NO: 160503 - DNA, 491 bp, Arabidopsis thaliana landsberg
cattcataagggcaactctagggttcagcaggtggctaacaggtgacaggtagataccctacacgatagattcaaaaaccgagtctaatccgctatcgtgatagagatccccataactctgccacttccaaatctccaccgtcgttgttgaaacatagcagagaagggtttaagcatcaatctaccaaagccaataagcagacaagcttatgtctttatcaagtctacaaatctctggaattcgtagatcagacatccatttgaacgtcttttggatgttggacgtctatgatcgaatctccacattagccagggaaaaccgcataggggtcaagcaaatccagaagggatctaacctaatcttaaccacttgactaacctagagattaccctaatctaatctatcctcaagaaccctaatcactactcaagcaacattctcaagaacacaaacccagaaattactgaaatcatatcaaaatgtagatcta

SEQ ID NO: 160504 - DNA, 198 bp, Arabidopsis thaliana landsberg
tttttttcatctttcaagattatactatagcctatatcactgaggtagtagaaggtgaagatgttacattgcagtttgtagtattaaacaaagtctaattcctccgtaacgcctaaatatatggaggtgcgtctactaagaacatgacttgagtaacttttcctactggattctctgttatctctgtggacgtttatc

SEQ ID NO: 160505 - DNA, 404 bp, Arabidopsis thaliana landsberg
tccactgattatcccgagagagttttatttttctttccgagaaaattcgagaaaaataatctgggacaaaaaccatcgctcatttcttatagagagagtctcttcagcttctcttctctttcactgaagtttttgtatttatgatatcggtgtttcattgtttctcgtgcttattcagtttttctccgatccgttttttatgggattgttaatgattcattcccgtgagtgagtgtgtgtgtgcatggatttaataactttctccgattcatcttttgcaggaaaacttaaggaaaaagcttttgctctgtttttgtccagatttgtctgttgttgttagctaaacaataaaatcttgaggccaacatttgaagatattttcaagaaaatgggagtgaaagtag

SEQ ID NO: 160506 - DNA, 343 bp, Arabidopsis thaliana landsberg
  unsure (1)..(343): unsure at all n locations
attagagtaaacaagagattcaagaaaaatgatttttgagagtaaacttgacaattacaagagattttttagtaatataataagtttagggttttcgaaaatagaattacggattttttgtttggtcatcgagcttcctatttttcggatgggaatatgtttaatattctttaccgtattatttcttaagatttgagttaatctttccttatcttcatggaggtcgatgccgagctcatcgactnttagttcttgggctgatttcataatttagtcatatcattttggtgtattcttggtttaaatcgagttaatccgtgggtgctaaaccactctccaacat

SEQ ID NO: 160507 - DNA, 357 bp, Arabidopsis thaliana landsberg
cctcctctatggctgcctggatcgagtgaatggatcgagtagaatgctctactgcttccctcctggttggatagagtagagggtcgagtaaagtccttttaagctccttctgcacctgaaaacacaccaaaacatgcaatgtgtatgcaagatgatcctaaatggctaagtgtgcaaaataagctaaaatggtgcaaaatgatatgatacaatgagcaaatgcaaagctaaatgatgataaatacatacctaaaatgagtaaaatacagtgttatcaactcccccaaacttatctcttgcttgccgtcaagctaacaaaaagacttaggttgaaggagaggttggaaggtggggatt

SEQ ID NO: 160508 - DNA, 414 bp, Arabidopsis thaliana landsberg
gatgcggaggagctcactggggcccacgtttagacccacggctatgatcagtttacatatggcgaacgtcaggagaagaaagcttgacgtcatttcacgattcatcaaagaatactcaagaaacaagaatcaagattgaggaggaagaatatatagaagaaaaaagatacgataataatattttttagataatgaaagattttatggggaaatgaaaaaacatatatagaagatccttgggggttcgtgagagctaacgtaagcccagattacgctttgaagattttctgagcaacatgcacagattctctcttttttcggtttgggtgaaactttaatatattataacgagtgtttttaaaaaaattatattcgtacaaatttaacgagtttgtgcgtttatatgtgtgtgtc

SEQ ID NO: 160509 - DNA, 364 bp, Arabidopsis thaliana landsberg
atcacaatgcctaactttctttgaattccaaaccctttactagactaacacttttttgtattccccttaagaactctaaactattactctctttttttttcttttttttttcattcccattatatttcccattaattccatacacaatcccaatcccaaatacaagtctccacctagtcctacctaacccaaaaacgtgggtaggtctacatgaaagattactcttgtcggctcatacctaacacgttataccaagctcaatcggaaaaagacctcacaatcacacacaaattatctttcgcttgaaataaggttaggcgcagagtatgggaaacaactctaataagtgagagtcagctacttg

SEQ ID NO: 160510 - DNA, 345 bp, Arabidopsis thaliana landsberg
gactaggttaacttgagggtctctgttgtggtggcacttagatttggttaatgaacttgttatctagggataatttattgagcatgtcaatcacctgtaaactgagaaaatgaaacttttcaattacccccatcctcgggaattctttatctgattgattttattgtttactctactatcgtttactacatcttgttacctattgcttagtttttgcatttctctgctgttactcgaccacccagttgcctggcaacagactgtgcagtcgagtatccctgttatattttctgtctcttactcgacctgtcactcgaccacacccagtgctctacaacgagctgt

SEQ ID NO: 160511 - DNA, 383 bp, Arabidopsis thaliana landsberg
gagaatacgagcccttggtttctttaagattgtgatttattttgtaatttaaatatttgttttgacataaatttgagattcagttctctaagaaatttcttcttcttcaacaatgacggcttgatttgatttttgctctctcttatgtgtcaaacttgtttaatctatgtagcatggagattccgtttaatcgaatttcttgttattatggacatggtagacaaaatggatatagatcagtaaaaaggtttccgaatggatatacttaaatggactcgttcttatggaccccaccccattgtttgttgatttttctttcagtttgcaaatacctccaccttcaagaccttatggacatggaactttggtttctatacgaacac

SEQ ID NO: 160512 - DNA, 280 bp, Arabidopsis thaliana landsberg
aaaaaaaagaagtgtatgtgtatattttccagtttccacactagtacaagcgcttttgacacctaaagagattgctttgtaagaaggcaactggatctccattctaatagtacaagataatgaagcaacataggctcccaagaaagtaaatagctttagacaatcacgcacacatgtaactcaagaccaagtttgtacttacctatgcttgtgtgagattgtcgaatcaacaaacatcatagttcgtctctagacctcactggaggagccactccttacg

SEQ ID NO: 160513 - DNA, 185 bp, Arabidopsis thaliana landsberg
ctttttgtttttgtttaagttagtgatttttttaatgttttggggcttaagaatgcaaaaaaaattgtctgtgtaattaacatttaagatgctaatgttattgcttcacaagtttttagtcaacctcagatacatcgatgtcactatctaaatagacctctggaacttcatcatctggattctct

SEQ ID NO: 160514 - DNA, 91 bp, Arabidopsis thaliana landsberg
tgcaaggacagatcaacaaaagatggtatgatgatggtggcttcactgtcccacagatcactcctcctcctctttcttctaataaagagtt

SEQ ID NO: 160515 - DNA, 291 bp, Arabidopsis thaliana landsberg
cctcccctgtagctgccttgatcgagtaaactggtcgagtagattgctctgctgcttccgtcctggtttgatagagttgagggtcgagtagattccttgtaagctccttttgcacctgaaaacacaccaaaacatgcaatatgtatgcaagatgatcctaaatgcctaagtgtgcaaaataagctacatgtgatgcaaaatgatatgaaaaaatgagtgatcactaagctaaatgatgataaatacatgcctaaaatgagtaaaatacagtgttatcattgttcgacacac

SEQ ID NO: 160516 - DNA, 103 bp, Arabidopsis thaliana landsberg
aaagaaaacaacaacttaggaattgacacacttatatattatattttttttgtgtatgtaggagattgctctcatggtctgtaatgtaatttcgtttttttca

SEQ ID NO: 160517 - DNA, 140 bp, Arabidopsis thaliana landsberg
tgtgatgctaagaatcaagatgtgatcagaagtcactaagtcaagccaagcaataacaggttttggtgcgttctagcagtcctaagtgaacatgcagaaaacagaaaatcaagctgaaacaataaaacactcgaccaaca

SEQ ID NO: 160518 - DNA, 429 bp, Arabidopsis thaliana landsberg
cattactagagaccctaatcataacgttacagtcttacgagctgatgtccccaacatcccagtctcctcatcatcatttagctccagttctgtttcaatcccacacttaaagaccaatgcacctaacaagtcagacactgttacatggaaactcattgcaaccaaggactttggtgctgctgaacttgttagctgccaagttatagatatataaagtcatcagaagctttgcccatttctcgtgggccattaagaatctctgtgtacagccagaagcaaaaacatgaagcttatgagatgttcttccaaagattttatcgtctaattcttcgatgatatattcttctggcatttggctgccaaagtaagcttgagtaataaaatgttgtgtgacaaatatataataatgcgactgttgtatcgaaattt

SEQ ID NO: 160519 - DNA, 274 bp, Arabidopsis thaliana landsberg; identical to SEQ ID NO: 37775

SEQ ID NO: 160520 - DNA, 426 bp, Arabidopsis thaliana landsberg
cttatacctattttctcccaaaagaggctaaaaccaacaaaaaattgcttagagcaagtcaatagctttgttagtgtttttatggtcaaatatttgtcacaatccaatgcatttaactgattaatagagttagagatgtattaggagtgtttaaacaaccatttggttaaaagaagtaaatagctttgttagtgtttctatggtcaaaatgtttcacaatccaatgcatatgactaattataagagttaaagatatattaggagtgtttagacaacacttatacctattttctcccaaaagaggctaaacccaacaaaaatttgcttaaaagcagtaaatagctttgttactgtttctatggtgaaaatgtttcacaatacaatgcatatgactaattttaagagttaaggatggattaggaatgt

SEQ ID NO: 160521 - DNA, 118 bp, Arabidopsis thaliana landsberg
tcaaaacagttaaatgttactcatcagtgtccatattgcatttgctcaggggaataataagtaagaagcttcttgaacagaggaacaatcgcaaccatagcaagttggagctgctcgg

SEQ ID NO: 160522 - DNA, 363 bp, Arabidopsis thaliana landsberg
atcataatgcctaacttctttaaattccaaaccctttactagactaacactttattttgtatccccctttaagaactttaaactcttattctcttttttttttttttttcattctcattctccttcccattcaatccatacacaatcccaatcccaaatacaagtctccacctagtcctagctaacccaaaaagcgtgggctaggtctacatgaaagactactcttgccgggtcatacctaacacgttataccaagatcactctggaaaagaactcacaatcacacacaaatgatctttggcttgaaataaggttaagttcagggtaagggaaactgctctaaagatgagagccagctacttg

SEQ ID NO: 160523 - DNA, 140 bp, Arabidopsis thaliana landsberg
tgtgatgctaacaatcaagatgtgatcagaagtcactaagtcaagccaagcaataacaggttgtggtgtgttctagcagttctaagtgaacatgcagaaaacagaaattcaagtagaaacagaaaaacactcgaccaaca

SEQ ID NO: 160524 - DNA, 148 bp, Arabidopsis thaliana landsberg
ctacaatatataaagttgacttttttgcttagttgccaagcaagttagtcaacttccggtaaagtggaaattctcccagtcttcgttaatttgtttgaattatctacggaattgtcttcatctaccatttaatattgtaaacactgtt

SEQ ID NO: 160525 - DNA, 112 bp, Arabidopsis thaliana landsberg
gttgttgggtaattagatgcacgcagagcttcaactgctgtctccactcgtgccggttagacaagtgtcgttcttgcggttctgtaaacagcacgcggaaggtgtttgggca

SEQ ID NO: 160526 - DNA, 109 bp, Arabidopsis thaliana landsberg
gaaaagaagggaaaacatgcacaatggtggtgagaacaccacattgggtgatcccacattattgggtttggggtctaccattcttcttgttctactcaactagagcttc

SEQ ID NO: 160527 - DNA, 360 bp, Arabidopsis thaliana landsberg
atcacaatgcctaacttctttgcattccaaaccctttactagactgacactttttgtatcccccttgagaactctaaactcttactctcttttttttctttttttttcactctcattctctttcccattcattccatgcacaatcccaatcccaaatacaagtctccacctagtcctagctaacccaaaaagcgtggggtaggtctacatgaaagactgcacttgtcggctcatacctatcatgttataccaagctcaatcgaaaaagacctcacaatcacacacaaatgacctttggcttgaaataaggttaggctcagggtatgggaaactgctttattagtgagagtcagctacttg

SEQ ID NO: 160528 - DNA, 196 bp, Arabidopsis thaliana landsberg
cttcttatgctgtgctcgccggaaaccgaagacggcgacggtagaggttgaagatgattctataaggagaattgttcggtatcttctatggactagtgaagctgtgtatatactatggctctttcttctcccttacgctcctgtgagtgataataccttcaaaaattcgtattcatagttcctgagattgagacat

SEQ ID NO: 160529 - DNA, 258 bp, Arabidopsis thaliana landsberg
cacaaagctagttttattattatcacaaaccatgatcagatacataagtccgagtgaattacgggacgacaaagccgggaagatataatcttccggaatacaagccggcgaggaatgaaacccccaaacactaagcccctacatggggaaacgacggaaaaagagaaaataaaacatgagtgatgattttacacataaacatagttctctctttaaccaaataaaccaagatcgtaaaattaacaggcgtcagagatt

SEQ ID NO: 160530 - DNA, 264 bp, Arabidopsis thaliana landsberg
actgtacacaccaatatattattttgatgtaggagctctaaacacaaatccagttcatatgtacaaacaatcctctatggtctctactcatctcaattcaaaaccaaaaaaaaacaaacaaacagaaaatgcataagaacaagttcaaagaatagctcataatcatgaaacgcgttgaaagcttacgcagattgataaattattgtctcttgctctgtgatcttgaaactggagtactcatgtcagtgtctgagtaaatctcca

SEQ ID NO: 160531 - DNA, 140 bp, Arabidopsis thaliana landsberg
tgtgatgctaacaatcaagatgtcatcagaagtcacaaagtcaagccaagcaataacaggttttggtgtgttttagcagttctaagtgaacatgcagaaaacagaaaatcaaacagaaacagtaaaacactcgaccaaca

SEQ ID NO: 160532 - DNA, 95 bp, Arabidopsis thaliana landsberg
taaaataatatcatatatttataatcatctttacaataaaagtttttagtttaactaaaatataagcctacctgcggtatactgcaagttgaaat

SEQ ID NO: 160533 - DNA, 91 bp, Arabidopsis thaliana landsberg
ccaagtatttctttttttttggcaccggtgtctcctcagacatttcaatgtctgttggtgccaagagggaaaagggctattaagctatata

SEQ ID NO: 160534 - DNA, 362 bp, Arabidopsis thaliana landsberg
aaaaaaaaaaaaaaaaaacaaaagcttcctttctgagttttcgtcgattgattggtttaaatcctgtcatatcaatttgttctcgattctccgcgaccatgcaaatttagggacttcattttgtttgatgggcgcgaatatctcgggaggctcaccggtgatggaccggatcgatgacgcgtacttgtggaaactaaggttggaggatgcacctgataatggtgtagcgtggattatgacacggctggatccacctgagatttgccggcttgctcgtctcagcaggatggtcacgggggcttgctgagctgagtgcagctgggaatcaaagttgcctgcaaatgatcgcgtgattgcacaca

SEQ ID NO: 160535 - DNA, 174 bp, Arabidopsis thaliana landsberg
ccacttcaacttcctcatctttacatttagagaatttagaaacgagttctttaatagtacaacaaaactaattctccaagcttatattacaaaagatgtttaagtgtacaaaccaaaacccgccttgagtttctttctttatgtctcccaaaggaacaggaaacttactctgag

SEQ ID NO: 160536 - DNA, 132 bp, Arabidopsis thaliana landsberg
taagcgcgtggttacattgcaaaacactagagataaccctagaaagatctctctcgatctctgggtcgaaaaaaatccaccatttccgattgttctttctctttgacaaaaccagatagataaaattcgttc

SEQ ID NO: 160537 - DNA, 182 bp, Arabidopsis thaliana landsberg
tctactgggaactacgaaactatgccttcgtgcgatggcgattcctgcacaccgtcagagcatcttcgtcaccagaagtccatgatgaaatcccagcgaaacgcgcttctcattgcggctgcacttgtgttctactggatcctttactcagtcaccaatttggttgtcaagatcgagcatct

SEQ ID NO: 160538 - DNA, 511 bp, Arabidopsis thaliana landsberg
agagagaaaagagaagacagagtcaattcaatttctgaaaaaaagttcaaatttttctaataaattttgatttcccattactcagaaagatcttctttctcgtgcccggagctcaatttttcaaatttcattgaaaaatcgaagctttcctggaaactttttgcattctctgttacatcgtcttcacctaattttccattgatgggtatctcaaaagacaggatcaaattcaacgttggtggacgactcttcgaaacgacggcgacgacgttagcaaacgcaggtcgtgattctttcttcggagcattgttcgacgacgaatggaatctttcaccacttgaagattccattcttttcgtagacagaaactcagattgcttcgcagttcttcttgatcttctccgtacgggagaccttaacgttccggccaacatccctgagcgtctccttcatagagaagcttctttctacggtttacttgaccatgtacggaccgctaaatggggtccgt

SEQ ID NO: 160539 - DNA, 102 bp, Arabidopsis thaliana landsberg
tgaagtaaagagagagtgagggagacggagagagcaagagagagagagagagagagagagagagagagagagagagttgaaaacacaagctctgtctccggt

SEQ ID NO: 160540 - DNA, 136 bp, Arabidopsis thaliana landsberg
tttctcacgttagtaagcgtgaggagttagttatgtgcaatattttgttcgtgtgagaagtttaaagaaaacgttttggcaagatcagatgaataacatgtcgttttggcctatatggcgggacgggtgttacatt

SEQ ID NO: 160541 - DNA, 340 bp, Arabidopsis thaliana landsberg
  unsure (1)..(340): unsure at all n locations
tttatacattatatgtaacggtactgggaccaataccattacactcgagtctatgaagcaacaaacatgcaacaagctcgcttatagcttcacaacacttacacttgaccatagaattgttagtctcttgcacacaaattaaatgaatcaaatagatccatagctataggatctacgcaatttactcgagtttgcggggaagctaatcttnnnnnnnnnnnnnnnnnnnnnnnnnnntctttttctcttttacttctggttgctgctccgccattgccttaagctnttnctcaaaatgtctttctcaagaccgtacattctgttcaaagcatgcatattc

SEQ ID NO: 160542 - DNA, 122 bp, Arabidopsis thaliana landsberg
ttccaatcagtagttctcagaagacttaccgatggtgggaatggtggtgacaatctcaccaagcttgagcttgtacaaaatggtggtcttaccagcagcatcaagacccaccataaggattc

SEQ ID NO: 160543 - DNA, 321 bp, Arabidopsis thaliana landsberg
tgaaagaatgaaacagttcaagtagtggaattggtgatccgtttcccgtcacgtccgaaggagtttgggcgagtttttaacggttctgaatagatcccgttcccacgttttcagaacagttttcggattcaaaatcggaggtaagatcgatcgggaaatcgcgtttaaattggtgattaatcacagttttcagagccatatttttctaagtatctgaaactttgcagtttcaggtagaggctttaaagatctatttcccgtcgaatctgaaggaatcagatcgtgaatttggtgtctatggaaagatcttgcttcaagaaa

SEQ ID NO: 160544 - DNA, 153 bp, Arabidopsis thaliana landsberg
gatcacgtggtgcatctccaccaccaatgttggcagggccattttgttgattctgttcgtcagccatttcgagtggttgcctaggtacaaagttaactgtatttctcctttctctgagttcgcgagctatgcggtcgatgttatcgttgaaaa

SEQ ID NO: 160545 - DNA, 419 bp, Arabidopsis thaliana landsberg
gttgtttatggctaagtggtattaccggttctatcgcctataactggtcccaacctgccatgaaaaccagtgtcaagatcatccacgccaggtgaatcttctaatcaaaaggattgattgattataaatggttgaatgatttttttgtaaagtttttgagtctcatttgcattttgaaacattttctgtagccatgaacatttatagttgagcaacatcatcatctccatgtcccaaaagcatgtacatttctctgttcttgcctgtaagctatagttgttatcgacataaattttatgttcttagccaaatcatttgttcgagacatccagtcacatggtactgtacgaagcacttttctcaccgagcttcttctcaggttgcacgctcaggcgctgactttagctgctttggctgga

SEQ ID NO: 160546 - DNA, 291 bp, Arabidopsis thaliana landsberg
  unsure (1)..(291): unsure at all n locations
atatgacgtaaaaaaaatatacattcgttgttttgccttggctacacaaattataataggacaaaatttaaggatcatgaacctgaatctgtagaagagtttctagtttcacagtcaagtcatgatgccaaatgacagaagaagataacaaactttatgcaaaaaatgaggcagaactgcagaagcatgcgcctttctaagcaagtatgacgcttttgaggcggagaactcgtgttccttttcaaccaataatnnnnnnnnnnnnnnnnnnnnccaattagttgcatctct

SEQ ID NO: 160547 - DNA, 257 bp, Arabidopsis thaliana landsberg
cttggtgtttggtccatctttcattttgtatttttgaccactatgttgtgttaaagttttaaacatccttttggaataatttaatttttatgtaaaggcaataaatccataaatatttattctgctaatcgccttttttttcttgcctcgaatccgaattttaacatataaagaagcgagacaggttcgaattaaataatctctcttttaaagagatctttatagaatacataaaaaaaaaatcaaactatttatag

SEQ ID NO: 160548 - DNA, 62 bp, Arabidopsis thaliana landsberg
  unsure (1)..(62): unsure at all n locations
aaccctacctcgtgaaggggaacgagtttattatntccctgattgccacatggagcaggttg

SEQ ID NO: 160549 - DNA, 270 bp, Arabidopsis thaliana landsberg
aatatacagtacaaactctataaattaataatgttgggaccatgagattttattaatttatagtgatattaatttatcctataaattaataaatattaatttataggataaaataatatatattaagttatagtaatatttacgtaaaatacaatactaaattcttttaaaaatgttttttagtttagtttttcttatgttttgttgtttgtatattcaattatgttacaaaaattatttttctcttgactttttaatttattttcctac

SEQ ID NO: 160550 - DNA, 161 bp, Arabidopsis thaliana landsberg
aaaaaaaagtcactttggagatagaacagaatacaaaaaatattcttttaatgatcttttatcaaaacaagattctgaattttttcataagtctgagaaatctctaaaacgaagaacaaataagaaccttgtagccatgggtggtgatactctcaaagatg

SEQ ID NO: 160551 - DNA, 169 bp, Arabidopsis thaliana landsberg
ttaagtttgtgttcttgggatcatcaagagttaaaacaaaaaaaaaaacatttcttttttccttcttcaatttgagatttagtgtctcctttaacacccacaaagccagcagaagctttcctggaaattctttaatctatcctttctttttctttttaaattcttaaat

SEQ ID NO: 160552 - DNA, 76 bp, Arabidopsis thaliana landsberg
attttttaaaaaaaactctccatatatctattacttctacgctaactagagagggagattattgctcttaagtgat

SEQ ID NO: 160553 - DNA, 165 bp, Arabidopsis thaliana landsberg
aaaaaaaaatgggccactcgattattatttgtttagacccgttggtaatcgggcttaaacgggtgaaccctattaaattatttattttttaaatggattcgggtaaaaaaaacataacaaatagcccgtttagactcgcgggcttgaggcccattgtaacatcac

SEQ ID NO: 160554 - DNA, 864 bp, Arabidopsis thaliana landsberg; identical to SEQ ID NO: 50580
  unsure (1)..(864): unsure at all n locations

SEQ ID NO: 160555 - DNA, 936 bp, Arabidopsis thaliana landsberg
attctgggttgccttgttttcggtccacactcaaattaggtttaatttcaattctttcgaggtttcagctaggagctttagcggcagtgaacgatgctcggtcataggatctcaagattggggtctactattgttaaacagctcgcaagaggtactatctcctttaaatcgatgctctttgatgcgtttgctatattggtattgatgaagtttctaatctcacttcgatttcgaactgcgtatgcgtagtagagtctttcatgggttttgataacacattacagaagagctcacacattgtctgcttgatataactttgcgccttaagattttgttgctcttttttattttggcagagggatatttatcaacatatgggacacggaatctacaccggtcttatggccactacttgccgtctttggttaatccagagcttgttctcgagttatatactctgctacaggcgataattctattatttcttgatgcatagacactcattaaaacttagaaaaggatgctttgttagatatcattctattatctggctaatagaagcttgttaataataaatcttcaagagtctcgttaaatgatcgcagaagaacggaatgtagcttttctgcgcttgtttggtgttagatggatcagttagtaacgattctaatgtgtccagttgtatacttgtattgattcaattttgaataagagttgagtcaggcatcaatactaagtcgtaagaaaaagcttaaagatttcatagctgagaaattgggtggtttatactttatagttaatggatgaaagaacagttgtcactcataggttctgttttgtttccccattgatggttgaatctttctcatttcatcttttcgatagccagtggtaccaaggcaagctaggacttctcaggaagcctggtttttgaag

SEQ ID NO: 160556 - DNA, 170 bp, Arabidopsis thaliana landsberg
ctctttcactttctacatcctttcttcctcttcctcttctcttccttctacgttgcaaagctcaagaaaaactaaaggaatccaagtggtaaacctcagcgcaaatttcaagaagaagaaaagcagagaaaagttttcttctttttgacctttcttcccctaaattaaag

SEQ ID NO: 160557 - DNA, 233 bp, Arabidopsis thaliana landsberg
atacaaaatttgttcagactacaattcaatacaactacagtttaatgtctcctgaatcagttatgttccatgagttggtccaatgttagagattgatgagttatatcaacattgatatatatcatgaatggtgagtgatccaaaacaagaaatgaatacaatacaagaagatctggaatttgttcagactacaattcaatacaactacagtttcatgtctcctgaatcagtta

SEQ ID NO: 160558 - DNA, 261 bp, Arabidopsis thaliana landsberg
ccgactggttggcggaaatggaaaggaagcgatcatccaatagggaaggtggaaactgaaataacggacgatttgcggcttcatgatcactgttaatgctcgtcctagctctagttacgaccaactttttggggaacggatttttagaaaacctaagacagcgaactgggatgaacgagctcaagctttttggcccacaatgaacaagagtttgagagagcgacccatttttagttattgcttccatttttcttctcgaac

SEQ ID NO: 160559 - DNA, 140 bp, Arabidopsis thaliana landsberg
tgtgatgctaacaatcaagatgtgattagaagtcactaagtcaagccaagcattaacaggttttggtgtgttctagcagtcctaagtgaacatgcagaaaacagaaaatcaagcagaaacaagaaaacactcgaccaaca

SEQ ID NO: 160560 - DNA, 266 bp, Arabidopsis thaliana landsberg
tataaacacccaaactacacaattcaaaaccaaaacattccctaagaatttgtttacttgggcaagaagcatccaaattcaatggctctcattaagccaatcttcgtcaccatttaccaatctcttaaacatattcaagcatcttcttcttcacaactatcttaatcctttgcaacacattcttcgctgtctcctcagtgacaatcgcctcaatcctactaatcaaacccaatacgaatctgaattctgtagtacaataccaccat

SEQ ID NO: 160561 - DNA, 392 bp, Arabidopsis thaliana landsberg
acgcaaaccagatcaaaatcgtatgcgcttgccacggctcgcacatgtcaccggaggagtttgtacggcacgcaagcgaggagtacgttagcccagaatcatccatgggaatgactgcagcgtcagctcacacctgaaaagtcaccaccggaaaaaaagatgtctgaaatcttgtaaacaaatggaagggtttgtaatgagtttctttttggaacatacattttattatgtttagtcggatcaaactctcaagccaaagttttttaactgagctttctgttatgttgttgtaatctctctacttcatcacaattccttatgtaatcctcttctttcctttttgttttttggttgaaaggaaattatatataaccataacattatcggtgtcc

SEQ ID NO: 160562 - DNA, 139 bp, Arabidopsis thaliana landsberg
tgtgatgttaacaatcaagatgtgatcagaagtcactaagtcaagccaagcaataacaggttttggtttgttctagcagtcctaagtgaacatggagaaaacagaaatcaaagagaaactgtaaaacactcgaccaaca

SEQ ID NO: 160563 - DNA, 89 bp, Arabidopsis thaliana landsberg
tttttttctattttgttttttttttttttgttctgtttttttttttttttttttttttttttattgcttttttttttttgttttttcta

SEQ ID NO: 160564 - DNA, 274 bp, Arabidopsis thaliana landsberg
aagatattctctcaatttatctggctccaggggaaaattcggaagcagaagagcgactaaagtcaacataaccacttgtgtgcatctcttcactaccttgtcgccttgcattttctaaggccacacattcgtttagctcagtcacgacgtgtgccattgttggtctccggtttgaagacgggttcacacatgcaagagccagctcaacaatcttccaggcaccgtttgtgtcatagtccccatcagttttgggtcaaggatgctcttgatgtcc

SEQ ID NO: 160565 - DNA, 386 bp, Arabidopsis thaliana landsberg
tattttgtcttggaaactacatttgttcatatacagggagttcttatcatatatacatgaatggttcagctttattgttatgagttttctgagatcagtatgatccaagtatatctcggcaaagacggtatctcacaattcactatcattggaacaaatatagcacaaaaatttgattttggtaaacaaagggcttttttaaggtctcatgcatttgaccagaacatcgacgaatcgcttgtacatatgttgcttcatgtacattttctcaaccattttgcgtccttcactccccaatcgtagcctctcgtcttgattcctaagtagatacaagagattatgagctaattctttgttaccggatcgccccattgagtgaagtagac

SEQ ID NO: 160566 - DNA, 411 bp, Arabidopsis thaliana landsberg
aatggctgatgttccggcggcgttaagagctcgaatacaatccaaagcttccggtatacctccgggaccatgttccatatcaacgacgacgtaatcgtaaccggcgtgagcagcgatctcggctaatgtcggcgagaaggagagtaaaaagagaccgtagagagtttctcctccacggagacgagatttcaaggagtttttggatcgattcgtgatcgcttccacggcggtggcgggtgagtgatcggcgggagatgaagagtatcgaattggagttagggttttgcgggaaaatgaaacggaggatttgattgagctgaactttgaaggagataatgattttccgatgatcagagaagatggattaagaagagatgtcacatctctggtgacggtcacggcggcggggaa

SEQ ID NO: 160567 - DNA, 82 bp, Arabidopsis thaliana landsberg
  unsure (1)..(82): unsure at all n locations
cttttgcatcattcttacaaaatccccaaaatcattcgtcacccctgagtatcacacttaacccacagnnataaatttctga

SEQ ID NO: 160568 - DNA, 172 bp, Arabidopsis thaliana landsberg; identical to SEQ ID NO: 69977

SEQ ID NO: 160569 - DNA, 211 bp, Arabidopsis thaliana landsberg
gacggcgtactttcactttatttatatctttcctctattcaactttcttaattcaaatacaaaattgtcttaaaaaaataatcttaaatcattgaaaactctttaataaatcgtataagaaaataacatagtagaaataaacctgaggttcccaaaatacaccataagcaagacggacttgagcgacttcacacgattctcaccgcgacct

SEQ ID NO: 160570 - DNA, 295 bp, Arabidopsis thaliana landsberg
tcaaaccaaaatgagttttacttcacacaataagtaaacaaaaggcgaagacattgtaatgataccgttgtaaaagtaagtcgacaaaacagatgaggaactaaaccctaacacttatgagtaatctctcagttacggtacctgcttccacgttcgcgaccgtagtctctgtctctgtcccgatcatggtcatagtcatagtcacgctccttgcctctttccctctctcggcttctgcttctgcttctgcgtctatccttatcgtagtgatgatctctaccacggtctctttgcc

SEQ ID NO: 160571 - DNA, 267 bp, Arabidopsis thaliana landsberg
tgtatatgaacaaatgtagtttccaagacaaaatattatagaacagagagcacaacttcttttgaattggaacatgtcactgttttatttacatcaatgccgggatcctctatattgatacacttgttaggccatcgatccgacagcttcataaaatagaatctctggtcgaatcttcctttctccaaagaaactgaccacactcttccagttgccatcatcctatagcatcaccacatatgtgtcaataatgtctggcctatccta

SEQ ID NO: 160572 - DNA, 201 bp, Arabidopsis thaliana landsberg
atgcgcgatctctgttataccggcgaaaaccgcataggggccaagcgaatccagaagggttctaacctaatcttgaccacctaactaacctagagattaccctaatctaatccatcctcaagaaccctaatcactactcaagcaacattctcaagaacacaaacccaaaaattactgaaatcataccataatgtagatcta

SEQ ID NO: 160573 - DNA, 174 bp, Arabidopsis thaliana landsberg
ggaattgaactgaaccacacttcagcacataagtatgcctaaaaaaactatttattaatttggcgccgctgccaattcattgttgcattgttacattcaagatatcagaaaagttaagatcaacttcttttacattactcaagttactaactcatcttttcgtctgcttggttt

SEQ ID NO: 160574 - DNA, 301 bp, Arabidopsis thaliana landsberg
gatttttgctagtaattaaactaagatgatctcactactaatttataagattgaaacttaacttgaataaaaagggaggtttccatctacttctagtaggttgaatgaacccccaactgatgcgataccgttaccgagattcctcgggtctgaccggttcccatagtcgtcacagttcccgttgctcgggagcttatcgacattgttggaagatggcgcggagttgagaagctcaaggcctctttttcccatttgttgcacttcttgtggtgacagtatcttaatgcaccacacgctgctc

SEQ ID NO: 160575 - DNA, 382 bp, Arabidopsis thaliana landsberg
aaaccgaatccgttttggatctgacttcatatgtacgttacagagaattttaaacaaaacaaggataattcaattaaaaaattgaaaatgtatttgcgtatttatcaacaatcccaaacaaaaacaaatgaaaaagatgagaaaagaaaagtcaactaaaccggtaatctcaccgaaccgctagttgagccacttgcaccggtcgatttaaccgaagttccttcgccgtctttattgactcctcctcttggcacatgtaccgaagagttcctccacaaaaacgacgcgtttctaagaaaagcccaccggtctcctgcacgtaccgaatcactaccggttgaattcggtacagcactggctcgaacgctaccggtagcaccta

SEQ ID NO: 160576 - DNA, 286 bp, Arabidopsis thaliana landsberg
ttcttcaacaatggcggcaaaaagagacaagaaagaaatggacacaacgcataactgaagcaaagacaatgtacaagatatgaataaggactataatcttatacatatatgtaatccacatgttgttgtatatggcgtaaagtaatagtaacaaatgaggaaaagataggctatagacaatagtagacattgtttgttatctcttttcctctcagttttgttccttttgtgataaatagcgaaaaaccctttcccatgtttttttagtgagattatttacactttg

SEQ ID NO: 160577 - DNA, 106 bp, Arabidopsis thaliana landsberg
gatatatatagattatatcgatcgcgttttccattttacacatagtatttttgagcggccgaaacagcaaaaattttgaagccccgaaactcttccatcagccagg

SEQ ID NO: 160578 - DNA, 311 bp, Arabidopsis thaliana landsberg
ctcgttactgcgaataactcaacgaatttaaatccaaaagtattttttgtaaaatggagaataaagataaaagacttgaaaatagctctaccaaattttgttacctttgacaatgatttgatatgacgaaactatttcctcccaaaccctaacgattctggtccttctccttccctccgttttcctcctttacaaaacaaaaagtggctaactaaaaccctaatttcgagtttccttcttttatatgcacactccagggttttcattaacccaaccgattaaaccgagcgatttaaatacaaaccctaacc

SEQ ID NO: 160579 - DNA, 169 bp, Arabidopsis thaliana landsberg
atagaagaaatgattaagctcgaagatcaaaaacataccgagaacattctgagtacgtgtagctctgatgataatctcagtcctcataggagtaaccctaacctcaacaccagagtaaccatcctctgctagctctcttgtgagaacctcattcaattcagcgtagaat

SEQ ID NO: 160580 - DNA, 165 bp, Arabidopsis thaliana landsberg
gaggtgaagtcaagggactttggaagaagcgagtatctgtttactcaattgtggtcctattggttccaatgccttgaagaatctcgtccttggtggtgttggtagtatcaccatcgttgaaggatccaaggttctaattggagacatttggaaacaatttcatag

SEQ ID NO: 160581 - DNA, 388 bp, Arabidopsis thaliana landsberg
ttgttgtttccatttctctccatcaacagcgaagatcccatgtcccagaagatccgcaagattcactgtaccaacgggtcctttactatagttatggaatcttgtcttgagaatatgctccacgttccgaggatctgcagtgaatatctcgctctgtcctggactcaagaacctgaaagtaggctttgtcctcgcgatctctgtctcgtaatcgtataatttgtggctgtggaagaaaagatcaaagattgtggcgtgtacaggagtatacctcttgtcgtttctggattttccggtgaagattctgatagttagatagagtgcgaaagacagaaggatgaagatcgttgttactactataatcgccatgctcgtcaaaatctccatt

SEQ ID NO: 160582 - DNA, 153 bp, Arabidopsis thaliana landsberg
aaacaaaagggaagtatcaccaaagacataagccctaacagtgttacctattctctatcacattatcaaaatcccaaaatggttcctcaaaaactctgatttgccatatccaattattcttcatgacctttcccaataaaagagagtaataat

SEQ ID NO: 160583 - DNA, 406 bp, Arabidopsis thaliana landsberg
taataaaggagaccaaacgctattttctttgtgtctttggtacgtcggaggaaggtcgctagctagagtgatttgctggttccggtaagaagcgtaggcgtgaagatggtcgtagtagattccgatgttggagtttcggttgcgtgaagcgattgttatctgaaactttgaggtgaggaggttaggctgcgagaggttaaaggcgtagacggtggtgtcttggaggatgaattctgggtttttcggttggaggattatccaaacgaggaagattgtcatcaagacgatgatgatgaagccgatgattgctccacagattctacaggcggttccgcctcctccaccgccaccaccgtggtttccgcactctttggtcgtcattggtattatgtatttacggctttgt

SEQ ID NO: 160584 - DNA, 331 bp, Arabidopsis thaliana landsberg
aaaaatacaaaggcacaatcttttttaaaaatagatagatatataattatcttcatcacacgtaacgtaatggacctagtaacctatacagcttccatacattgggaaagtaagaagaaaaaacaaataagggacaaagagttacttgaaaaagaatttatagttcattttctacacattcaaagatgatatataactccacagcttaaagggaagctttactttacttttagctttctttttttgattttgtttttcttctgtaccggaagaattgaaacgatgtgtatgatagatacattggtcttcctcccttcacaaaatggtgcat

SEQ ID NO: 160585 - DNA, 279 bp, Arabidopsis thaliana landsberg
gagtttgctctatttatttttgcggtaaagggaagtggacacacagcatagtataaaccataagagacctgtatcatgttcaaaagatggatcagtgcccatgctttgttaaagaggatgatggtctatgcgtatgtagaataaaactatgtagcataaaaaatgttggtatacaatataatcatctacttgggaattaagtactaccgctacacgtgattttttgtttcgatgcatactactgaatcccttggctgcttgaattcaaaagtataattt

SEQ ID NO: 160586 - DNA, 335 bp, Arabidopsis thaliana landsberg
cgttgtgaaatctaaccggattttggatcccgccatttaaccgtggtcattagcgattccaataatccaacatgtttttcacatcttcatgtatatttagcatttattttttattttcttttgttaaaaggttttcaacttttttttttttaaagtataaatactaaattaatatgacgttgtgaaatctaaccggattttggatcccgccatttaactgtggtcattagcgattccacaaatccaacatgatatttagcatttatttttattttcttttcttaaaagttttttaattctttttattttattttaaaggtattataaatattaaa

SEQ ID NO: 160587 - DNA, 95 bp, Arabidopsis thaliana landsberg
aattgcgtaagaaacataatcatcttcccatggtttttacataagacaaaccaaaacaaagagaagaagatttcagatacctacacaaatcctct

SEQ ID NO: 160588 - DNA, 304 bp, Arabidopsis thaliana landsberg
tctcttttctcagcttctctgattcgtctttctcctctgtctctgactcttcgcgaaaaccctaattagctttgtggtcttgttcttttcgccatggaagacgacggcaagagcagccccaagttaccgatccctggaaagagaaatatactaatcaccagtgctttgccttacgtcaacaacgttcctcatctcggaaacatcatcggatgtaatttgaatctctcctctctctatctgtatcatttcatgtcttcgtcttctctgctaatacatgtaatcgcgtgtgttcggttatgaattt

SEQ ID NO: 160589 - DNA, 144 bp, Arabidopsis thaliana landsberg
ttgcgaagttagctacctttcaaggtaagttcatccaaagcaggataagcagacttttcctaattctgttgtccttgcagctagaaaactacaaatagcttccaaggccacctctagcgcccggaattcaaacggggattctat

SEQ ID NO: 160590 - DNA, 245 bp, Arabidopsis thaliana landsberg
agaagttaaaatagtcaacaaaatgtttgacttttgctttaaaacgaaccacgaattatacatggccaagaatctgcattttacacgtctttctttcttacaagatgcagactttgaatgtcttatgtacaagtatgttgtagaattggacctcaaattactttacagggctgtggaaactggaagaagcaggctaagtttagtagccaaaccaaacataaggtatggtatgaaacttatttggg

SEQ ID NO: 160591 - DNA, 275 bp, Arabidopsis thaliana landsberg
cattcagctattactcattcattgcgttactcatctccaatgcttcttgcttttttttctttttcttttcttagtttgaatgcaagacaatctcattttctgataaacttgattcccggatattaatggtaatgagagtttgacatgagccttgtagtgatttgaggtggttacccacatttggctatttagcgggtcacatgtaatagcctaataggttcaacccacctcttgttcataggggttaaaatgtagaaagatagctaagttagtta

SEQ ID NO: 160592 - DNA, 677 bp, Arabidopsis thaliana landsberg
tagagatcccgacggtgttattcaccccaatctctctgagcgagtgaacctcttgtccaatcgccgtctctacacaaagcgtcttcgattcaggcgatagactaccgtcgcgatcagatcctgtaagatggaggagtaaaactgcacggattcgatccaatccctggtggtgtagagatcatccccaggggaagtagatctgatggcgtcgatagcagaagagccggaggcagcaccggagatgacaaagttgagattctcagggagagagaagaagcagaagtcgccgcgattgcatgattcaccggtgatggtgacaacataagcaaatctcacaacgatgataagaacaccaaagagaagcacgcgaaccattatattccgtaagaagctgggtttccccatggaagtctccatttgtatgtatctcactgctaaaactactttacaagacggagagaataaagaacgaaagaatagctcttggtttgtttgttaaattggaagcaaatatccctaaatctgaggaggagatggagcagagactaacgagaagagaaacgagcagaggtgtgattagctccgattagggttgggaattgacaagaagaattgcagatccgacaagtagttggaggataagggcaaaagaagcgcatagttcgcggaggtgttcg

SEQ ID NO: 160593 - DNA, 357 bp, Arabidopsis thaliana landsberg
cctccgatgtggctgcctggatcgagtgagtgggtcgagtacaatgctttgctgcttccctcctggttggatagagtagaaggtcgagttgaatccttttgagctccttctgcacctgaaaacacaccaaaacatgcaatgtgtatgcaagatgatcctaaatgcctaagtatgcaaaataagctaaaatggtgcaaaatgatatgatacaatgagcaaatgcaaagctaaatgatgataaatatacacctaaaatgagtaaaatacagtgttatcaactcccccaaacttatctcttgattgccctcgagtaaacaaaaaatcttaagttgaaagagaggtttgaaggtggggatt

SEQ ID NO: 160594 - DNA, 352 bp, Arabidopsis thaliana landsberg
agaaaccacgtcgtaacgaaatcgttggtagatcatctgtttttcaccagtaatagcaaaacaacaccatgaagatacacaaaaagaattagactcaataagagaataaaatccaatgcacggcttgtcacttttaatagtagcttatgaacttagatgtaatgattaacgttaaatgtttattctagtactaaaaaaagagtaaaaactctgccatgcgacatacacgagactccaaaagattcaccgtcttctggcgccggtgtagctatgtctccccggcgtcgaattttgtcttctctttgttgctccgctcctctcccgcagaatccaaactggtttcgcctcacgt

SEQ ID NO: 160595 - DNA, 490 bp, Arabidopsis thaliana landsberg
cattgataagggtaactctaaggttcatcaaatggctaataggcgaaaggtagatacccatgacgatatattcaaaaaccgggtcaatccactctcgtgacagagacccccataactctaccacttcctaatctgaactctcgttgatgaaacatagcagagcagggtttaagaaacaatctaccaaagccaataggcagacaagccaaccccttggtcgaatctacaaatctctggaattcgtaggtcaaacatccatttgaacgtcttttggacactggacgtctatgattgaatctccacattagccagcgaaaaccgcataggggccaagcgaatccagaagggtataacctaaacactaaccacctaactaacctagagattaccctaatctaatcaatcctccagaaccctaatcactactcatgcaacattctcaaaaacacaaacccagaaattactaaaatcataccaaaaggtagatcta

SEQ ID NO: 160596 - DNA, 140 bp, Arabidopsis thaliana landsberg
tgtgatgctaacaatcaagatgtgatcagaagtcactaagtcaagccaaacaataacaggttttggtgtgttctagcagtcctaagtgaacatgcagaaaacagaaaatcaagcagaaacaaataaacactcgaccaaca

SEQ ID NO: 160597 - DNA, 362 bp, Arabidopsis thaliana landsberg
atcacaattcctaacttctttgaattccaaaccctttactagacttaacacttttgtatcccccttaagaactctaaactcttactcttttttttttttctttccttttcattctgactctcattctcattcattccatacacattccgaatcccaaatacaagtctccacctagtcctagctaaccctaaaagcgtggactaggtctacatgaaagactgctcttgtcggttcatacgtaacacgttataccaagctcaatcgaaaaagacctcacaatcacacacaaatgatctttggcttgaaataaagctaggctaaaggtatgagaagctgctctaaaaatgagagacagctacttg

SEQ ID NO: 160598 - DNA, 286 bp, Arabidopsis thaliana landsberg
tcaaaaaagaaaagaaaagaacaaggagcataaattaatgagaaattcccacaaatagcacatttttaagttttttgtacataaatagcattaaaaagttttttagacataaatagcactcaactaattatttgagaaatttctaatagtaacactaaaacaagttttatggacaataataataacacaattttttataaaatctattcaaccaaaataaatttaaaaaaaaattaaaataatatatttgggttctctatttctaatttagggtatatatttcaac

SEQ ID NO: 160599 - DNA, 124 bp, Arabidopsis thaliana landsberg
aacgagtgtgggcgatcaaagtccgagaaccctaatttatatttgaaacaatgacgatgatgagcgatctttcggaggatttggtagaggagatattgtgtaggggttcgatcccttctttagg

SEQ ID NO: 160600 - DNA, 571 bp, Arabidopsis thaliana landsberg
gctaaactttcatctgaaaatcgtggagtattttatctagatgccccatcagcatcagtttgcctgcttattcaattagaaaaaacagcaactgaggaaggaggcgttacatcatctgtctattcccgtaaagagcctgtaatttccaaaatcctgaattttcccttactgtctctagagtctcttgctcatgtgaatgccttggtcttagagattgtgtctttcaacatttatttggagtaacttggagatagcctgtgacttataatggcatatatcatctgtctttactctttgttttgatatatattttagagtagtcatggtgatagctggatcttgatataacaattagtaattaccctatttatgtgaatcaggtgcacttaactgagagggaaaagcaaaagttgcaggtctggtctcgcattatgccttaccgagagtcttttgcttgggcagttgttccgctttttgataataatctcaccacaaacactggtgaatctgcttcccctagcagtcctcttgctcctagcatgaccgcgtcaagttcccatgatggtgaaaa

SEQ ID NO: 160601 - DNA, 218 bp, Arabidopsis thaliana landsberg
aattgagttaattaattgacactaccaaaaaaaaaaaaaaaaattgagttaattaattgaatttgaattataaaaaaaaagaaatccctcaaaaaacctctaaaccatacaaaactccggcgtgtttctccgccccatcctcaacgaaatacaaatccctcatcctctgaaacgcctgccacgtcagcaaactatccgaaccggcttgatgacatttc

SEQ ID NO: 160602 - DNA, 390 bp, Arabidopsis thaliana landsberg
tcattaccttatgaacaaacatattaattttttaaatattattatttatatatttaaaatttataaaacattattaatatttaaacttataaaaaatttgatctatcacaatttttaacatcattatataatatatagagtttaaaaaaatcttaattttttccgtcatattttatgattcaaaatttaaaaaatgaacatatattaaccaattagcaaaacatttgtgggttcaacgtcccgcattgacaaaaatatttagacaatgatttataaacatatcataaataagatcaacattaatataaataaatggtttttttacgggacgggtttggcgggacgggtttggcaggacgttacttaataacaattgtaaactataaaata

SEQ ID NO: 160603 - DNA, 490 bp, Arabidopsis thaliana landsberg
aattgataagggtaactctagggttcatcaaatggctaataggcaaaaggtagatacccatgacgatagattcaaaaacgggtcaatccactctcgtgacaaacacccccataactctaccacttcctaatctcaactctcgttgatgaaacatagcagagcagtgtttaagaaataatctaccaaagccaataggcagacaagccaatcccttggtcgagtctacaaatctctggaattcgtaggtcaaacatccatttgaacgtcttttggacgctggacgtctatgatcgaatctccacattagccaccaaaaaacgcataggggccaagcgaatccagaagggtataaacctaaacactaaccacctaactaacctagagattaccctaatctaatccatcttgaagaaccctaatcactactcaagcaacattatcaagaacacaaacccataaattactaaaataataccaaaatgtagatcta

SEQ ID NO: 160604 - DNA, 139 bp, Arabidopsis thaliana landsberg
tgtgttctaacaatcaagttgtgatcagaagtcactaagtcaagccaagcaataacaggttttggtgtgttctagcagtcctaagtgaacatgcagaaaacagaaaatcaaacagaaatagtgaaacactcgaccaaca

SEQ ID NO: 160605 - DNA, 140 bp, Arabidopsis thaliana landsberg
tgtgatgctaacaatcaagatgtgatcagaagtcactaagtcaagccaagcaataacaggttttggtgtgttctagcagttctaagtgaacatggagaaaatagaaattcaagcagaaacaataaaacactcgaccaaca

SEQ ID NO: 160606 - DNA, 156 bp, Arabidopsis thaliana landsberg
atgacgagacattgaaaactccatctacctttttctccctcctcttctctctccctttcccaaattcgaacgaacctgcaatccctaaacccccaatttagaccatctccaaattcgtcgtccttttctctgtgtagtctaattatatattacaag

SEQ ID NO: 160607 - DNA, 224 bp, Arabidopsis thaliana landsberg
atcctcggaaattctttatctgattgattttattgtttactatactatcgtttactgcataataacctgttgcttagtttttgcatttctctcctattaatcgacctgatacttgaccacccagttgtctgccaacagactgtgcagtcgagtatccctgttatattttctgtctgttactcgacatgtcactcgaccacacccagtgctctgcaacgagctgt

SEQ ID NO: 160608 - DNA, 174 bp, Arabidopsis thaliana landsberg
gtcctatactcttatgaagaaaaaaaagtttcaattttcaaattctgaaaaacaaacaaacatagattttagctttttatgcatcttcaacatatgaatcaagtatgcattggaaacaaaaaaaataaatatgatcactccaaataacatattcttaagaatcggaaatgactt

SEQ ID NO: 160609 - DNA, 141 bp, Arabidopsis thaliana landsberg
agaaaaaaaactacacataaacaatgaagattctttttaaaaaaagatatgatatatagtagaacatctattaattaatattcgataaacctctttaaattaaccaattattttggttctgtgttgggactagtgtaaaaa

SEQ ID NO: 160610 - DNA, 152 bp, Arabidopsis thaliana landsberg
gtcgttttcctctgagagcaggtctaatggcgaaccagtttcttcctcttttcattcgttctctcccaatgcatcttccccacccccgttgctgtttctctggaaacgaaaaaaatctgtagtttgggggagggaatgcagaaactggtttc

SEQ ID NO: 160611 - DNA, 84 bp, Arabidopsis thaliana landsberg
atatcgttattaatggataaaaaatatgttgaaatctttcgaaccaataggttctctttagtgagtatctgactgaataaaaat

SEQ ID NO: 160612 - DNA, 171 bp, Arabidopsis thaliana landsberg
cctagatagaagcacattgcccggtgtctctttggtgtagtcgtgaagtatctattctatgtaagaataaggtacttacatgcgggcgaaggaatatagatggaaccaaccctgggaacaaatgaaagcacgctacttgtccgtaagctaccagttgttgatacaaggtat

SEQ ID NO: 160613 - DNA, 325 bp, Arabidopsis thaliana landsberg
cgataacccaatctctcatttctctgaaaaatcttttagagagagaaagttgatgaattctcttgtcgtccgaaggtttttccggtttccatatcccgagtatgcgggcttatcgtctggcagctcctcactcttttagtggtgttagccagctctcgtccgtcatcgatggctttcaaagcggcgatggtcggcttcttatcggcttttttgccgtttgcttcttcatatttactgtttttgtttcgggtgcgatttctctcatggcttgctttgttggatctgccgcttcgtcgttgtcctaaactcaagaagagtttatggt

SEQ ID NO: 160614 - DNA, 112 bp, Arabidopsis thaliana landsberg
atgaataatcaaaaatggagtataggtttcatatctctcgcttttctcttcatcacttcctcttcagctgagttcatcattcacaggtatttttgatcttaaagctcttttt

SEQ ID NO: 160615 - DNA, 360 bp, Arabidopsis thaliana landsberg
atcacaatccctaacttctttgaattccaaaccctttactaaacttaacacttttgtatcccctttagaactctaaactcttactctccttttttttttttttttttcattctcattatcattcccattcattccatacacaatctcattcccaaatacaagtgtccacctagtcctagctaacccaataagcgtgggctaggtctacatgaaagactgctcttgtcggctcatacgtaacacgttataccaagctcaatcgaaaaagacctcacaatcacacacaaatgatctttggcttgaaataaagctaggctaaaggtatgagaagctgctctaaaaatgagagacagctacttg

SEQ ID NO: 160616 - DNA, 138 bp, Arabidopsis thaliana landsberg
tatcactaacaatcaagatgtgatcagaagtcactaagtcaagccaagcaataacaggttttggtgtgttctagcagttctaagtgaacatgcagaaaacagaaaatcaaacagaaacagtaaaacactcgaccaaca

SEQ ID NO: 160617 - DNA, 666 bp, Arabidopsis thaliana landsberg
tacagaagaaaagctgttatgtatcactattattcttacacacatcaaagagtcaagacaaaggatgttacataaagatgagtcctcaaaaccaatgactcatttattttaagtaaaaccaaaaacttccacattagctttagattaatgcaacggatcaacaacttggccaatgaacagaaccactcctgttatgttctctgtgaccaccaatagaaacggatggtctgcaacaaaatctatttcatcttcctccataagcaatcctcttagctttataactccagctgatgcagctgcagcttctgttccctcttcattcacttcgatacacgctttatggaaaatgttcgatacgcatagattcttccccattggaaggtgaatcaaccatctcagttaaaccacctccattattaaatggtgaagtcagccccatatctttcagaacatttgatgcactaaactcgaaagagaatttaaactttggcattctaaaagcaccatctgatctacagtggagcggaatatggttatcgaagaaacttggttcggagcctatcttctcaagcagaggagctaatccttctttatcattaggaagataaatgtacatggagaatcgacgttgatcctctatataagggaggcgcaaaactttgaaac

SEQ ID NO: 160618 - DNA, 249 bp, Arabidopsis thaliana landsberg
taaacggacctgaatttgtttctaaacattccatggggcggaaggtcaactacttgtcctgctcctctaagtcccaaaacactcactttctcaatcacccatcctttgctcaatgcaaacttaccttctttaacttgtgaccacatcttcattgtcccgtttccgaccgaagcgtagaagtcaacgtacgtggactgtccatttcctagcttcatttccggaagctcgtcttcgtctagatagagttta

SEQ ID NO: 160619 - DNA, 173 bp, Arabidopsis thaliana landsberg
ataaaggcccaagcacaatttttcagtaaccatgatgaagtgagaaattctgaaaaatgggattacctcaaaataagctcagttttttctgcttcttcttcctcgtctctgtactaactcttgccccattggctttctccgagatcttcttagaggagcatttcgaaggtgaa

SEQ ID NO: 160620 - DNA, 338 bp, Arabidopsis thaliana landsberg
ttatcttttatcgacgaaagtaatagcaaagctagaacgttaagatcgataagcaaaaataaagtagtttgaaatagaagataaagctagagggtgctcaatccagcagcatatactaacagaggttcatccaaaattaactcatgaaggtttataatccgaagagaacacaaggtggaagcattgtttaggcttggtcttcaaccaatgggtggggtttgatggtcgaaagagccttggacgccaggaaatcagtgtgctcttggtatggtgatctagagaatcatgtctccctccagaactttagggtaaggaatcagtaagtgttctgaaggcaa

SEQ ID NO: 160621 - DNA, 313 bp, Arabidopsis thaliana landsberg
ttcaaatcaaataaaagtagcaaatgaaacgtttgaacactttaaatcaaaggtcgagggaacaaacaactcaaatattccaaacctgaaaacctaaaccgctaactaaaaactttaatcaacaaccctctgttttgttcccactcgccttcccctctgccgatatatagagttcggaggttaacttggtcagacggtgtagaatcatctgccttccaagcttccaatcatcaatcttatgtttgtcgccttctgctcgcacctctgcttcgagcccaccggttccttatgatcataccgcgaattccccggc

SEQ ID NO: 160622 - DNA, 195 bp, Arabidopsis thaliana landsberg
aaagtttatagggtatacgaaatatgggtctctctccctctctctactgaccgctctctgtatattcttctccgtcaacgataccaccccagaaacgtcggcggtcaaaacaatcggcggagctctctcgattaaatagacaagaagtttccggtatctaacttctgtgcgccagagacaagttagggttgatgt

SEQ ID NO: 160623 - DNA, 374 bp, Arabidopsis thaliana landsberg
attacaatgcctaactttcttttctctttgaactccaaaccatttactagactaacactttcttttgtatcccccttaagaacgctaaactcctactctcttttttttcttctttttttttcattcccattctctttccattcattccatacacaatcccaatcccatatacaactctccacctagttctagctaacccaaaaagcgtgggctaggtctacatgaaagactgcttttgtcggttcatatctaacacgttataccacgctcaatcgaaaaaaaaactcacaatcacacacaaatgatctttgacttgaaataaggttaagttcagggtatgtgaaactgctctaaaagtgagagtcagctacttg

SEQ ID NO: 160624 - DNA, 139 bp, Arabidopsis thaliana landsberg
tgtgatgctaacaatcaagatgtgatccgaagtcactaagtcaagccaagcaataacaggttttggtgttttctagcagtcctaagtgaacatgcagaaacagaaaatcaaacagaaacaaataaacactcgaccaaca

SEQ ID NO: 160625 - DNA, 905 bp, Arabidopsis thaliana landsberg
  unsure (1)..(905): unsure at all n locations
tctctttccattttatgccctttgctccacgtaagatcccgagagtcctgaggttccaagaacagtaacctagagaagaaattaaaacaaagcattagaaaaacaagtactggttcagtggtttcgtcttaatgaaaacattggtgtctgcaaatttctatatgatttgattcagatagcctaaagatgcatgaaggttgaaagaaagatggttgaactagtcgataattatgcaaactcaggattatatgttgctatcaaagatgcaaatcaccagagtacatgttttgagagtctaggttcttagaatcaaagagaaagatctgatttgattacctttccccattcagaaccaagcccgctgcatctcgtcttcaagtggatcatctttgtccccaactccatctcaaccttcttcttcaaatatacttcttcaggttcaaaggaatcaaggtagtcaannnnnnnnnnnnnnnnnnnnnnnnnnnnnnnnnnnnatcattcggtaagggcttcacaccctgcacacaacatacaaaatcactaaacatcaaacaatcaataaacgccaaactaagtgagacaaacaacaaacctccccactcattccaatgctatcatcgatttccatcttaatcgaagtgagaatcccaccaaattcctctacagcttcagctgctcggaacacatatttcaaagcctcttgtcctgcctcgtcctctgtgtttttcgatatcgcgcttttcgcatcgtgaccaccagcagaaggaagctcagcccaatctgcagccatcaaatctttaaatgcattcagaacatcagagtttttcatttcaagcatgtgagatacatcttcgctaaatctccggacttgtccaatgcacattgcacaaggatactgcata

SEQ ID NO: 160626 - DNA, 274 bp, Arabidopsis thaliana landsberg
caaagctttggactctcaggccaggaagactatgggattgggcggcgatcaatcctttattcccgtcatggattccggccaagtccgcctcaaggagctcggctacaagcaagagctcaagcgcgatctctcgtctgtctccgccactctttcctttttcttctttgatttgtgttagctaaacaattgttagatttcagggtcttctccaacttcgccatatcaataaacttatattatagatatagataatcacatgcacgtttaactccag

SEQ ID NO: 160627 - DNA, 105 bp, Arabidopsis thaliana landsberg
agttttctcaacgctcactgaaggatgttgcctctgcttctctggagtgacaaacaactccatctccatactcatccttctctacacaatttaccaattaacaaa

SEQ ID NO: 160628 - DNA, 130 bp, Arabidopsis thaliana landsberg; identical to SEQ ID NO: 41582

SEQ ID NO: 160629 - DNA, 358 bp, Arabidopsis thaliana landsberg
  unsure (1)..(358): unsure at all n locations
atcacaatgcctaacttctttgaattccaaactctttactagactaacactttttttgtatccccctttagaactctaaactcttattctctattttntttttcttatcattctcattctctttcccattcattccatacacaatcccaatcccaaatacaagtctccacctagtcctagctaacccaaaaagcatgggctaggcctacatgactgctcttgtgggctcatacctaacacgttataccaagctcaatcggaaaaagacctcacaataacacacaaatgatctttggcttgaagtaaggttaggctcagggtatgggaaactgctctaaaagtgagagtcatctacttg

SEQ ID NO: 160630 - DNA, 109 bp, Arabidopsis thaliana landsberg
  unsure (1)..(109): unsure at all n locations
ctctttattgggttttcatgaaaaaaataaattattagttcacacgtttccaacaacattttgctgcttctttagttctcccttgagccctctcttcaagtttgcggan

SEQ ID NO: 160631 - DNA, 107 bp, Arabidopsis thaliana landsberg
  unsure (1)..(107): unsure at all n locations
ctgcttgggggctccgggtttgatgtctatttcactccccgatgggggttcttttcagccttccctcncggtactacttcgctatcggtcacccaggagtatttagc

SEQ ID NO: 160632 - DNA, 198 bp, Arabidopsis thaliana landsberg
gccctgtggctgatttttttccctttttttaccgagggatatttttttatctgagattttatctcagtgtgttgggagggggtaaaggcttatttaccccagagaaaatcctaagaaaaaacgaaattatgtatttcattttcgtctttcatgtaaggttcaatttgtcatcataaataaatattagtagtttagtat

SEQ ID NO: 160633 - DNA, 441 bp, Arabidopsis thaliana landsberg
  unsure (1)..(441): unsure at all n locations
cgttcaatccatggcagaggcaggctctttccgatccttcaccgcctcagatctagttttctcaccattgaagatctagttctcctacctttctccatgagacgctttccttcaggtctcggggtgctgattttgcttcaccgccgttcgtggtaaagagtatcttggttttgtttccttttgtgagagttcctagtctcagatctgttgattttatgtttgttttagactttgtatttttagttttgaatatcagaattatgaacctggggagaatttgttcagatatgatgtatttgtagtttgggtttttcccctttagtttgattttgtcttcgggagtttcatttgcttgccgataanattctctggaaggattgtttccttgccggcctttgtaatcatgtgattctaaatttaatcaatgaaatccttattcta

SEQ ID NO: 160634 - DNA, 255 bp, Arabidopsis thaliana landsberg
gatagatttgcaactaaaacaacattcatctttctttatctctcaagaaacaacaataatgtacagatacacttccgctggaaaaatcaaactgctcatacgctacgtttaatgctttcaaactcaaacaaaataaatcacttccttgggatgggaaaatacagtacccgtgaggtcccgacttgggggaatcacacggtggctgctgatggagcttccccaatgtgttcccaatatataatccctgaagtccct

SEQ ID NO: 160635 - DNA, 212 bp, Arabidopsis thaliana landsberg
ttggcttgcggctgaatcgatttcaagattgcaggcaatgcctagtgtgaatatattgttgatgtgtgatgctttggttaaggaagttactgaattaaccggttatgataaggtgatgatgtagaagttccatgaagacgggaatggggaagtgactgctgaatgctgcagggacgacttggaaccttatttcaagttgcattactcggcaa

SEQ ID NO: 160636 - DNA, 444 bp, Arabidopsis thaliana landsberg
  unsure (1)..(444): unsure at all n locations
ctgttttatggtttctcaatcctttcaattgttgtgaatgtttggtttccttggtttgtcatcactggaatttgatgagatgattctctgttttgtaacagaattcttctctctttctgtggatcacagcaaagcagtgaatgagaaaaacagcatgagttggttcacaaggtctgttgatgtgtaccgtaaagttgtgagcttgaatctgtattgccgagttattctgtaaactttttctctgccttgaaaaaacccatcttcgatcttgttctaaatcctcagccttgtctaaactctttaataatgggatcccgtcgtttctacgttttccactgtgtccaatataggatcatctccccccttacagcttctctttttcttgttcangacctctgtcttttggtgactaactctgttctgtggagaaaccctagtttgcgt

SEQ ID NO: 160637 - DNA, 119 bp, Arabidopsis thaliana landsberg
gagcatatatctattttcagtcttcataaattagctgcaacagagccagccatatgattcttgttgctactaaacctaaagactctcgcggaagcagcagcgatgagatgatgatgaat

SEQ ID NO: 160638 - DNA, 155 bp, Arabidopsis thaliana landsberg
ttatataattaaaaggtattagtatataaatagaaatagaatatttctaaaaatattcttttttagactagaaaatagaaatatacattggagagaaagcaactctattttagagtaagatatagagctatacattggagattgtcttacaaaac

SEQ ID NO: 160639 - DNA, 127 bp, Arabidopsis thaliana landsberg
attcaaatatgtttttcattgccaaaaagaaggaccaaacatatgtttcccaatattcaggatttgcaccaagaaacaaaatttgaggtgcttacgaattagaagccgagttaaaagcataggactt

SEQ ID NO: 160640 - DNA, 188 bp, Arabidopsis thaliana landsberg
ataaattcatcatactgattcatgctctcacactaataacaacacaaactacacacagggccagcatatgaacgtacgttcgctcgctattgctgtgtgtcccacgactccctacttctcccattttcttttggtaaactacaaaacatcaccaccaaacaaaaactcaaacctccccaaggaaaatg

SEQ ID NO: 160641 - DNA, 140 bp, Arabidopsis thaliana landsberg
aaaagaaagagactaattccctcctccaaagcttgttgaaaaagcagagtagctttctcaaagtgatctctagcctcagtttgatcaggagtcaaaaccccatatgaagtatgagcatccccaatgcaccaaagagcatc

SEQ ID NO: 160642 - DNA, 270 bp, Arabidopsis thaliana landsberg
cactagtagcttcttctcgctactgattacttgtgtttctgatcgcaatcagataatggctatagtgttgttcttcccgagaaattgaatactggcaattggaacgtctacaggttccttacgcttcctcttcttctctattcaattctctttttttttttttgtttatgttttgaattcaatttttttcagatctgcaaaatctccgttcaagctcgttagtagattcccagatcatcctgacatcgctactctccatgacaattttga

SEQ ID NO: 160643 - DNA, 457 bp, Arabidopsis thaliana landsberg
  unsure (1)..(457): unsure at all n locations
tttgatgaataaaatttaacattcattataaaaataaaagccactcgtgccctattgttactatttctttagttacataaggactgacccgtaattaagatgacttgtgggagacacaatacatgtttgatagagagattcgagttaatttnnnnnnnnnnnnnnnnnnnnnnnnnnnnnnnngctaaggaaagaaaggaaaacaaagtggaaacaaagataaaagacgtctgattcatttgcttatggaagctcttcagaaaggaaacattcatcccttctcgaagtcactccacagtttgactgatgcgagaattcataatcgtttcttgaaagtttgttagaagttgcattttctaggccatcctccttatcccgtgtagcgatatcaactactctcaccggagagatatcatcactatcgtttggtgtatacactaaagtaaagccacatttc

SEQ ID NO: 160644 - DNA, 244 bp, Arabidopsis thaliana landsberg
ccttaatgaaatcgtgcaatttcaaataacaagcggcgcggttgctgtgaagagcgatcttttggggtttggctttagcagcagtaagagcctccgtatagaagagaagcgcctccttgtacttgccgtctctgtatagctgatgccctctctccaccttccctgacgccatcgatgccatactcggggagacgaaactgtagatttatcaaaatgctaacgagtaataattgtagaaaaaaca

SEQ ID NO: 160645 - DNA, 136 bp, Arabidopsis thaliana landsberg
agcgaaggtgcaacaagcgaaggtggaaaatcgccaactatttgggatcacttcagccacacctttccaggtctctttaaattttaataattattttttttgctcggaatttttgtaacattatggtatatacata

SEQ ID NO: 160646 - DNA, 223 bp, Arabidopsis thaliana landsberg
agcttcacttcctcttctagggatactattgatcttagaataagcatcaactttgaaactagctgcacaaagaacaccttcactatcaatcctcggcattgccttcatcatattagtcggatggtcaaagctcttaagccctgtctcactatgaaacatacatcctgcaataacaaaaacacaaaacacacatcaagatctaaactcaaaagtatgtttcttt

SEQ ID NO: 160647 - DNA, 516 bp, Arabidopsis thaliana landsberg
aacaaggtcaaccactgagacgtttggtgttggcacacggagtgcaatgccgttaagttttcctttgaggttagggagcacaagagccacagctttggctgctcctgtagatgttggaacaatgttcaaagctgctgctcttgctctccttagatcacggtggctcgcatctaacaacctttggtcaccagtgtatgagtgagtagttgtcattgtaccctttatgatccctaacaagtttaacacacaacacaatattactcagatttttacaagattgcaacatagcaacatttgactttcaatgagacgcttaccaaatttctggtcaagaaccttgacgaatggagcgagacagttagtagtacaagacgcattgctgatgatcgtatcttcatggctgtaaagttcagcattgacaccaacgacataagttgggatgtcaccttttccaggtgcagtgataagaaccttcttggctccagcttcaatgtgtttccctgcaccgttctctat

SEQ ID NO: 160648 - DNA, 590 bp, Arabidopsis thaliana landsberg
tgtgatgtgtattgaataggtgggagaagcggtggctctaactagaagagtggttttcttggttcagggattttggtcatcagcattggtcaagttatattgattgcaagaaagtttactattgaactagatgatctcagtttgtactatttttctttaggccttgtccatctttgactctttaagtactggttcatgagccttggtattattttggaattgttttttttgtaaattttatcttttaccaaaaaaattacatccatctgactacaaacatgaacacgagagagaacctaataaatgaagggtttttataggacccgtggttggaagggagaggagtcagtttgtgatagtctgagctgcttcaagtctaagagaagttgtagaggcatgattgatggtgaagatctgtgtgttccgttaccgtattagtagaacccttacctttgtattctggcattggacaatgagaccaacatgcaatggtttgactaaccattgccattcattggaggagaatgaccaaagctagtggaaaaagggagccaaatcttgtgggagaacttgcattcgaagaatagttg

SEQ ID NO: 160649 - DNA, 140 bp, Arabidopsis thaliana landsberg
tgtgatgctaacaatcaagatgtgatcagaagtcactaagtcaagccaagcaataacaggttttggtgtgttctagcaaagctaagtgaacatgcataaaacagaaattcaagcagaaacaataaaacactcgaccaaca

SEQ ID NO: 160650 - DNA, 279 bp, Arabidopsis thaliana landsberg
tgtctctctgcctctctctcattaagaaaaaaaaagagaatcagagaagaaataaaaagaaagcaactcaaatctttaacctacaaaaacccagatttgttaactctctcattcttcttcttcttctgaacaacatttgatctttttgattctcaaagtaaaagagaaacacactttgttgtctcaacaagcaagcaagcaaaacccatcttgggaaaatctgatttctttcccaagaaaatctcattttttctgtgacaattttttcctaagaaaatg

SEQ ID NO: 160651 - DNA, 362 bp, Arabidopsis thaliana landsberg
attacaatgcctaacttctttgaattccaaaccctttactacactaacactttttgtatcccccttaagaactctaaacttttactctctttttttttctttttttttcattcccattctcttttccaatcattccatacatcatcccaatcccaaatacaagtcaccacctagtcctagctaactcaaaaagcgtgggctaggtctacatgaaagactggtctttgtcggcccatacctaacacgttataccaagctcaatcaaaaaagacctcacaatcacacacaaatgatctttggcttgaaataaggctaggctaagggtatgggaaactgctctaaaaatgagagacagctacttg

SEQ ID NO: 160652 - DNA, 164 bp, Arabidopsis thaliana landsberg
cattatacctacaaaaatttgaacttaataataaaagatcaggtaacaactgttttaatagaacattatctcccttagttaattacttatgaaaaccaagattagtactttataatctccacctccgaagatgttttaaaaccctaattctaccgtaagaatct

SEQ ID NO: 160653 - DNA, 378 bp, Arabidopsis thaliana landsberg
aacgcacgagaagattccggcgagagatccggcgaagagctccggcgaagtgatctcgtttctctttggagaatcccgcattctcttatcttccaatttctttcgtagtgtggtgtgaactcaaagacaagctccgtggaagtcacctcctctacttcaaattcaaatgtgtatatatgctctactaaaagtggatatataatataatcgtttggtgtacactgaactttgagatcattctgttcatccctgatgtcaatgtcaacgctcatccatctcctatcataactcatttcttcattaaccataacaagcatgatacaagccttaaatctcaaggttgtaggaagaggcgactccttcaacttgattttcaag

SEQ ID NO: 160654 - DNA, 278 bp, Arabidopsis thaliana landsberg
ggggggggagagggcgggggggggggggggggggggggaggggggccgggggggggggggggggggggggagggggagggagggggggaggggagcaggcggggggagggggggggagggggaggggggggggggggaggggggggggggaggggggggacgagggggggggggggggggaaggggggggggggggcggggggggggggggggggggggaggaggggggggggggagggggggaggaggggggggacgggggaggggggggggggggg

SEQ ID NO: 160655 - DNA, 132 bp, Arabidopsis thaliana landsberg
  unsure (1)..(132): unsure at all n locations
aaagggggggggggggggggggggggggggggcggggggggggggagggggggggggggggggaggggggaggggggggggggagggagggaggggggggggggggnggaggggggaggggggggggggggg

SEQ ID NO: 160656 - DNA, 216 bp, Arabidopsis thaliana landsberg
  unsure (1)..(216): unsure at all n locations
atccaaggtaatgcatgattgcttcagctgataagaagattcaagatagtggcatgatgaactctcatgaaattccggcaagtgtcttcagccccatgttggccaaaaaagttgattggtttcgtgctgtgaaggattttttcnnnnnnnnnnnnnnnnnnnnnnnnnnnnccatgtccattagccaattgaaattaatgataacgcagaatttac

SEQ ID NO: 160657 - DNA, 277 bp, Arabidopsis thaliana landsberg
cggaaggacaccagctgcggaagctcttttcaagtgtcaacattttgtgtttagacgggggcgactataatctcagcgacgtgagttgctcttaagagttacaacttacaacaatgtaactatgactttaagcgacatacgtggagatacatatttatatatatcttactattatgaaggatctgaactattagaatggccatgaattctgatttacatattaatagtggacggcagaggcaattgttttccgactatcaataaaaaattgtctctt

SEQ ID NO: 160658 - DNA, 112 bp, Arabidopsis thaliana landsberg
tattgtctaactagatattatcctgcggtatatcgcggacaggtttatattttagttaaactaaaaacactttttttgtaaagataatttataaatatatgatattatttta

SEQ ID NO: 160659 - DNA, 115 bp, Arabidopsis thaliana landsberg
gtcaaaacaatgacgtctaaggaagcactcaccagaggaaatcaaagctctgaactcagaatcgatcaccaaacacttgcatattatcaatccagaaacgagaaacgcttgaatt

SEQ ID NO: 160660 - DNA, 122 bp, Arabidopsis thaliana landsberg
tctatactccgtccgtcggggcaagagccaggcctcgatgagtaggtaggcgcggcggtcgctgctttacctatttcgcgagcccgggcggtgcggccgactgtgcagatcttggtggttgt

SEQ ID NO: 160661 - DNA, 431 bp, Arabidopsis thaliana landsberg
tttttgtggcgtttcacagagagagaaagaaataggagattgtttttgcttgtggtgagagaagatcgcatcgtgtgggtagcgtttcaaacaagtaaaaaaaaaaaagaataaaaagtttccgtcactttctcgaggaagaaggggttttggtgtgagtcctttctttgcgtttgtcttttcattttccgatctcgtaattgtcgtgttattcgccgggaaagttaaagattcagatttaaaagggtgagagattttacagtcattttttttttagtcatcctgattctgtctttgaattttcataaaccaaggagattttcgttaccttggtctgaaaatctctgggtaaatcccaaattttacgttttttaaaaaattcgtcgatttttatctttcatcgctttattcttcgatctgtaaaatccgat

SEQ ID NO: 160662 - DNA, 190 bp, Arabidopsis thaliana landsberg
gtttctctcgacttcactaaaccttctctattcacaatcacacgcatcactctctcttcacagattcctctaaccatggccaccaccataaacaaaacagttcgtgtcgcagctgctcagatgacatcagtcaatgatctaatgaccaatttcgccacttgctctcgtctcgttcaagtaatcctctcca

SEQ ID NO: 160663 - DNA, 74 bp, Arabidopsis thaliana landsberg
ctcaacatttgcatattgtctacttttagattatgatatctattggaactcttactagctcattcatccgtcgg

SEQ ID NO: 160664 - DNA, 202 bp, Arabidopsis thaliana landsberg
acattgtgtaacaacctgtcccgtgggacccgccaacaggatgccacgtggcagagtgtggccacatgggcgggtaccacgggacgggttgttactctgccacgtggcatcctattggagctgcagcgcatcgaccctaacctctctccttgggccaccaaatccaccaggtaggtcattggtgcgcttggcgttcctcgaa

SEQ ID NO: 160665 - DNA, 111 bp, Arabidopsis thaliana landsberg
  unsure (1)..(111): unsure at all n locations
tctttttttttttttcttttttttatcttttatttttttttttttttttttttttttttgtnttttcctttttttttttttttttttttttttttttttttttttttgtat

SEQ ID NO: 160666 - DNA, 170 bp, Arabidopsis thaliana landsberg; identical to SEQ ID NO: 59484

SEQ ID NO: 160667 - DNA, 146 bp, Arabidopsis thaliana landsberg
gcttcacgctttgctctcaatgaatgaatacgactttgagttactttggctttgaattttgtgaatggcaaaacacaatcagtatatggctttcagtttaactttgctagctttgagttagcttcattgtgaaagctttgtgttga

SEQ ID NO: 160668 - DNA, 332 bp, Arabidopsis thaliana landsberg
gcggtgcgggtggtttcctttatggcggagccgctccatacagatctaggtataactttattatcagtttctcgttttggaattgcttttaaatttctttctctgatcttttggatagagaaaactagagatttatgggtcatagattttgataatttctgcggaactatagctctattgatttgtatttgtggctgcagggaagggcttagtactagaaatgctgcaggttcagaagaaatccagctgaggattgatccgatgcactctgacctggatgatgagatcacaggtctccatggccaagtcaggcagttgaaaaatgtaagaaa

SEQ ID NO: 160669 - DNA, 144 bp, Arabidopsis thaliana landsberg
aaaataacagaatgttgaactgtatattcacaacgcaatttagcccctattgatccttgtgtgtacccatccatgcaaatcacacattcattctcctcctcctccatcgtccatacgttcgaattatatcgaagcaacttaata

SEQ ID NO: 160670 - DNA, 191 bp, Arabidopsis thaliana landsberg
cgggcggatctgggtgctctagcattggaaggtaagaggtagctttcgtatccaaattcttctacacacttatgcgacaccatttctcagaatgcataacacgattatgtgattgccacaaaagaagattgttgatcaatggcttattatcacaccaatcaacgaaattctgtaaatgtaattcgcaatct

SEQ ID NO: 160671 - DNA, 362 bp, Arabidopsis thaliana landsberg
cttcatctgagtctgatttaagcaaatccgagcttctagaagcactgaggcgttcgcaaacgcgggctagggaagcggagaatatggctaaagaagcttatgcagagaaagagcacttggtgaagatattgttgaagcaagccgcagagctttttgggtataagcaatggttacaactgcttcagctagaagcactttacctccaaatcaagaacaaggagattgacaataagaacaacgacgatccaggggtttccatcccttgttggagcaatggcaaagcaagaaaagaggggagaaagagaagaagcaaaaggggtaaaccgaatggagcaaagtacgcggttggtttagcattgggg

SEQ ID NO: 160672 - DNA, 132 bp, Arabidopsis thaliana landsberg
aggcctgtatgttggtgtcggaggcttatgctctggtggtggcttgataggtggactatatgtaaatgtcggaggcttatgcactggtggtggcttgataggtggactgtaagttggtgtcgaaggcgtatg

SEQ ID NO: 160673 - DNA, 313 bp, Arabidopsis thaliana landsberg
actctcccagactaagcttttgcttcccctcaagcaaaacaaaaaagccgaacccgtggaagaggttttgaaaacaaaggaactcccaacattctctagcctattgccatgattattcaaactaagtccatatgcctaacaagtgtaatcaaatcctaaccaacatgtacttctctgcaagcttacacaacattctagattccatacctaagttccacaactatatccaccaggctttcatcgctgggtctcatcaaacaagccaacattcaagatccttgtagactcattcctgtacaataccatgataaat

SEQ ID NO: 160674 - DNA, 90 bp, Arabidopsis thaliana landsberg
  unsure (1)..(90): unsure at all n locations
ttttttttttcttccaaaaaaaaaaaccagagaagaaagnagcttaagaaaaaatctccttgccagctaaaagattgatggagacgcgtg

SEQ ID NO: 160675 - DNA, 365 bp, Arabidopsis thaliana landsberg
ttgtggtgatgatgttgtctcaagcctgcaacaagtcttgatgattcaaattaacgtaaaacgaagtgaacctctaatccttatccactaaatttgaaacattgttatcaaattaaaacctgaattcagctaaggagaatcgatatttgggtcttaaaaaaaggaaagccacatgattgttgagattaatcctttgaaagttcaagtctatgggtcaaactcgtttcatctacatagcatcgagattcctgttaatcgaatctcgtgttattgacatggtatataggatggatatagatctgtaaaaaggtttcaaatgcatatatttaaatggccctgttattatggacacaaaaaattgtttg

SEQ ID NO: 160676 - DNA, 167 bp, Arabidopsis thaliana landsberg
agaagactgcattttatttacgaaattgaacttatgatacaatatctcagcttgccgcaaagcagtaattttcgaatctcaccattcccatttatgtgtgtataacaaaggtagatagagaagaaacccatacataaactgatcaatgggaaaattcctctttaaga

SEQ ID NO: 160677 - DNA, 100 bp, Arabidopsis thaliana landsberg
cccgacttgcagttgaatgctacgaacaggtctctctctctctctctctctctcgctctccctctctctcaaactctctctctctctctctctctctctc

SEQ ID NO: 160678 - DNA, 246 bp, Arabidopsis thaliana landsberg
ctatatcttgattaactatgttgcgccaaacgaactatggatacaaggtaataaatataaaaaacttttctttttatgattctgaaccccgagagttatatgttttaatgcctattcgtttacccataatcggtattgggatatatccagattctgtgctctcattaacaagtgacagggtcggatccattttatataattattcctatggctaggtttcaggaaaaaaaccagccctacagtgaa

SEQ ID NO: 160679 - DNA, 102 bp, Arabidopsis thaliana landsberg
gacccaacgaaaatcatagggctataaccaacctatatggaatatgctgatgatttgagtctctgtacttctttgccagaccaaagtcgaggacgtatacct

SEQ ID NO: 160680 - DNA, 355 bp, Arabidopsis thaliana landsberg; identical to SEQ ID NO: 43013

SEQ ID NO: 160681 - DNA, 278 bp, Arabidopsis thaliana landsberg
gaatcattccaatgaacacaaacggagacactttgagaaagtaaaatctggatggagaacaaatttgaactcatttattatcaaaaacaaacatttgcttcttctttttcgtgaacaaaaactcatgtctatcgatccctacaaaataagttatcctccatagatcttataagactccaaaaggtcatcttctaactctttggtgcagtcttctctttcgccttctgaagcttcaaaaccttcttcacaatcttctgttcttcaaccaagaaggccct

SEQ ID NO: 160682 - DNA, 86 bp, Arabidopsis thaliana landsberg
ttttctttttttttttttttcttttcttttttcttttttttcctttttttttttttctttttttttttttttttttttctcttttt

SEQ ID NO: 160683 - DNA, 433 bp, Arabidopsis thaliana landsberg
acaataaatacttcgatatttatttccgtaagccactagaccaacatttagaggccggttttgaacgattgatgtgacaaccaaatttccaacgatagtacgacacgaaacaataaaagacttctttataagtatagcgtaacatgcattatacagtttttgaagtataattttattttgataaaataaagatagaaaggttcattaactaattgttaaaggtggcaaggaagctgacagggcctttgccggtaaaggccgcctgaagagcaaagatgagaaatgcgaccatagcgagacgagagtgctttatctcagccagcttcaaagtatccaacttctctggatcagccgcgagtcccaacgggtcaaaatacccacccgggtaaatccgtttctctggatccagttcagagttacgttggaactcaat

SEQ ID NO: 160684 - DNA, 84 bp, Arabidopsis thaliana landsberg
ttttttttttttttattttttttttttttttttttcttatttttttttatttttttctttttttttttttttattttttttttt

SEQ ID NO: 160685 - DNA, 228 bp, Arabidopsis thaliana landsberg
tactcagaaatgagatctctggtttttcacagaagactggtgaaagcttctatgaagcatgggagtgtttcaagggctacaccaaccaattctcttatcatggtttcaagaaagcctctctgctcaacactctttacagaggagttttaccacacatcagaatgcttctagataccgtcagcaatgggaattttcagaacatatttgttgaagaagactgggatttgg

SEQ ID NO: 160686 - DNA, 430 bp, Arabidopsis thaliana landsberg; identical to SEQ ID NO: 63663

SEQ ID NO: 160687 - DNA, 259 bp, Arabidopsis thaliana landsberg
  unsure (1)..(259): unsure at all n locations
cctctcctcccttcctcctcctccaaacccaaaagatcctccgtccttgtcgccgccgctcagaccacagctccggccgaatccaccgcctctgttgacgcagatnnnnnnnnnnnnnnnnnnnnnnnnnnnnnnnggttttttattctcaaggagaagtttcgaaaagggatcaatcctcaggagaaggttaagatcgagagagagcccatgaagttgtttatggagaatggtattgaagagcatgctaaaaaatcta

SEQ ID NO: 160688 - DNA, 344 bp, Arabidopsis thaliana landsberg
cctcctctatggctgcctggatcaagtgaactggtcgagtagaatgctctgctgcttctctccttgtttgatagagtagagggtcaagtagaaatccttgtaagctccttctgcacctgaaaacttactaaaacatgcaatatgtatgcaagatgatcctcaatgcatcagtatgcaaaataagctaaatgtgatacaatgagtgatcactaagctaaatgatgataaatacacacctaaaatgagtaaaatatagtgttatcaacttccccaagcttatctcttgcttgccctcaagcaaacaaaaaatcttaagttgaaggagaggtttgaaggtggggatt

SEQ ID NO: 160689 - DNA, 394 bp, Arabidopsis thaliana landsberg
ccaatttggacatgatctcaggtccgttgatacagaagaaaaaggcacccgtttcattagccacagcacgagcgatcaaagtctttccagacccaggtggtccataaagaagaattcccttcggtggcttaacaccaatcgacttgaatagctgtggatgcctcaagggaagttcaacaagttccctaatctgagccatctgtttcctgacaccaccaacatcatcataacctacatcatctagcctttcttcatcctctctcttcacaggctcaccctcacagaaaatctctgtgtctggagcaaccacgcagtactcagcaggatctgtctctataactttgaactccacactcctcattcctcctctgactaggaagagatcacccttcct

SEQ ID NO: 160690 - DNA, 97 bp, Arabidopsis thaliana landsberg
tctaagtccatatactcaaagactctaccagagagtgagtgtattgttgatgaaataaaaacatttggcagaatattcgccatttcccatcttcatc

SEQ ID NO: 160691 - DNA, 318 bp, Arabidopsis thaliana landsberg
tagccacacaatctaataaataaaactcaagcataaaatgttaggagtacaaatttcgatacaagacctaagtaaaagataaaaagtaaaaaagtattgggttggctcaaaacatgccaagacaaactactactgacaagctccttaccaaaaaaaaaaaaaactactactgacaagctcagtacttaactggcgcaagaatatcgagctgtgctccgagcttctcttcaacgaccttctcggccttaactctaagtttgttaagttgcttctttcgctcgtaaaccacgtgggctctctccttcctctttgtctcca

SEQ ID NO: 160692 - DNA, 119 bp, Arabidopsis thaliana landsberg
ggtcagattctatcggatcgaacttatgggacttaagaatcatggaaaggaataatatccaggaggcaatcaaatcaagcaaagagagagccaataaagaaagaataagtaaatcgaaa

SEQ ID NO: 160693 - DNA, 226 bp, Arabidopsis thaliana landsberg
  unsure (1)..(226): unsure at all n locations
cgtactccgagttggaatcaatgcgtttcgattgactcgatgtgcttctaaatatcatcgaattggcgtttgaannnnnnnnnnnnnnnnnnnnnnncagctaattcgtctatggatttcaaaaattgaggctgcttagattgaccgatcgtaatgtccatacttgtagactctgtttcgacaatcttcggtaattctcttcgtcgctgttcagattgatgtaaac

SEQ ID NO: 160694 - DNA, 272 bp, Arabidopsis thaliana landsberg
attgaatgtacttttaaaaatacataagtattgtcttgcccaataaacaactcatcatcattgacataaaagtagttcaacacacgaaaagaagaagacaacatcaaattccattgttagttcttcctttttctagacaacaaagcctccattggctctaataacttgaccgttaatccattcaccaccatcaccggccaaaaaccctacaatctcggttatatcctttgactcaccgatcctccccataggacaagcccctgcaagcatct

SEQ ID NO: 160695 - DNA, 137 bp, Arabidopsis thaliana landsberg
catggattcatatcgatacagaagccaaggttctctatcgattcacccagtgctgtacttatggtatagcgatagaggagatgatataaaaatcgaagctttcacatagtgattttttatttttttcttgatcaaca

SEQ ID NO: 160696 - DNA, 1132 bp, Arabidopsis thaliana landsberg
cacctgatggcgtcagggaaccttccgtgggagttggaggaagagatattgtgtcggcttccacttggatctcttgttcggctaagatccgtatgtaaacactggaacgattttttcaacgacaaatggttcatcaagaaaagcttgggttgtgcacgtcctcagttcatcttcattaccgattccaagatttattcgatagagatcatcggtctcgacggcgttgatccaacgattaagttacatgtgctagactcctctggtatcccttaccgtgaatggaaatttgcttacttaaccatcactgcttgcgatggccgatgggttcttgttttgtaactcttggattagtcccaaggggacagctttttggaatccgtggttgaaacagattaaatggatcgagtacgagaataaaggtttcaatgtatgtggcgtaggatacgataatactaggcctgagaaggtttacaaaatcttggggtatttagagtgtcgccgtgaagagagctcgaacgcatgctaccagagagttgcgatctacgagtgtgcctctcatgcgttcaagtttattgatacttctaacaaggtctggttcataagcgatgttcaacgatacagtgtgtgcttgaacggaaatctctattggctttcttttgatgactttcgcatcctatgctttgatttctcgagggagatagtcaaacccttttgtctccttccgtgtcggaagtttgataaatgcgatttacttgccctccaagttttcaagggagataggttatccttgttaaatcaatgttgtaagacaaggacgattgagatttgggttacgaagaagaagattgattctagtaacaacaatggatcagacgaagttgtgtggattagcttgttgactttgccaccaaataacttgccaaacttatttattgtgtgttatggcattagttacttcatctatgacaagaccaccttaatcatttattgtgaagacgagaacacttcagcggcttgcatctatatcatcaggggagatttgttcaagaagtttgaaattgattcctctgctttcttttgttatcactgtgtttatgctcccaattttatccctcttcctttaatgtaaaag

SEQ ID NO: 160697 - DNA, 332 bp, Arabidopsis thaliana landsberg
caaaattgaaaccgagttctgaggtttggttttagtttcaacttttcagttatccacacacatacacacagacgctggcctgaatttggtgacgttagtcttcttccttccttctcactctttgtttcgccgtgaaaatgagctctgatagatagaagcgacagagagaaacttgaagcagacgtcgtctttcttcaaatccttcgcgggaaatcccagggaagctgctgcaatggcgatggttcaatcttcatcttacagagtatgtgaatgaaaatttgattactatgaatccatctctgctctgttgactctttgttttgtgtgctggg

SEQ ID NO: 160698 - DNA, 466 bp, Arabidopsis thaliana landsberg
ttctctttttactattttcttctgctgtttctgctacaaaaagtaaaccatccatgagattgacaactcccaagtttacatcataatatacaaaccttctatacattcaactttagttctacaagcttctgtacatggcaaatacataatttgaaattacacactgacgagggaaatgatactgagatatacagagagaatactgatttaatcataacaaatcgaaataggaatatttggggattggtggtataaacaaatgcgaagacggtttagggtttctatgcactgaatccacggttaagcgagctccaaggaccagttggcagtgtggtacaagcctgtgaagctgcctcctccatttgctccatttgaatccctgcattgcagatgtttgcaaaagacctcatgtgcttgataccgtactgagacagcgatccacagtgcctctcgaaagctctcacct

SEQ ID NO: 160699 - DNA, 195 bp, Arabidopsis thaliana landsberg
tcctgaaaatctataaaagacatttcgcatttatccacttcctcgattcaatcaaaactgcttcaagtaaaaagcctacgaaatagcatcggaccaaaagacaaactcaccgagtaaacatacgcaacctgtcgtgtaagtaaaaacaatttgatagtgactctctatgtttggtggaggaagaggcctatgggt

SEQ ID NO: 160700 - DNA, 323 bp, Arabidopsis thaliana landsberg
aatggcggttcgatatactcatcaggttcttcaggcactccatcaagatcttttccatcccacacgtctttccttgttgcacatttcgagtggatagcataatggcatcccttatcacaagagtattgcccgtagttgatatctacggtttggcgacaaactccacaagagaactcaccaggttgaagggaggaagtgagagagagacgatgtgggtgtcgggtgatcttaatgacacgaggtagatagatacatgttctgtggaccataaggctgcaagggagacaagcataaacaagatcttcggcgtcacttagagacaa

SEQ ID NO: 160701 - DNA, 288 bp, Arabidopsis thaliana landsberg
gataatttattgagcatgtcaatcacctataaactgaggaaacgaaactactcaattaccccatcctcgggaattttgcatccaattgatttctttgttaactctgctattgtttactgcatcttgttacttgttgcttagtttttgtatttttctccttttactcgaccttatactcgaccacccagttgtctggcaacagactgtgcagtcgagtatctctgttacattttctgtctgttactccacctgtcactcgaccacacccagtgattggcaacaagctgt

SEQ ID NO: 160702 - DNA, 99 bp, Arabidopsis thaliana landsberg
ttgattggttccttttttggaaattaataatgaatttcgtttttctaattaaattaattaaaatttagatatcaaatcttatatgttgattttgattgg

SEQ ID NO: 160703 - DNA, 172 bp, Arabidopsis thaliana landsberg; identical to SEQ ID NO: 2789
  unsure (1)..(172): unsure at all n locations

SEQ ID NO: 160704 - DNA, 174 bp, Arabidopsis thaliana landsberg
ataaaatagcaatgagctttttcgaatgtttggtttgttttagacaacagacaatataatcaagtgctttactttatgcaacttatagaaacgttgaggtatctttagcaaatattcccaacttacaacaatagtatatgattagctagagtctcaaaagattgaaaagatgag

SEQ ID NO: 160705 - DNA, 361 bp, Arabidopsis thaliana landsberg
ttcttacgtaaccaattcttgccattaaattaaattcataacaaagaaacaataaacttggtttggcggtgataatgaacacatcatcataacatattcaacattatttttattcttccgccaagattaaaccaaattaacaagccttaaggggagttccacaaagacagatgttgtgagcgaaggcagatggttcaaaggtctgaaggagaccgccacttgggatttttccgcagagatggttgtcgctcacgttgaaatgctcgaggtgtagtttagtcagtgctggtggtatcttcccgtagatatggttctggctcagatccaacgaaactatgcttctagcgaacttaaccttgac

SEQ ID NO: 160706 - DNA, 381 bp, Arabidopsis thaliana landsberg
agaaaaaaattctcaaagatatgtaaaaggatagaaccaaaacttttaacaccgctaatattagtcgactttgtgcaatatttagtcgacttcctccatcttgctaccttcagcatcagcatcatcttcaagcggaggcatctcagcatcagcttcaacggcatcatcctcttcaatgctcaatccaagcttcaacatcctgtggattctgcttccaaaagtgttgggctcatcaaggctgaaaccacaggtgagaagagcggtctcaaagagaagaagcacaagatccttcacagacttatcgttcttgtccgcttcagctctctttctcagctcatccatgatcgagttctctgggttaatttccattgtcttcttgct

SEQ ID NO: 160707 - DNA, 178 bp, Arabidopsis thaliana landsberg
agtccatttgcattgcttcgtagcccgctgtactgcaatgacacatatctcgcatatctcgccgcaccgtaatgccttccgcaccgatttctggttcaagcaattccccatgttcgattaatcagagcctaagcttcgttcacactgttcctcatagtcataatccttccatacgtag

SEQ ID NO: 160708 - DNA, 179 bp, Arabidopsis thaliana landsberg
atatcccattatgctaatttagaaaagattatatcaaaaccaaaaatgttatgtggtatgtataatgttactatattttaaatattaatgtgttagagaatgatataatttgcaaaacttttatctataaaaaataattcttaaattttaaaaattactactttaaaaaaagaaatcac

SEQ ID NO: 160709 - DNA, 91 bp, Arabidopsis thaliana landsberg
tcatgaatggcaaggagatctagtcaaacacatctgggcgaaattcagaatattcagaaattaaaaagatttttatgtcgctattttttgt

SEQ ID NO: 160710 - DNA, 494 bp, Arabidopsis thaliana landsberg
aaaatataactatcgtgatctattaaatttaagtctaataatagctagtggttacacatgtttagaataacacattaacttcgtttcttgactaattttacctcaaaacaaaaaaggtaacaataatgttatcccatgagaagagaagcaagaatctctcccatggttttctcaggcgtgtctccgttgtcatctacgtgaactccggactctagaaccgccgcatcaagaactagtttccgcttcgctatctcgtagatgttctcatcaaccgtcgatttcgtcaccagtctgcaccaacatttgccagagttaatatgctatctctaaaacgttttcactgggccaaggatttaaagctcaaacctgaagatagtgactggttttgtttgaccaatacgatggcaacgatcttcagcttgccgatcaatctgtggattaaaatccatatcgtgaataatgactgtatccgccccggttaaattaagaccttg

SEQ ID NO: 160711 - DNA, 392 bp, Arabidopsis thaliana landsberg
  unsure (1)..(392): unsure at all n locations
agcatgtatcctctggtgtgtggtattgtaaaatcacgttcaagagtttcccacgacagattgtttatgttcccgttctgttgcgcaccgactcgtaatcagagtcgcggtgttgatccggtaacgtctcgcccgtcgctgcttgctttagtctgagtaagtctcagactgacacgtctcttaagaaggctaaatgcagtgttctctccgtcgaggtttactctcgccgtagtgcgtcgtgtgtatttgtctctgcttccggtgagcagcttattgctcggttccaggttacgcttgatttgaaggtgccggagtcaaactccccctgcgccccaacggttgggttgatttgggaaataaaaaagnagtataaagcccgggtcggatcctag

SEQ ID NO: 160712 - DNA, 230 bp, Arabidopsis thaliana landsberg
aatatcggttgtccatgtcgctggaactaagggaagaggatcaacattcgcttttctatctaatatcttacgagctggaggatattctggtgggtgtcagcctacgtagagcattgactatggattaaaggcttactggattttgagtctgaatcgggcatgggtactatacatgagtctttcgatgtatattgcagcccacatattctgaggatcaaaaaacgtaatgc

SEQ ID NO: 160713 - DNA, 284 bp, Arabidopsis thaliana landsberg
gatactgccaagtttttcgctttctcagctcttccttcgatggtaatcttcaaattcctttcctttagacccttattaatcttattgcttttgtaatagacttggtttagtgtgtttttttgtcgtagcgagtttaatcttgttgctggttattgtaaggttggtgctttgaatatcatgtcagagactggtgatttatgtgtagcacttcccaaagatgatcccttttatcaccacaaaaaggttcaatttcctaatttctctgctcttctgttatctcaata

SEQ ID NO: 160714 - DNA, 163 bp, Arabidopsis thaliana landsberg
agttccaaagagactttattataatgctaaacaagtttgggggtacaaaacattacactttcgagggtgatgatacgctataacaaagatcaaaaagagagctcagaagactaataaactgtcttttaaatagaaaagaaatacaaaaatgaaagaacaaaac

SEQ ID NO: 160715 - DNA, 554 bp, Arabidopsis thaliana landsberg
ctttgaaatctacaatatcataaagttcacggtttaaactcctcaacaaacgacattatagaagaaaaagcattacaaataaaacaaaatcgtctagtacagtaaaaaacacactgccatatgagatgaagaaatccatcggtaccataccagaaaatataccggttaagtaagaacgatagccaattactctttttacatatacccttgaacgcctcctccctccatataataagcagattcaaccaacgataattgctcaagagaaacgtacgtagtctaaacctgttacctttgcacgccactgtgagaaatcatcggtatggtactgaaatttagaccaattgcggtttaaggattaaaacatgtattaatcgagaaatagaatatgttttgaaaagattagctaacctcagctactacccttttgtttgagggtgattttgtccccaagacttagggcaatcccttgcgtcttgctccttatccttatgtaaccactcaatgctccatccgtttgcttctcaatactcacattcacaagagcatcctca

SEQ ID NO: 160716 - DNA, 319 bp, Arabidopsis thaliana landsberg
gctttttaatatataaaggttaccaaaattcaacattttttgtattattattattcttaagaaaaaacctataaaaataaaaataaaaaatttgtaaaattaagcgtcaaaaatagtatccctttattattaaaagggaagtacaaattgaaattttgtctaatttggcctcaattttaattttaattttggattttgttctttgctattcaaaatcattaaggataatttggtcttaacaatctcctaaactttatatgatccgatgcaatctaaaccgttcaataaaattaattcccttcaatctaaaccgttcaac

SEQ ID NO: 160717 - DNA, 266 bp, Arabidopsis thaliana landsberg
aacagatatatagcgtcatactgcctaaacaatttgcctaatcttttcaagcggtgacattgtctccttgatatgtaactgtatgtttaattatcattcgccatcaagaatctaattctgtatatatcaagatttgagcccttgcgggacaaggacaacaaatgctcaacaatattgaacatatatgagtctttatctttataaccaaaccgaataaagatggcattttacgcagtaaagctatgtgaaatgaattatggaggaga

SEQ ID NO: 160718 - DNA, 220 bp, Arabidopsis thaliana landsberg
tttttttttttttattgtttttgttttttttattttttgttttttttattatatgtttttttttttagttttttgttttatttgttttttttttttttgtttttattttttatttttatttttttttttttgattttttttttttataattatttttgtttgttttttttttgtgtgattattttttttttttatttttttttatgtttttttttatttt

SEQ ID NO: 160719 - DNA, 655 bp, Arabidopsis thaliana landsberg
ttggtttcttcgtcataaattcatattattgtttgttagcgacatgtttttgttttctagtcatatattcacattatagatgtttactaagatagcttaaaatattgtaaaccagagggaatattaaagggacccgaatattaaacatcggactactttcttttctagtccaaaaacaagagcactgatacatttttattcgttaaaatgagaacatagtactcattaaaacaaaaagggatattgcaatgaaaaataaccattggtcacgccatatctaccagcagaaacgtcctaatgatatatatagcatcagatgtgtttcgttggtgcaagaacgaggtgttctttcttgtgcatagcgagtccagtcatgacgtccatctttatatcctctggtttaatccctttaggtagactccagtcaaatttgtagagaaggttagcgaaaggtatctctaccattgcaatcccaagatgcatggccgggcacattcttcggcccgacccgaaaggtaggagctcaaaatcttggcccttgaagtccactcctttgtgctcgttcatgaacctctctggaatgaactcattagggttgtctccccacgcggctgtgtcacgagaaaccgcccatgcgttcacctgaatgatggtc

SEQ ID NO: 160720 - DNA, 291 bp, Arabidopsis thaliana landsberg
  unsure (1)..(291): unsure at all n locations
gcgatttggtcggagatttctccgattacattgattgggactttagtgaatcttcacagaagcaacttcacggagaacggcgagaagaatgtggaattgagagcgtcgttagaggatcgagaagcgtcggccgtttcactggagagatctagtgttgttcgttgatgaaggggttctaatttcgatacctaacggaattgatcattgataaggtctcattcnnnnnnnnnnnnnnnnnnnnnnnnnnnntgtgcacagatacgaccttgaggttagtttattccttaaaat

SEQ ID NO: 160721 - DNA, 72 bp, Arabidopsis thaliana landsberg
tgtcttcttcttcgatcctcgatttcatccacaatatacaatagccaaatttccgattttctcctcactgaa

SEQ ID NO: 160722 - DNA, 238 bp, Arabidopsis thaliana landsberg
tatgactagatttaaccaatgatatactgcggggacaatttattttttaaagttattatacgtaaaagtttgtaaattgtatctatctatataatatttttattttatagtttacaattgttattaagtaacgtcctgccaaacccgtcccgccaacccgtcccgtaaaaaaacccatttattttattaatgttgatcttatttatgatatgtttatgaattattgtctaaatatttt

SEQ ID NO: 160723 - DNA, 89 bp, Arabidopsis thaliana landsberg; identical to SEQ ID NO: 59267

SEQ ID NO: 160724 - DNA, 121 bp, Arabidopsis thaliana landsberg
ccgcaatcacctcctaacccgccagcgttaagccggtacgagtcacagaaacgacgagactggaacacgttttgtcaatacatgcgtaaccaacagccaccggttcacatctcgcagagtg

SEQ ID NO: 160725 - DNA, 176 bp, Arabidopsis thaliana landsberg
  unsure (1)..(176): unsure at all n locations
acacaaacactctagtctcctctctttttctctgccttctctcttttatttattccctccttccctctggtcctccatcagatacaacaacagagactccaagatggccggaggaggaggagagctcnnnnnnnnnnnnnnnnnnnnnnnngcggagaacggcggagaagagaagg

SEQ ID NO: 160726 - DNA, 195 bp, Arabidopsis thaliana landsberg
tcatcaacaagataatcacagtaacacctttttattcaatacagtagtgttaaataaaatctttctaggtaacggttacattatattttcatgttttaattttgtaaaaaaacttttatgaattattttttagtggcaagcctttccttaatcttatcaaccatcttagatcccacttgaaaagtcttagttaac

SEQ ID NO: 160727 - DNA, 280 bp, Arabidopsis thaliana landsberg
ttgatgctttcaaaccggttgtgatgatttcggtatttaaacaatctgaaaatgttttggcaagagaggggaaacgaacgatccgagcttttttttccggcggcaattgggagattttgtggaagatcatagttggttctcttctcgattcttaggggttttagagacttggtgctcttgatttcgagtgatcatacagtattacaaggcatggacaaatcgagtggtttggatttcatcaaccagatgttcccagtaggtaacttaatttgttttttct

SEQ ID NO: 160728 - DNA, 439 bp, Arabidopsis thaliana landsberg
aacaggggaagtgaatcgccaattaggtttaaggattggtgagaaggagaagcgaggagcggtggtgaagaggaagcgattagatccgacgagatgatcggaggaagaggaggaaggagggagacggagccaggtgttggagagaggatcgaaagcgaaggattggttgtggaaagaggaagtgttgtggataccgaagaggaagagccatggtggtgatgatggagaaggagaaggaggaagagaggtgatgagtgaacgccattgtttggagactagagagatactgactcatgatgggatggggagaagatttaggatggattatgtaactacgatctgtagattgtccaaagtagatgctaccgtatgaggctagtagaacagcatgtactcaggggtggggcaagcgcttttattatggttgatggagactctt

SEQ ID NO: 160729 - DNA, 178 bp, Arabidopsis thaliana landsberg; identical to SEQ ID NO: 73994

SEQ ID NO: 160730 - DNA, 140 bp, Arabidopsis thaliana landsberg
tgtgatgctaacaatcaagatgtgatcagaagtcactaagtcaagccaagcaataacaggttttggtgtgttatagcagttctaaatgaacatgcagaaaacagaaattcaagcagaaacaataaaacactcgaccaaca

SEQ ID NO: 160731 - DNA, 246 bp, Arabidopsis thaliana landsberg
  unsure (1)..(246): unsure at all n locations
ggcttcttttcacagaaagttatgtttgttccaaaacattctcgtatcgtgtctgaatttcactctcctcctcctctccctgtgttctttcgtaccaatcattcttcttagaaaccctccaacttcactcggtttagccttcctcgcagtctcactcgtctctctgatctcctctttcggtagtgcctcttcgcaccaatctcgatcatgtnnnnnnnnnnnnnnnnnacttcatgtttcctcact

SEQ ID NO: 160732 - DNA, 268 bp, Arabidopsis thaliana landsberg
  unsure (1)..(268): unsure at all n locations
ggggaggggggggggagggggagagggggggggggggagggggggagggggggggggaaaggagaagagggaagggaggggaggggggagggaggaggggggggtagaagaggaggtgttgtgtggggggggggggcgggcgggggggagngnnggggggggacaaacaacccgggggggnggaaaggagggagggggggggggggggggaggagggggggggggggggggggggagggggggggggggggggggggggggggggggg

SEQ ID NO: 160733 - DNA, 708 bp, Arabidopsis thaliana landsberg
tgatcaaacatttcatgataaactcaaaaaaaattagtgtaagaaaatcaacaacatataaatgcaccatccaaaaaaatacactcatgacccacttactacaagaagctgccgcattatagacgaaccaataaatctcagaaaaaaaatacacacacgcatggtccatggatgagagaggaaacggtattgagcaaagcaatgtgaaggattatagatatttgagggttttttgtttttttttcttttagtatccgtatatatgaaggatcaaccagccattttggttaggcggtgaacagtacttctagcgattctattcccgggatcaatctttagaaccatccttaggtcttcagctccgagtttgtatttctccatgctctcgtataacagtgctcgttgaaccagaatggtcacattcttcttgtcgtgatcaaatacctgcaatcacgttttcaaagtgaacaaaaaacatctgtgaagcataactgacaatcagaacaagtttcgaagatgttggatttgttctgagtctacaagaaaccatccatggagcctatcaaccaatcaactagcttcgatgacgcgatcccaagaacctgtcaggtgggggatattttcctacaaagcaagactctaaaactttctatacttgcacaggatttctaactggtaatctatcttaagattccaatagaacctaaa

SEQ ID NO: 160734 - DNA, 346 bp, Arabidopsis thaliana landsberg
actaactacattttaattcgcggtacaccgcggagacaatttattttttaaagttagtatatataaaaatttgtaaattatatctatctatcaaatatttttattttatagtttacaactttattaagcaacgtcctgccaaacccgtcccgcaaaacccatcctgcaaaaaaaaaccatttattttattaatgttgatcttatttatgaatcattgtctaaatattttagtcgatgcgggatgttgaacccacacatttttcgctaattggttaatatattttcatttttaaaattttgaatcacaaaatatgacggaactttttttgagtttttttaaactata

SEQ ID NO: 160735 - DNA, 302 bp, Arabidopsis thaliana landsberg
  unsure (1)..(302): unsure at all n locations
tgatgaattcgattccggtgtggagaaagctttgaggatttgtggatntgcgtcgtagagttttacttttgttgnnnnnnnnnnnnnnnnnnnnnnnnnnnnnnnnnnnnnggaggggaggttgtctccgatttgaccgtagtttactccgattgaagttgttgtcgtcgggagaatgatcaatgttagtgagatgaggaataagagagaagagcgatggaagctggtaagctccattggattccggcgagaatgccggtggtggagatgatggagttgaagagaagaagacaattgcagag

SEQ ID NO: 160736 - DNA, 96 bp, Arabidopsis thaliana landsberg
cttcattaaaatccatgggcatggcttcagagactccttccatcgaatcctttatcccaggtgctgccgcatccagatacgcattgtgatcaatac

SEQ ID NO: 160737 - DNA, 145 bp, Arabidopsis thaliana landsberg
caaaccaaaaaaaaacaaaacaaaaaaaaaaaaaaaaacaacaaaaaaaacaaaaaacaaaaaaaaaagcaacaacaaaaaaacaaaccaaaaaaagaaaaaaaaaaaaaaaaaaaaaagaaaaaaaaaaaaaaaaaacacaaaa

SEQ ID NO: 160738 - DNA, 766 bp, Arabidopsis thaliana landsberg
atcacggtatctggtttggatctgtacgttttagctcctggcgatattgtagaatctacatttgttgatttattcacgcttccatggtaaaataaaattcaagttcagatatctttcttattgagaggtgctaatgtcaccacaggatgtagctgtaaaattgatctccaaacaagaatattcagaagaggtcatacaatcttttagacaagaggtaatgtttttactttctagtcgtccattataattgctcggagtgtagtttttgcagaagacattttaaatgggtcttgctatactgtgaaggtatcgatgatgcaaagacttagacatcctaacgttctgctgtttatgggagctgtgactttaccccagcgtctctgtatagtgtcagagttcgttccacggttcgctctcatctcttttctttctgtgtgttgttggactttcacgtcatagctcctaatcatttgaattataattttcagtggaagtctcttccgtctactgcagagaagtatgtcgaaacttgattggaggcgacgtatcaacatggccttggacattgtgagtattagttatatgttcattagacatttaattatgagttgctctatgtgactacttgtttgtatttttcttgtaaatcttcttgttaactctatttgactcggtcaccgtacatctcatacaccatattacatgattcttcaaacaggctagcggtatgaattatcttcactgttgtagtccacccatcatccac

SEQ ID NO: 160739 - DNA, 143 bp, Arabidopsis thaliana landsberg
atcataatcaaaatcacacgatcgtagtcgtagaagcctttgcgttgatcgttacttagagtgtttaccattatcgtcacatcgtcatgatatctccgtctcctaccaaccggaatattcgtcaactcttccaatgcgaagcc

SEQ ID NO: 160740 - DNA, 262 bp, Arabidopsis thaliana landsberg
cgcgcgatttctcaagcctcagtcacaagacaatttctagttaatctcaagcaggtaattagctgcaacgcattcccgaacattagaaatcgaaaatctaccgtactttgttaatcttgtctagcaaattccaggacggaaaagcattgccggatgggcctgttgttatctctcctgatggtctctttccttcgttgtttcgggaaggtattctgtttcctctgcaacatatcaaacagatctcatgatttgttgatcttga

SEQ ID NO: 160741 - DNA, 251 bp, Arabidopsis thaliana landsberg
acaagttaccctacaaattactattgatgaggttctttgtatatatagtggttgttgcatatcatcatctccttttcgtttctatatatcataaactttctttatgtctcaaataaaagctctgtatggtattggtcttcttgagcaagtcatttatagatgacaaaatattcatgctctgttcttagcgatttctgtatcgatcgcttcaattttacctatgaaattgtttatacaagatttttttttgt

SEQ ID NO: 160742 - DNA, 90 bp, Arabidopsis thaliana landsberg
ttcattttattgtagatcacgtgattttaatgatttgttttgtagtaaactctatagttcgttaaagttaaaatattctctttgtacaaa

SEQ ID NO: 160743 - DNA, 221 bp, Arabidopsis thaliana landsberg
catccttttcccagctcttctacagcctccgtagggtcaatgcacggtcaagccttgaaagcacaacgcatatttccctctcccaagacatcggtcatgttgtagattcgatgatctgcgttcaatcgagtctgcatctctcaaaagtgttgaatcaccaattagcattatagagaagagcggtgacactcagcgaaagttgagattcccttataatcgca

SEQ ID NO: 160744 - DNA, 451 bp, Arabidopsis thaliana landsberg
tgtgatgctaacaatcaagatgtgatcagaagtcactaagtcaagccaagcaataacaggttgtggtgtgttctagcagttctacgtgaacatgcagaaaacagaaattcaagcagaaacagcaaaacactcgaccaacacagctctttgcaaataaaactccgatactcgactgcacagtctgttgccagaaaactgggtggtcgagtatgaggtcgagtaacaagaaagaactgcagaaattaagcgacagataacaagatgcagtaaacaagagtagagtaaacaaagaattcaatcagataaagaattcccgaggatggggtaattgagtagcttcgtttccttagtttacaggtgattgacgtgctcaataaactatccctagacaacaagttcattaaccaagtctaagtaccgccgcaaaagagactctcaagttaaactagtc

SEQ ID NO: 160745 - DNA, 278 bp, Arabidopsis thaliana landsberg
catgccacatcttactagtgttgttgtctcgacatagtctgatcttccacaaacactcacgttagtgtcgcattcctcacatgatgtcccaatatgtgtgattgacaagagagcaagagacttatgcgttctgtaagttgagacccagttctgcattaaggtcaagctcacagtattggccatctcccaaccgtgtcgctctacttttgtgtatcaacgcacgaatctgatcctataatcgacacacctctagtctttggaatgtcaataaaacatgc

SEQ ID NO: 160746 - DNA, 161 bp, Arabidopsis thaliana landsberg
aacctttctagaaagaactgtaagaatctctaatcgttctggtggggaaggaaagtcgcacaaaagaagacgatcaagccggccaggccttaggagggcaggatcaagtaaatctggtcaactgttaattgagtcatgtatccattataaagtcattatcc

SEQ ID NO: 160747 - DNA, 92 bp, Arabidopsis thaliana landsberg
atcctgaatgtggtaagaaaggtccccccctttgtgataggcagacaataaaggagaaaaaagaagttagtttagatgaattagtgaaattt

SEQ ID NO: 160748 - DNA, 282 bp, Arabidopsis thaliana landsberg
actgtgcagaagaaggattctcgtgcaacgacgcctgcaaccaaaaagtctgaacaagctcctaagagccatcccaagatgaaacggatagcaggagaggaagtggtgattattttgttgctttctctgtccatgatatgaggcattgacttctcacctgtattcatatggtatagattcctcttttcaggagtccaatacaaacgagcttggtgaagaactccttggtaagagagcatatgtctgacccacatctcacaagaagtatgttttattgttaat

SEQ ID NO: 160749 - DNA, 129 bp, Arabidopsis thaliana landsberg
  unsure (1)..(129): unsure at all n locations
atggggggggggggggggggggggagggggggggggggngggggcggggggagggggggggggggggggggaggggggagagagggggggggggggaggggggaggggggggaaggggggggggggggg

SEQ ID NO: 160750 - DNA, 418 bp, Arabidopsis thaliana landsberg
aaacaagttcaatgtataggtaatcacggttacacacaacaatcattatatagtcgaacaaaaataaagtagcaagactttcaacctaaaataaacgcacaaggaacagacaataaaaaatatacctcctaaaaaatgtcgaaagaaagaactaaatatagaatcgtatgggggataatagcgaaactacaaaaagtggttccactaggtaaattaaaacaaaatcgatacaacaacaccatctcgctctcgtcattcatttaggtactaccttccgcgggattctcagtctccattggttcgtcagaagctggttgctctggctcactcttgccctcatccgcctgctcacctcccttggcttgtggtgcctctgctttagccgccggctttggtttggtcattataggcctgcaaa

SEQ ID NO: 160751 - DNA, 356 bp, Arabidopsis thaliana landsberg
atcacaatgcctaacttctttgaattccaaatcctttactagacttaacacttttgtatcccccttagaactctaaactcttactctctttttttttttttttcattctcactctcattcccattcattccatacacattcccaatcccaaatacaaggctccacctagtcctagctaactcaaaaagcgtgggctaggcctacatgaaagactgctcttgtcggctcatacctaacacgctataccaagctcaatcgaaaaagacctcacaatcacacacaaatgatctttggcttgaaataaggctaggctaaggttatgagaaactgctctaaaaaggagagacagctacttg

SEQ ID NO: 160752 - DNA, 340 bp, Arabidopsis thaliana landsberg
aaaagccgctcgcaagcaaatgttttttcttcagtacattttatttagaaggtttttatggtgaattactaatggcaagtctccagtctttggacacacaagactggtgaattttaattgaatacacaagacttgaaacaaagaagcagaaacactttccgactagtcagagagagaggtggaggcttggtcagctgtttccttcaggaggttggcgtgatcgacgctgcagtaaaggctctttttgtctgaattcgtagtaagaacgaagcccgtgtacttctcccgcgacctttttaagcagatgttagctattaacttgaacatctcgttcccctcc

SEQ ID NO: 160753 - DNA, 395 bp, Arabidopsis thaliana landsberg
aaacaaaaccatgtcttctctgatctgtttcattttccttttccttttctcattcatcactagcttcacagcttctgctcaaaatcctttttacctatatcataattgttctatcacgacaacttactcaagtaacagcacttactccaccaatctcaaaacccttttgtcctctctctcttctcgtaacgcctcttactccaccggattccaaaacgccactgcgggacaagcccccgacatggtcaccggacttttcctctgccgcggaaacgtctcacctgaagtttgccgtagctgcatcgccttgtctgttaacgaatcgttaagtcggtgtccaaatgagagagaagccgtgttctattacgagcagtgtatgctcagatactctaacc

SEQ ID NO: 160754 - DNA, 142 bp, Arabidopsis thaliana landsberg
gggggaggggagggcggggggggggggggggggggagggggagggaaggaaggggggggggggggggggggggggggggggaaggggagggggggggggggggggggggggagggaggggggggggagggggggggggaggg

SEQ ID NO: 160755 - DNA, 380 bp, Arabidopsis thaliana landsberg
aggagcacatgcaggtggctatgcaagtggtggtggtgaaggaggtggctatggaggaggtgcagcaggaggatatggtggtggcggtgaaggaggataaggaggaggcggtagttacggtggtgaacatggaggtggttcaggcggaggtcacggcggtggtggtggtcacggcggtggaggctatgccccatgaggaaaccaacttaagatcagccaaaagaaaggctgaaaaataaaagataatctgtggaggggtatacaaattaaaatgcctactatttcaaaacattttgtatccattattattgaacgttgtattgtattttcctaataattgaatattttattgtcttatcattatatcatcgaaagcataa

SEQ ID NO: 160756 - DNA, 874 bp, Arabidopsis thaliana landsberg
tttcttttttttgtcggcaattcattttcattcaaaggcccaattggcaattacagaagggattaagtccagaggattacaacaaagttaacagcccactaaaaacataagataaacaaaagttgcacatatgctttagtattagacacgtgtagaagacgtatattgctccagcccacgcgtccactcctcaagcatcaccgttaacgttgccggacatcgccgtattctgactaaccaccgtcgatctgtcctagaacgatgtaaatccttttcccttccgccgatctccaatccgaaagatagatagcaccgaaattcttttggttcgattctataaagttgcttcaaaattctcttggtaacaccaatccggggaagctccaccaccagttacacccaatttggtgtagctaagatccatctttgctcacacgatttgagcaaaaggagagtgatgaagatattactcctcgatcaattggggaaacagagagaaattggaagataaacaaagaaatacggtgaagatgtatagatagaatagagatcgaatctcgctaagagcgagacagagaaccggacatagacggtaggaacagtccgactccaagccggaatttattgatctcgtacatagacgagaatattcacaaatccggtcaaataccggaaacaaaagtgactaagcttttctcttctgcatgggagtatatatataactcgccaaatcgtgacttttgttatattaaagaaaaacaaaatttacaaacttaaattaagatttggttttgtttgataatcacagaatccttacattgagagggcaataccaggttgtcttaggaacatcatttaactacttttaccagat

SEQ ID NO: 160757 - DNA, 162 bp, Arabidopsis thaliana landsberg
cgaaagcccaaaacccagaagaacagaaaatctctcttttgaaaattctccgtttgcaaatcattcaagtgaagaacaatcatcttcttctacttctccggcttcatcaatctcttctagacatatgaaagaatacctgaaaagctgttttgatcggaagaa

SEQ ID NO: 160758 - DNA, 92 bp, Arabidopsis thaliana landsberg
tcctaacattgtaggtatccccaatataaagagaaggaagttctagcttagcttcaacaagggagttgagctcaacccctggatagctatct

SEQ ID NO: 160759 - DNA, 483 bp, Arabidopsis thaliana landsberg
aataagtagagagaaagatgttaattaccatgacagggtcatcgtcttgagtttcatggcgatggtgaagttgttggtggttgcgacgaacacttaccatgagttcttgttcgcttcccaaactagaatgtctcacaccagctttgttctgcttcctattagcgcgagctttagaaaagacaaccgagtagtttgtagcatcatttggtcctttttggtcccaccctccgaactgtggaactggagtccatgcagcattctgtatccaagaataaaactcgttagataaacatataatttgcttagggaaccaaatatttccgaaaaaaaaaaaaaaagaacaatgagatcgatgttgagattgcatcggttaattttccccattctataaaacgcgcattaaccgatgaaagctcaacatgtctaggttgtaactcagacatcataaagatcgatgatttagtaatagttggataaaagaaa

SEQ ID NO: 160760 - DNA, 287 bp, Arabidopsis thaliana landsberg
gcacttattgttttgctttgaagatttagtcttttcattcacagaaacttaagtggaaacccgaactttaatctcacagcaattccagactctcttcagcaaagggtaaacagcaaatctttaacactaatgtaagatgaccacactcctctgaacagtccttataagttatatgtagtgctacaataactctattctaatctcttttttgttttcttttctgttttccatcatttttaatgattacagtttgggtgaaaacctgactctgactcccaaaaaagaga

SEQ ID NO: 160761 - DNA, 665 bp, Arabidopsis thaliana landsberg
tgctcgctttatacacatgtgggaacggttttgtcggtggagacatttatggattcgtgaactgctgcaaaaattatgcgtttcttggacgtttctgtaactttctctttattagattttgtatcttgtgtctctgtgtccaccattgcgttgtgtgtattcaattgatttccccaggtgttgaagattgttatttatatatttaacttattttatgcacagagatctttagtataattcatgaaaatatggttttatcttccatgatctaggggaactaaaacatttgtaaagtttgagcccatattttgtgtttgttgcttttcagagatgcatatattatggttgttgttctgtttatgaatcgtaatgtgcaatgttttgcagcaatggcgccaccgattgaggtttctaccaaaagctacgttgaaaacatgtttcacttcctactgttaatgagagaatactttcgtccatgagtctcagatcagtagatgcacacccatggcatgatctcgagataggtaagctatacgtaaaggtttctttttcttttttttggctctaagatcatttcattgttttttagtaataactcttataccttttttgcttcgcattcctttgtttacaggacttgaagccccaattatcttcaattgtgt

SEQ ID NO: 160762 - DNA, 129 bp, Arabidopsis thaliana landsberg
cacggatccaaacacgagagacatcccaaggaatctgattctccaatgtttgtctagacataagatgcgttgatggtaaagaagaaacgatacgcacatcagattcacagggttttacttctttttttg

SEQ ID NO: 160763 - DNA, 64 bp, Arabidopsis thaliana landsberg
tacatctagctgtatcttgcctgaaagtgttggcaccacaactttgccccccaaataagcctgt

SEQ ID NO: 160764 - DNA, 140 bp, Arabidopsis thaliana landsberg
tgtgatgctaacaatcaagatgtgatcagaagtcactaagtcaagcgaagcaataacaggttttggtgtgttctagcagttctaattgaacatgtagaaaacagaaaatcaagcagaaacaataaaacactcgaccaaca

SEQ ID NO: 160765 - DNA, 170 bp, Arabidopsis thaliana landsberg
ccgtgttctttttttcgttgtctacaggatgactgatcagccagcacaaaatggattgattcctccacccacttcagagccaagcaaggctgctgcctcagcagagacgaaaccaaagaagaggatatgttgtgcttgccctgataccaagaagctgagagatgagtgca

SEQ ID NO: 160766 - DNA, 110 bp, Arabidopsis thaliana landsberg
tgggatccaatgctccactcatctttctcgattctattgacataatagtggtttcttctatattagtgaaatcattacatgacagtggatcttgcttggtacttgtccga

SEQ ID NO: 160767 - DNA, 86 bp, Arabidopsis thaliana landsberg
ccctttgtctcgctggacacggacctcttcgatcactccagcaccaagggtatagaatagacggtgtagatcaagctgagttacct

SEQ ID NO: 160768 - DNA, 299 bp, Arabidopsis thaliana landsberg
tgccatcatgacttgacggtactgatatcagaaccgttttgaaggcaaggggacagaagaaatgaagtgagagaataatgtgagagattgcgccggagccaaggccggaacctggtgaccggctcctctcaccgtgacaaaatttagtccaccggcataagtctcaacccatccagctacttgactcttgtggaaccatgacctccacggtgactcgaccttaagtcccatcttttttatgctataacgtgtagatgttaccggaactctcccatccgtatctccactatagccaacat

SEQ ID NO: 160769 - DNA, 253 bp, Arabidopsis thaliana landsberg
gtcaatttttagggtttgactctaaatcttacaattggaaactgtaacggctatatttcggagagagacgttgtaaaatttggttttacggtaatgcccctggcgctaatgtacactcttcgtttatttgcggaataaatctgcaattcttaggctaagtaaatactaataaaattactggttatactcctctcaaatcttacaaaccaaagcaaaaaaacacttggtattacttatatgatttaacaagact

SEQ ID NO: 160770 - DNA, 143 bp, Arabidopsis thaliana landsberg
aaatgctccaagcaccaatgacattttctcttcagagttagagaattatgcaggtttattaaatgtctgatatatatacaaaggatgattaccaaccacttaagggtgttaaagcaagagtaagtgttgataaaaataactta

SEQ ID NO: 160771 - DNA, 158 bp, Arabidopsis thaliana landsberg
aaaaaggaaagagagtcgtattaatataaaactataataacttattaagatagtcaacattaaaattaaattaaagatttcatctgaaactattgcaactactggtctcttcatcggaagaagagaagatctccgtcgtgacttcacttgaagcatga

SEQ ID NO: 160772 - DNA, 233 bp, Arabidopsis thaliana landsberg
  unsure (1)..(233): unsure at all n locations
caatcggtacgggcgcgcttccgctgatgatcgatttatttttgccaatagtatataccagttgcgcctttttatagaccatctctgccatacttgataattcatccactctctctcttctctctctcgatctctcnaaagatctccggttccgttttaccgtcgaaaagtcagtgcggaagttggcggcggttaattctctcctgaaccggacccatttcttctatccgcgc

SEQ ID NO: 160773 - DNA, 231 bp, Arabidopsis thaliana landsberg
tttattatatataaacaaaagctgatgtaaacaaagtcaaaaactaaaaactccacaattcgatctaaagtctaaaccaaaacttagctaatagagggaaacaaacaaaaaaagacgttaacccaatattaaaataatttaaaacaatcctgcttttgccaaatttgaaagctccattgtccaatcctaggaatccatgtgtcatctcttctttgtcaacatgaaaacatc

SEQ ID NO: 160774 - DNA, 138 bp, Arabidopsis thaliana landsberg
gattctaagccctattaatattcccaaatgagaggataagttaaataagtcagatgcagtcaatacatcttcaacattgggtttgttatattagatattaaaagttttacaacttaatattagatgaaatgaactaca

SEQ ID NO: 160775 - DNA, 140 bp, Arabidopsis thaliana landsberg
tgtgatgctaataatcaagatgtgatcagaagtcactaagtcaagccatgcaataacaggttttggtgtgttctagcagtcctgggtgaacatgcataaaacagaaaattaagcagaaagagtaaaacactcgaccaaca

SEQ ID NO: 160776 - DNA, 2393 bp, Arabidopsis thaliana landsberg
atgaaggtgagtactattactatacatcccaatttccaagtctaatcaaaatattcttttctttttgatgattaatgagctaaaattgtacttagtctctcataaactaatcattcatgttaacgaactctctctctatctgtgtcttgcagctgctaagttggatgcgaacgataaagcctaatggcttagactcatcaaagaagttcaaaggtataagtattgtatattgatcccttaaataacctatcttcgtcttcatacaatgtcatacatatatgttagtatcggtgtgcattgaataatgagcatacactctctaaactttgatcatcataattcaaaaatcaatctatctttcaggtggtttatgtagtctaagagctcaggttttctctgatgtccaagacatccgcacaaactccttttccttctacggacacactcatgacccgaatccatccaaagttgaacaggatcttcggtttgatgaagacgaattttgcggatttctggccatcgggacgcttggtacagaccctgagacaccaaagttctcagctatggttgcagaagaagatgcaaccggagaaatcaaggagatggccaagctcattgctaagaaactagaccagtttcttaaggaatatcctgaggatactagaagtaagcgggtaaaaatatcgaatgaatgtcctctacaagattatgatctctttcgatcatccattgagcttaccaagggaagcaatggaagagtaaagaagaaaaagagtttacttacgagtctcttcaagaggagacaaacagtacaaggagaaccttacatagagaaacatagcacaagagatgcgattaaaagggtatttaaaaagcttcatggagcttcttcaaagacaagaaatgatgatgaagatgattctatgtccaagaagaagaaagatctcaaaaaggtttagtcttctttagcttaaagcattttcaaatcttacccaaagagattggtctgaagaattctgaatgttaatatggtttctgttttggctatagaatgttcaaacctgccgacgtaaagtccaccctgttctctgtacaactgcaattccacaagacgataacgagatagatgacagaagaaaagtggatctcaaggtccctagtcttactggagggttcctcggtgcaagttccatctccgaagcgaacaggaaacgagaaaactggatcaagaccgacacagagtgtaagtcaagatacacaaagaacactttgtttttacacaaagaaaactggatcaagagttttcttatcatttgcttgctttctgcagatcttgttctggagctgtgaagatatattctcactgcaacaaacctctattgatgttccaagcaaagctctctcctatcaaatccatatataatacacaaaaatcagtatctattaatgtgtagtcaaagggttatgtactctagtttaaggcaatgtaaaagaagctcatgtatgaaaagtattgtacccaaatttaaatagcattcgaagtagcacctattcatgatttggccacaagtgttaaccgctaataaccgtcatatctctgctccaaaccaatcactgatgaaactaaaaagattagaacattttgaaaagatgcatagagaaataggtactatatactgaatgcttattcgaccggattcaatcggataacaaaaaaccgaaaccaaaccttcattgggtccactattattcaaggctctacagtaacaaacaaaaaggcaaaccaaactactaagaaaacaattagggagtgggcacatttcttgatatatcatctttatgcagtaatctactttatatcaaatcctttaacaaaaagcaaacaacaccaaggagcatagaagcaattgattgaacaatcataaaagagaaagaagaagataagttcacaaaagcaaagccaataaagaaacacaaatgcctttcctcgtaatctatcactaaacttagtatcttaacttcatataccttctccttagccaccaagaaaagccaaaaagactcgtcactcacattcttctacataactcttcacttgtctccatcttcttctgcaaaagaacaacactcacacaaccatacttaatacaaaacaataagaagaaaggagatcaaaaccattatatatgagcacggattggggacctgtgattgtagcggtgtctctattcatcctactctcaccaggactactattccagcttcccgcaagaacgagagtggttgaattcggaaacatgaccacaagcggtatagccattttggttcacgcatttatatacttctgtatactaacaatcttggtgattgctatacaaattcacatccatttc

SEQ ID NO: 160777 - DNA, 1090 bp, Arabidopsis thaliana landsberg
taggcggatatggaaccagaggttgttgcggctggaattgcgaaaaagagaatcttcaagaagttttctttcagaggagtggatctcgatgcgcttctcgacatgtccaccgaagatcttgtcaaacatttcagtacccgtattcgcagaaggtcagcttctttctttgaaccaaacaaaacgcttttgtctaattggttttgtgagactgatgatgtgttttgttatctttaaaaggttttctagaggattgaccaggaaacctatggctttgattaagaaattgcgcaaagcggtaaaatcaaaatttctcacatcactaattaaatgttacgtttgttgaacaacatattcaattgtccaaatctaggaattgtgtatcttgtatgtttatatgtctcattaagttgagcgattttgatggtttattttatggctaatagaatcgtgttatccctcttagttaaaagattatcagcatgtttttatattctatgcattagtcttgtgtgactaattcagataatctatacccggttttcgataatgttacttaactttgcgttcgatttttgtgaccaaatggctttaaacaataaagattatgtcttagaatgtcttgagtgcgactatacataatgtcattttttttataactcagataatctataccccacttttgtgctattgtccttattatgtatccatatatagaataatgtgctgtttctctgcaaccaaatggttttaaaatattaaagagtcaatgatttttgtgtctttgagcagaaaatggaggcaccagctggtgagaagccagcatcagtgagaacacacttgaggaacatgatcattgtgcctgaaatgattggaagcatcattggtgtgtacaacggaaagacttttaaccaagtcgagatcaagccggagatgattggacattacttggctgagttctcaatctcatacaaaccggtaaagcacggtaggcctggtgttggtgctaccaatgcctccaggtttatccctctcaagtgaagaagctacttatctccatatctatcttcttagatccctttgatctcatttt

SEQ ID NO: 160778 - DNA, 1108 bp, Arabidopsis thaliana landsberg
atggtgaagattcatcccgatctaacaacctccggcgccggagaagaaacaagttcaccgtacttgacgacggagcaagagagtttcactatatggatgaagtcgttggtgttcaacacaaatggctgcacagtttttgattccaaaggaaacttaatctatcgagtggataattataactccaagagttgtagtgaagtttaccttatggacttatgcggcaaaatcttgtttacattacgtcaaaaggtaaccaatacaacatatcatcttatgttcgtatagtgttcttaaaagtattttgttctaactcttttattttcttggttatagaaattgggcttattcaactcttggaaaggatataactcaaccgggacaagatttcaactaagaaaaaacttcaagatattgccaagagaatcatcttcatcatacaaagttgtaatgggatcgcgtatagttgatggtgatcaacgttcatgttataagattgtcaatcgtggatcagttttagcaatcaaggatggatcgggaagattaatggcagaagttaaaaacaaactatcggatattagtggtttggatcttggagatgatgttttgacaatgatggtggagccacaactagatcattctttaataatgggtattgttatagcttataaacttaccaaatgtaaattgtgataattatttcgttgagaatgcatgtaatcaggtggtaatcttgaaggtaagcatgttttaaagctaattaaacgttggcataaaccccaaatatctggcttgaaattggatattgaagattgcaccaaaatgtggagaagctcggcatcgttcatcctcataaaagtcaaaacaagcaatcagttctctctttttttttttggtatggaaacctagttctcttactcaatattcaatccattcttttcctccaacttcttcgtaaatggcggatgaacaccataaccctgtttcagcttattgccaaacccgaaccgcgcaccatggaatagtgatccaacgagtatgtttgaacaagctcaagctgccattcaatcatcgctatcatgaccgtgattactcgtttccccggtcgtga

SEQ ID NO: 160779 - DNA, 923 bp, Arabidopsis thaliana landsberg
gagacatctcatttgaaaagcaaggaggctgtaacgctcgcgatcctcaataggatcgttggctgggacttggtccgaggaaaaaaggtggagtctcggacaagttgggaaggagctggccataagctcggacaaagggatatcatgcagactaagctaggatcgtaagagaatcagcagggtcagctcatccgaagctcaagctcagctggaatgagtgaaggttacttgggtcaagtgatagtccagttcgggcagctagatgagtgacggttgagctcaaggtagttggtcgactgtctgaccagctgggcttttatccggacggttacttgggcagttacggtcgaacggttgtttgcccaaagggtggataagggcgagcagttacgggcgaagagatgcaactcttcggaaaggtgcaaggaacggatgtgttgattcgggaagcatctatttctcccctaaataagggagggcgcccacgaccatttcattcaccacaacacacagaaaacaccgaaactcaccattaaactctcgccctctcgggataataaatcgtcggagggtcgaacaagatgtaccgtgaccttaaaaggtactaccattgggtaggaatgaagaaaattgtggccagatgggtggccaagtgcccgacttgtcaactggtcaaggcggacgatcaagtaccaagtgggttgttacaaaatctacctataccggaatggaagtgggaccatataacaatggacttcgtcacaggactgccaacggggataaagtccaagcacaatgcggtatgggttgtagtggaccgattgactaagtccgcgcacttcatggcaatctcggataaggatggagccaaaatcattgccgagaagtacatagatgagatcgtgcgattacatgggattctg

SEQ ID NO: 160780 - DNA, 971 bp, Arabidopsis thaliana landsberg
atgggcaagaacgatatgttaaccccgaaggcgatgtcgaatcgaataaaagcgaaaggacttcaaaagcttcgatggtatttcagatgtgtgagaaacaatgccgagacgagaatggattcaagtgtcattgtatgagcgaatctcaccagcgtcagatgcaagttttgggtcagaatccgactcgtgttgttaatggttactctcaagagttcgagcagacgtttctcgatctgatgcgcggagccaccgattctctcgtgtcgccgccactgttgtctacaatgagtatattaacgatagacttcatgttcatatgaattcgacaaagtgggcaactttgactgagtttataaagtatcttgggaaaactggtaagtgtaaggttgaagaataagagagttaagagtggtttagctgaggaggagaagcaagagagggagattcagaaacagattgagagagcttctgctggttgtgaaggtaaagacgttgtggttgatgatgatgatgatgatgatgatgatgagaagaagaaagatgaagactttaggttgaagaaggttgggtttgctcttggtttaggtgttaaagagagaggggaaagctcgaaacttgtgtttggggatgaagagaatgacaaggttgagagaggggataagaggaagagatcagctttggatgagttgatgaaggaggaagagaagaagaaggagaggatgaataggaaaaactactggttgtttgaaggaatcattgtgaaggtgatgagtaaggctttggcagagaaagggtgttgtgaagagagtgattgataagtatgttggggagatcgagatgcttgaatctaagcatgtgttgagagttgatcaggtggagctaaagactgtgcttccacaaataggaggaatggtgaagatagtgaacggggcatatcgtggttcgaatacaaggttgtggatttctgagag

SEQ ID NO: 160781 - DNA, 2902 bp, Arabidopsis thaliana landsberg
agctctcccgctggaaatactcgatcccgaaggtcgagtaagtcctctgcaagggagttctccaggaacaaagcagatatcactcgaggaaagaagcccgtggggaggaggttggaactggtagatgaagactttgaggaagaaatggcttcaccagaggaagaaatggcttcaccagaggaagctgatcacacagagagaggaggtggtgatgatttggaatcagagaagtgtgcaattcgaaacgagtactacaagctgctgaagcgaaatgagtttttaggaactcgataccctcatcccgagaccatggagagactcggcatctatgatgatgtagactacatgtttaagcactgcagcttgaatattcacatgtttcggccaatagagggatatgaggaagagaccatcgagtttctttcatcggtagagttgttcttatatggagagtcaaaagacgatggaatcaggccagacggaagtttgggatactttaagttctttgtgtatgacgtagagtatcggcttccaatcgagtatcttgagctgatgtatggatttctaagcggaaaagacacaagtcatcgttttgacaagagagagcttcagtcattctaggccacgcttgagtctaaacatgggttttcatcctctaggaccaagagcaacgagataaggagtccggtggtcagatactttcataggtctttagccagtgcactatttgcaagagagaggaatgggacctttgtcaatggagagctagaattaacggagacagcgctgcaggagctacttggtttagcatcagatggtacagttctagctagagatcagacagacgcttcaatctcattctacctaatcgaacatttgctgaattacagaggatgggctaagggacttaagaaaccaggaagaatggttatgggaggagttttgaccccaattttgagagcatgcaatgtacctatgcattcaaaaccgattcctccaagatggattgatatgcagcatcttatcaattccaagagtttttggtcgcagaagaagaatggcttatagaaatataagttcgatcaccttgaggcagagcaatctatttttcttctcccaaatcccgcttccactttgatcagagatggtggcaacattgagttttgcccaccagtcgagaacccctatacttcaggtgatggaaggagtgaatgatgatgaagctctaatccatcatttagataacgaggcagaacctatggacgagtattacgcaacacaacagttttactttgaggagtactccgtgccaaggcaaagtaaagactcaaaggaaattcacaagcgccttggttttctacaaagctggtgtaaacttcaagacaaggctctcgcagcactaaacaagaagtttaacgcactccaactcaagttcagctgttcttcttctactatggcgatgccacaggagatgccttttaggagaagcagatccactcgacatgaacctatgcaatatgatttgctttcgccaccaagacattattcatatgagccgagagaactccatactgcaccttcaccaccaaggcaatcatcctttgaatctagggagaaggagaggaggagtaagttaaagaagcgcagaaggaaaaggaaatcagatggggtaagccactctaccgcaccactcgatcaacagcccgagcaaagggtagagcatccaactaatccaagtccagcacaacccgttccttggagttacacaaaggagagtatggatgacttcgtctcctcctacttcacctaaacgctgaggtaacaccaccacaaccattgtatataccatagcatttttatttttctttgtgtgttgttagttttggtcttgaactttttctcaaatttttattacacaagggactgtgtaatttaagtttgggggagggttcaagacacgttaaacattgtgttctcttttcttatttcaaattttgaatcatctaaggcatagaaaaaaccataaaaatttgaaaacaaatcagaaaatgatttcacaaaaatagagtgtcatgtagattgcatatcactttaggattgtatatagtgtatttgcatttaggattcctcatttgcataggggataatgatgatttcaaaccgataagcatgttttgattcaatgaagtaagttcaatgcccaagttgttagttctctgctgcataaccgattgtatctctgaagtatgactgcatcctgctttgaatttgtaacttgactatactactttgattcgaaactcgcttatctgatgccattccctatctactagaacctaaattgaatttgtaattatcatgtctatgcatggtttgtgaactcatggctaccatatacatacttggattatcttattcacttcaccaccctctgttaatccgaatacctgactctcatttttagagcagtttcccatacccttaacctagtcttattttaagccaaatatcatttgtgtgtgattgtggggtcttttttgattgagcttggtataacgtgttaggtatgagccgacaagagcagtcttccatgtagacctagcccacgctttttgggttagctaggactaggtggagacttgtatttgggattgggattgtttatggattgaatgggaatgagaatgagaatgaaaaaaaaaaaaaaagagaataagagtttaaagttcttaagggggatacaaaaagtgttagtctagtaaagggtttggaatttaaagaagttaggcattatgattcaaggaataaaacgccctctatgctaagattagaagaaaagccttaagtttgtcaaagtttaaaaccaaatccgctagactcttgaatcgttttaaacaagaac

SEQ ID NO: 160782 - DNA, 1754 bp, Arabidopsis thaliana landsberg
atggaatcaccttctcctcatttctctagagctaaacctccatgtcgtctgtccgatccggctcagccccacatgctttgccgacggcgacgaccaactcatgctccactttctatctgctttacgtgtaaaggcaaacacttgaagcgcagcaagtattattactactgtgctacttgcaatttggaatttcacagaggttgtcacgtctttctgccggagatcagaagcgcttttcatccctctcaccccctcaccttcaccgccttagatcctgaatttaatgcttctatcatacaccaaaactggagggacagctccgcttcagaggaatcttccgaagaattgataaacgaagttgttgactatggtcatgaagacgatggtgatgatgacgattatggggatggaaatggcggtggcggtggcagtcgcagtggcagtggcgatgtttatgatgtcgcttataatgaggaaccctatatgttcttccatggaaatcacctgaaatgcaaatgttgtcaggttcctttagaaaagctatattatcattgttctatctgcaagttcaatcttaacttgacttgctcgatgagaccaccacctaccactatctcacacttgaaaagtcatgagcacatcctcacccttttccctatacgactccctctaccatgtggggcgtgcggcttgtctctaagtgacgccgaagatcttgtttacgcttgtctcccttgcaaccttttggtccacagatcttgtatctatctacctcgtgtcattaagatcacccgacacccccatcgtctctctctcactccctcccttcaacctggtgatttctcttgtggagtttgtcgccaaactgttgacgtcaactacgggcaatactcttgtgataaggaatgtcattatgctgtccattcaaaatgtgcaacaaggaatgacgtgtgggatggaaaagatcttgatggagtgcctgaagaacccgatgagtttatcgaaccgccattcctgaagattgatgaggagactattcaacatttcagtcatcaccatcatctaaagctccatgaaaagaaaaccattggcgggaaagacaagttttgtgaggcatgcacccttccagtaatgatctctcagagatattatggttgtatgcagtgtgattttgttcttgatgaaacatgtgcttctcttcctcgcaagaaaaaccacccactacataaacacccgcttaaccttcagcccttccttatagatgagacattcatttacgcagataatatttctaccaaaggcattttttgaatgtgatggttgctaccgaaaaaattgtgggtttgtgtacaaatgtggtgaagaaaaatgtaactttcgactagacatcaggtgcacttcccttccagatcctctaattcatggctgccatccacatgatctcttcttcaacttgagcaaaggtaattgcatggggtgtggttctccaaggtgttcatcctatttcctagaatgcattaaatgcaaatcctttttgggtattagatgtgctagtttgcctggtgaggcacactacaaattcgataggcatccactcactctttgctacggtgaagaagatacttcaagtggccaatattggtgtgagacatgtgaggaaaaattagatcaaaaaacatggttttatacatgtgactgttgtgggatcacactgcatgtcaactgtttattagggcaagatatctacatgaagc

SEQ ID NO: 160783 - DNA, 1219 bp, Arabidopsis thaliana landsberg
atttcagtctataccaattttcctcctatgaaacagaggttcgttttaatgttgggctccatcattcttttcttgagtggcaaggtttgaaattttttaggtttgcgttcgttgctcttgtagatttcaccacaacattgcaaattcaaggttgtcgcatcatgcagaaaaaggtaaaagggatggccttttcataagctgtgtagcatcagaagctaatctctgggccttagtcatggatgctggaactggtttcacttctcaagtttataaattttcttctaccttcctccccaaggtattaccatcatgtccactatgtatgctctgactatatatatatagtagcagctcaccactttttttttttttttttttttatggattcttggcaggactggattatggaacaatgggaaaagaactactatatcagttccatagctggttcagataacgggaactcattagttgttatgtcaaaaggttggtgttaatggtagtaatctgcaaatttttatgtcacacaaacacttgactatagaaaatgtcgtactttcattataaccatataacatggagtcttctttactaattttgtgcttgttgtaaattggtaggaacatcttatactcagcaatcttacaaagtcagcgactcttttcctttcaagtggataaacaagaaatggaaagaagatttccatgtaacctccatgacaactgctgggaatcgttggggtgtggtaatgtcgaggaattctggctactctgatcaggtaggtttcaatcccgtcaccttagaatgacataatctttaaacattttgacatttttcctgatactcttggttggtattgtgtgaaaaggtcgtggagctcgactttttgtacccaagcgatggaatacataggagatgggaaagtgggtataggataacatcaatggcagcaactgcagatcaagcagctttcatattaagcgtaccaaaacgtaaaatgatggatgaaactcaagagactcttcgcaccaccgcctttccaagcactcatgtcaaggtgggtttctttagttttgaacaaagattggacttttgctttgtttccataatactgatcaggacctgcccggtgttggttgattttgcaggaaaaatgggcgaaaaatctgtacattgcatcaatatgctttgggaggacagtttgctgaggtacttagca

SEQ ID NO: 160784 - DNA, 1297 bp, Arabidopsis thaliana landsberg
gctttaagttaaactactacatacctttgatatcagttcatttcagatcgaatgctctctgtcttggttttgcagctatggagttcagaccatggccatgttattgaggcatgcaaagacagtctcaagaaacttcaacttgattacctcgaccttttcctcgttcatatacccatagctacaaaacacacgggttaggcttcagccttgttcatgaatattatcagtttcgagtagagaccattgcatttcagccttgttactggctggaaaattaagttttctcaagtctctagcaattggcacacagagtaataagctgtaacatgtaagccttgtgcaggaataggaacaaccgatagtgctttgggggatgatggggtattggacatagatacaacaatctctctggaaactacatggcacgacatggaaaagcttgtttctatgggtttagtccgcagcattggaatcaggttcaacttctctcactatcattacaagttctcttgtttagtcgccaatatatgaattatttgaccattaggttttttgcagtaactatgatgtctttctaacgagagattgcttggcttactccaagatcaaacctgctgtgaatcagatcgagacacatccttacttccaacgcgattctctagtcaaattctgccagaaacatggtatctgtgtcactgctcatactcctctgggaggtgccacagccaatgccgaatggtttggcaccgtgtcatgtctggatgacccagttctcaaagtaagccccatcctctaaaccttaaaagtttggactgaaacagttaaataattaaaccttttgtctgtctgaattcataggatgtggccgagaagtacaaacagacagtggcacagattgtcctgaggtggggaattcagaggaacacggtggtgataccaaagacatcgaagcctgaaagattggaagagaattttcaggttttcgacttccaactatcgaaagaggacatggaagtgatcaaaagcatggagaggaattaccgcacgcaccaaacagccaagttttggggcattgagctctacgcttgatcacacacacactctctctctctatctatctatatgaataaatgcaccttaagaatagaatgtcagaggtcatcgtcttatgtaagggaacctaagtctcctatttggaatgtgagcggaagaccagggacctaaaactgcgaagttccatctaaaagtgttcaagtatcatccccaaccgagttgaggactgcagtccgtgtaagat

SEQ ID NO: 160785 - DNA, 1661 bp, Arabidopsis thaliana landsberg
  unsure (1)..(1661): unsure at all n locations
tttatctctattacatagacagatacacgatcggggtttacatataatttatactcttgttttatgattttggcagtggaagaaactcttggtgaggctgaaagttttatctgcagagttgaacaagtctgatctttgggatgatccaactcatgctggtaagataagccgggagcacggctcgcttacgggaaaaatgaaaggagttatgacatttgagagagagcttcttgaacacattgacatgttgaaactcgctaaagaggagaacgattcagagttagaatcggtgggagttttagcactcatttctcaaactctaggcatgttttctttttctgtttctgtttctctaggtatgattaacccgaaagtttcgggtttgtagtttataggggaactacttgagaacaaaatggtcagtattgcttcattgtaagattgctaaccatgattgttnnnnnnnnnnnnnnnnnnnnnnnnnnnnnnnnnnnnnnnnnnnnnnnnnnnnaaaagagaaagaactcgaggctttattatctgcggataatgatccttgttcttgttatatcgaggtgactctcgaagacaatatgtatgagattgttctgtctctgacttcatattataaagctggaaggtttgttccctccgttcaagctggagctggaggaacagagagcaatgattgggcagctatggtaatggaaatgtacaaaacatgggctcaacgacgcaaattttcagtcactgtggttgatgaagcatcctggggagatagcaggaatcaaggtttgattttattttccttcatgtagaaattgaatcatgcattttgtattagaggaatctgatagtatccgaaccggttaacttttgtttattcacttcagctagaactacacatcatagagagatctagacaatcccggataccactcaacttgttcagtcccattgtctttagaacatgttatatctctagctaaccgagtcaactatatttgctgagctatctaatttagcttccattgtaaacaagttaggctaatttcaatgctcctctgctctagactaaaccaaaaattatcaaaatgacatccataagctttggctgataggctcacatatagagcaaaatgtgtagtttatccattattcactgctaaaatctcatgttctgtttagtgcaattggtcaaatctataatattgaaccattggctaacgattgatccaatgtcttgaacagcgtgctacaatcaaagtgaacggtgaatacgcatatggatacgccaaagcagaagttgagtacataggctggtgcgtatatccccgtttgacagtggaaaacggagacacacttcgtttgcggcagttgcggtgattccaattctaggtgatgggtccacccgtgtggagatcaatgactccgatctccggattgagcggttccgttctggaggagctggtgggcagcacgctaacacgacagacagtgctgttagaatcgttcacataccaactggcataacagcaacttgtcagaatgaaaggtctgtattcaaagtctcaatttttctattatttttcttacactcttcttattcttatactaaatttggtgtttggtttgtttgtcaatccctgattttggtatgc

SEQ ID NO: 160786 - DNA, 1001 bp, Arabidopsis thaliana landsberg
  unsure (1)..(1001): unsure at all n locations
atcgatcctcattgaatgactaagatatccaatcttccaagggatttggcggaagaggtgctctgtagaattccgttgacgactctgagaactgttcgatcttcttgcaaaacgtggaacacgttatgcaaatatgagagctttgcaaagaagtaccttgctgatcaagcaaaattagctgcaaaggaaaaatagattatgatggtcatgatgatgaattttagggtttatttgatgagagtcaatcttgataacaacgtcgttgaatcatcatcatcatcatcatcatcatcatgtataaaacgtgaagctaaagttattagcttaggcgacgaagttgatgatatatctcaagtctttcactgcgacggtttattgttatgcatcagcatcaccgaagccaagactaggctcgtggtttggaacccgtattgggggcatacccggtcaatcgagcccacacatcagttcaacaaattcgacagctattcttatgctctcggatacgacaagagcagcaaatcccacaaaatcttgaggtgtattacttgtttgagaccccattttcatgagttcataatctacgattttaactctaattcatggagggtttttcatgtcactccagactggcaattagggactattaatagtggcgtgtctctcaagggaaatgccttctgggttgctgaagagaagtatccgtacacaagtgaaacatcgaacgagtttttcttactctcttttgatttcacaagagagacatttggaccacgtttgcctcgtccgtttcagtttgttgaatctgaagatgctttgagtgnnnnnnnnnnnnnnnnnnnnnnnnnnnnnnnnntatatcagccgtgggatacattaatgatggagatctgggtcacgtctaagattgagcccaacgcggtgtcttggaacagcaaggtgttcttatcagtgagtataagaaaactcattggccctcagtttcagttttgtttggggag

SEQ ID NO: 160787 - DNA, 7397 bp, Arabidopsis thaliana landsberg
  unsure (1)..(7397): unsure at all n locations
cgaggcgaatagcaagggcttcggccataatcggtgatcgggtgtgcgtcgcaattgaagagatctgtcgtttaaagcccgtagatcgggttgagaagatacaacccatccttgcatatttggcatgtaatgaggtcgagatcaggtgctttgctcgggcccaaggaacgttttgtgactacttgtttggactgaagttgagcagattgccattcatgtgctaacatgatagcttgtgtaaggatttcgcgagggttgtcgtggggattttcaaagatttgctgattgcgagccatctataatttccagagaatccaaggatgaagagggcctgaaccaatttttgatggtggttggtgataagtgtgcattttacatgttttgagcattcatttgtcatcactttagcatcatatcaccattgttttataccatttctcatcatttgtcatcactttacatgtttaggatagttttgcatgcatgttgcatatatgtgttgttttcatgtgatttggagctgttgacgagctaattggaagaagtggacttgatcttataaatatactcgaccccgatgccgagtaccgccatgctggactttctgaagtactcggtcaccgcctccgtagcacatcactcgaccgcaacactctggatcaccacacgacccccttgtcgagtagatggcatcaccacttctcaccaccacttgaccccttggtcgagtagatgaacccatcatatcacatcaccactcgaccccctggtctagtaccaccatcaccttcactcgatctcccactcgattacatggtcgagtcccttcatcatcgcacactcgaccaatcactctaccaccaagtcgagtaccaccatcttccaccactcgacatcatactcgactgccagcttcagagtcttctccattccgcactcaacaagacactcgagcgcaagtaagagaagaagactccaaccaatcactcgaccacctgggtcgagtggcgttcttaaatccgtcccagtactgtgttgttttgagtattagggtttcagaattttttcctataagtagcttgtactttacatttttcgaaacaaggtttttttccgcagacgttgtgtgttcttgacattttgtaatatggatttctcttaatctattcagtatttgctcttcatttcgtttactaagttgttcatcctattatcatctcgctattactctgttgctatcatgttttcattcttatcatcgtttatgttttctgcaatgatgtctgagtagtgactaggtttctaaggatgggttagagtagtttagaatccctagtatgctacgtggttgacttggatttatacatcccttctggattacttgttcttaatgcttattgctttcacatcaactggaatttgagcccagacattttattaacaaaaggtatttgatgaaatgtctgaaccactaattccagagattcgtggctttttaccaaggtattggttacagggagcgttttgactttaacttattgattcgtaatgtctgttaggttagctctcgtcaatggtgattgagtctgagactaggttaacttgagagtctcttntgcggtggcacttagatttggttaatgaatttgttgtctagggttaatttattgagcatgtcaatcacctgtaaactgaggaaacgaaactactcaattaccccatccttgggaattctttatctgattgaattctttgtttactctactgttgtttactgcatcctgttatctgtcgcttaatttctgcaattctttcttgttactcgacctcgtacctcgaccacccagttgtctggcaatagactggcagtcgagtatccttgttttattttctgtctattactcgacctgtcactcgaccacacccagtgctctgcaaagagctgtgttggtcgagtgtttttactgtttctgtttgattttctgtttctgcatgttcacttaggactgctagaacacaccaaaacctgttattgcttggcttgacttagtgacttctgatcacatcttgattgttagcatcacacccatttggattgataacctaaaatagtacaatgacatgattggtgttttaggataattgactaaaaacctattatcaatttggcgccgttgccaattgggtgtttgtttgttacatttgagtcagacttgcttagatcaagttctttttcaattttcttttcggttactaactgtgtgtttttcttcttgtcttcttgatccaggtacacctctgttgtatgcaaactcgatcaacaggcaatcagaacctccttttctacgacaacatcaaccgcatagcttgcgaactcagaaaaaggagaaccacagtcaaccctgtgcctcagcaaccactcgaaatggctgacgaacagaatcaacaaaatggccttgccaacattggtgctggagatgcaccacgtgatcaccgtcagaggaaaggaattgcacctcctgctatccagaacaacaacttcgagattaagagtggtctcatctcgatgattcaggggaacaaattccatggtctgccaatggaggatccactcgaccaccttgatgaattcgataggctctacaacctaacaaagatcaatggtgtcagtgaagacggatttaagctccgtttgtttccattctccatgggcgacaaagcacacatctaggagaagaatctgccccatgactcaatcacaacctgagatgattgcaagaatgcttttctatcaaagttcttctccaacgctagaactgcaagactcagaaatgagatctccggctttttacagaaggctggtgaaagcttttgtgaagcatgggagcgtttcatgggtttataccaaccaatgcccctatcatggcttcattaaaccctctctgctcgacactctttatannnnnnnnnnnnnnnnnnnnagaatgcttctggataccgccagcaatgggaatttccagaacaaagatgttgaagaaggctgggaattggttgagaactttgctcaatcagatggtaattacaacgaggactgcgataggaccatcagaagcacagctgactctgatgacaaacacaagaaggagatcaaagcaccgaatgacaagctggacatgatccttcttagtcagcagaagcatgtgcacttccttgttggtgacgatcagtatcaggtccaagatgggtagggaaaccagttagaataagttagcttcatcagcaatcaaggtggctacaaaggatacgtcgtcttcgagactaacgaccctaacgtctcttaccgcaacaccaacgttgctaatcctcaggatcaagtgtatcctccacagcaacagcagggtcagagctaacctttcgtcccctataaccaaagttttgttccaaagtagcaatttcagggtaacgaccagcagcaaccaccacgtgggtttgcacctcagcaacaccaaggtcttgctgctcctgacgctgatatgaaacaaatggtacaacagctgctacaaggacaagcatctagctctatggaaattgcgaagaagatatcccaattgcaccataagctagactgtagctacaatgatcagaatgcaaaagtggaggcttggaaggacaatctgcatctacctctcctcccaaagttataggacttcctgggaagtcaatacagaatccaaaggcgtatgcaacagctcacgccatcactatctgccatgatcgagagctgacaactccacctgttcctaacttaatcactggggacagcgatgttcaagaaggagaggcttctactcagattgaggtctctgttgttgaattcaatcagtctggtggatctcgccatcttattcaatccacctcagaaaaaaaagcggccataatggagagaatggtaaaacgattcaaacctacttcattaccctcacgtgctcttccgtgaacattcaggaaagcgtggatgaagacatacaagtctgttgcagagaagcagctgaacaaaataaaagcactgacgccaatgaaggaagtccacccgatgcttgttcctcccaaagatgtgtaagattttatactctgaaggggctcgatgtgtctcacctccgatgatgaaagtgatgcccctccatcccaagctgttgataagaggattgttcaagagaagttagaaaatcctggatctttcactctaccatgttccattggagaatttgccttcagcgattgtctgtgcgatctcggagcctctgtcagcttgatgccactctctgtggcaagaaggttagagttcattcaatataaaccttgtgacctgactttgatctttgcggataggtcttctagaaaacccttcggcatgctgaaagacctaccagtcatgattaatggagtagaagtgcctacagacttcgtggtgctggatatggaagtagagcataaggatcccttaatactgggaagaccattcttagcttcagtggaagcagtgatagatgtcagagaagggaaaataggtctcaaccttggaaagcacatcaagttgcactttaacatcaacagaactccacaagggtcaacagaagatggaagaacctctggaaatgatagagcgatctcaggagaaggatatgagactgaaagagtgaaagaacttataaagaggtctgataagcaagatgaaactatagagaagctagcccacactattgaggaacttaggagtaagctgaatcatatgcagaagaaagctcaacctaaaggcgggattaacactatcgcgagaaaagaattcacttcaagatggtttcaagagacagattagcctccagaagagaaggaagcctattttgaaaaaaggggaattgagtattctgctgcagacctctccacggaggacgctgggtatgatgatgatactagagaggactatgcagaccctctctatgagtgtgaggagtcaagctagagactttaaacaagctcacttgggaggaagtaccatgactatccttgtaaataattcttactttcttgttattttttatttgttttggttgtgtttgtggttctcaggaagaaaggagtaacgtgaaggtagagtaaaaattcaaaacttttactccactgatggcctagagatcgagtatagtggtcgagtatgagtgatgtttaaaaccctaaaaaaaaattaaatcatcattttactcgaccaacagaagctacagagtcttatagggagtttatcaagtttacagaggattgcgggatttcctgaggtttttccagtaaacagagagcacagaagaaagacaagaagccatagtgggacccaccattgatgcccatgtcctccatgcagcagaccaagagacatggaatctcttcacactcatctctccactcgatcactacgcaaccttatcctcaccttcactactcgacttaatctctcaactcgaccactccagcttctctcccataaaaacactcgacttcaatcgatatcatcatcctcacaaccttcactcgatcacgtcaccatctctcttcatatactcgaccgctgaacaaatatcaccttcaagctcatcatctctatatcgcttccaacgccactgctctcttccccacgaaagctcatcacatcgcctcttcaacccactcgacgtcgcgcattcactcgatctctcatcaccatcttcatcacatcgccacttctcacttaatctcgccaccaacaacactcgaccgcagctccctcatagcctcatcgttttccaccgctttgttccagtcactcgaccaactgccaccgttttctcttctcaccgaaacaatcactcgacttctccactgctcctcaccgctcaagctccattagttcactcgaccatcatctcattctcaaatcaacttgctcccgaatcaaaagagaagaagaaggaagacgccaccatcaacaaccgattcactcgaccgccgtttcactctatctcacaaccacgaaactagcttcactcgacctcacaagatcactcgacctcgtctcactcttcactagcaacactcgatcgcgtatcaccaatcaatcccacaagaagtctcgcctctcaacctcactcgatcgcaaagaacactccattcactcactcaaggaatcactcgatcaacaattcaccaaaccaaaaaaaaaaacggtttacttgatcagtttacttgatcggtatactcgattggtttgtgttttggttttgttgggactatcgtattaacatttttctttgtgttccatctaatttcaggttttgtcatgagaaactaaagtagggaatcctcagtggatcctgaatataatgtagatgaagctgagtcttggtccactagaccagagagagaagaacacgtttacgaaagcttcaagatagaaatagaacgctcgatagctcgacgtagtcagagaagagctgaaatcgctagaggaaagagagcgatgtcgagtaggtatgagttgattgattaggacattgagattgagtatgagccagagtcatggcgcaaggagacaaagctactgaacaaacccgacgaggttccagtcgaagagtatatcatactctttgagctgaaagatttctagggaacgaggtacccctgctatgagactttaacccagttggggctaccagaggacgtgcaaaacctgttcaagaagtgtcatctgaagacactcatgtcctacccatacgctgcctacaaggaggaaacgatcgagtttctgccacaatgcaagtggagatgtatcacggtctcacaaagtatgagttggagagtataggattagggttcttgacgttctcggttgatcaacagcgctatcagttgtcgatcaagagtttggaaagactgtttggcttccctagtggaaagggaaccaagcctaagtttgacatggaagagcttaaggatttgtgggctactattgggaacaatgtgccgctaaactctgtacggtccaaaagcaaccaaatccggagtccagtgattcgctactttcagcgctcaatagtcaatgttctttattccagggagtctacaggcactgtgtctaacacagacatggagatgatagatttcgcacttacaggcattatccgccgtacaaagcgaaagaaggtcttaaaaggcgatctcaacaacgcaccaccagtaatgcctctgttgatccacctgtgtggatacaggaagtgggcgttgacaaacggcaagaagaaggtgagaggagcattatgcgtgggtggcgttgtgacgccaattctggaaatttgtggaaaaccgcaaaggag

SEQ ID NO: 160788 - DNA, 1368 bp, Arabidopsis thaliana landsberg
tcacaatcatcatagtttccgttggctggtacatcgtcgtcacctgtttcaggtaatgcttttgatattctttttctacaatttctctttttagcgctttagttttttctattgatatatcatcgtttccacatatgtaatgtttttcagaaagttgaggaaatgacgtttactcagctgttctcaccgcagcgtatcgaggctactaaagctctgagaatgaagaaggtgcaagaacttgtcaactttttgagtgaaagcagtgagagaggagaagctgttgacatttctcgtgcatctttcgtcacagctctcaatatcatatcgaatattttgttttcagtcaatctcggtagctacgattcgaaaaattcaagtgcgttttcaggagatggtgattggttacatggaatctatcggaaatccagacgtttctaacttcttcccatttatgaggttacttgacttacaaggtaatagtaagaagatgaaagagtactcgggtaaattgcttcaggtatttagagggttctacgatgctaggattttggaaaacttatcgcgtatagatgagaaagatgttaatagcagacactctgcttggatgccctattcgatctccaacaaggatatgaatctgaaatcaacattgacgagatcgaacacctacttctcgtaagtcttagcataatgcataacatgatcttatattagtacactgatatataaaatatgcttgtattgattcaggatatgtttggagcgggcacagacacaaactctagtaccgtggaatgggcaatggcagagttacttggaaaccctaaaacaatggtgaaagctcaggctgagatcgactgtgtgattggtcagaaaggtgttgttgaagagtctgatatctcgacacttccctatctacaagcagtggtgaaggaaactttccggttacatccggctgctccgctactagtcccccgaaaagctgaatcagatgtggaggttcttgggttcatggtgcctaaagacactcaggtttttgtgaacgtgtgggccataggaagagacccgaacgtgtgggagaattcgtcccggtttaagccagagaggtttttagggaaagatatcgacctgagaggtagagattatgagcttacaccattcggagccggacgtagaatatgcccgggattgcctttggctgtgaaaacagtgcctcttatgcttgcttctcttctttattcatttgactggaagcttccaaacggtgtcggttcagaggatttggacatggacgagactttcggtctcacattgcacaagaccaacccgttacatgccgtacccgtcaagaaacgtggccgtaattag

SEQ ID NO: 160789 - DNA, 483 bp, Arabidopsis thaliana landsberg
ctccgacattggagtggtgtggtttttccgtttagcgtggcagcggtggccctttcttggcggacgagaggcttctcttccaagtcttcctggttatggatgtcagtgaagatcggtggagtctttcttggctcaaccgatcggataaaagctgtagttgtggcggaagacgctgcggataggtgggtttccggtgcgtatttgatgtttaacggcagatccagttttggatctgagatggcttatgcgggatttggttgtggaggggttgtctgagccttcacccttccctaaccgccgtgtttttgtctccatcggacgagattgaaaattgctttgcttctggaagattttcagagctacggttttggaagtcagaggcttggaaatgagtggtcattttgctaggttgggggatcgaccaaattgggtggcccgaaaatccgaaaactggaatttatttccgtaaaagctttgggtgcc

SEQ ID NO: 160790 - DNA, 1222 bp, Arabidopsis thaliana landsberg
ctatagcaaatattggaaggcggtacgaaagatgacggttgtcgaactctacaccgcaaaaagggtaaaatcgtttcgaaatataagagaagaagaagttgcctccttcgtcgagttcatcaaacattccgcttcgttggaggaaatagttaacttgaaccaaacgttagtgaaactctctgggagtgtaatttgtagagttggttttggaatcaatcttgaagggagcaaacttgagaatacttatgaggaagtcattcatggaaccatggaggtgctagggagttttgcagcatcagattacttcccggttattggtggaataatcgataggatcacggggttacataacaaatgtgagaaggtttttaagggaacagattcatttttcgaccattgtataaagcatcacctagaagatggtggtagtaaagatgatatagttgacttgctgctcaaggtagaaaggggagagattggacttggagagtttcaatttactcgaaaccacaccaaaggaattcttctagtaagtaatggtaacctaccaatctataacattacattattcttttgttaagtaatttgcttattttgataattacaggacattcttcttgctggagtagacacttctggccacacaataacatgggtgatgacacatttgattaaaaacccaagagttatgaagaaagcacaagccgaggtgagagaagtgataaaaaacaaagacaatatcacagaagaagatatagaaggactcgagtatctgaaaatggtggttaaagaaacattaaggataaacccacttgtgccacttctaactccaagagaggcttcaaaagatgtaaagatcggaggttataatattccaaagaaaacatggatccatgttaatatatgggctattcataggaatccaaaagtttggaaagatccagaagctttcattcccgagaggtttatggataaccagattgactataaagggttgaactttgagttgttgccgtttggtagcggaaggagaatatgccctggtattggaatgggtatggccttgatacacttgactcttatcaatcttctttatcgatttgattggaagcttccagaaggaatggaggttgaagatgttgatcttgaagaatcatatggacttgtctgtcctaagaaagttccacttgagttgatcccggtcctcactcaatggacttga

SEQ ID NO: 160791 - DNA, 2479 bp, Arabidopsis thaliana landsberg
gagaaagttttgggacggatttgaaaatcttctaaacttcaataagttgcgtcttccaattgccgtcaggtattggtgtcgctcgacaccaggggtggtgtcgttcgacacctacgcgctttttagtttccggatttcttcaccagcatgaattctatgttttcctctagaatgctccattatctccaaatgaatcccaaacatgtaaagacctgaacaggactagaaaagactctaaaaaaaacaaatagacttaaaacatatacttaaatcatagcaaaaaccagtaaaaatagggttatatcactgtgtttttgtttcatactcaaatatgttgtttgcttcatccaatatgtctgagtaatctgcttgttaggaatagggtttctcattagggattcatatggtttagtagattgccccttttgctaggttttctgtagaattcttcatctttaattatgcttaatgctagatctagagtaattaactagatcttgaatctagacaatagatatgcccgccataggtatctgtagttggatctattatttgatgagtctggtttataggtgtgtaataagaatcagcttatctactaagatgaacaattgaactcgttaagaatgcatatttaggttgatagtttctcggcttctccggttactattagcaatagatatatggagttttgcagcacgcccaccggttattccataattagagtctgagtttaagaatggttcgataacaacctagctttcattagatctactaaccaatagtttcctgagaataccttgttcctagctctttattaaatcgtttacaacacaatcaatctgctgttttcttactttgttctcttttattttaactcataccttgctagcttaatctcgacatttaactcactgtttgaacaaaagaactccgtgaattcgatcctaaaatactacaattgatctcttatttaagagagtagttctaggtaatttgaaccataccaaatttggcgccgttgccgaaattcttgggaatcatcattgagttttgtttagagatttcgtctagtttttacttctattttgttactcacgcgtttcttgttttcttcttttctgtgtttcaggtgtatgcctaggcaaacaaggagcacaagacagaaggagcttatcaacttgtctgttctggacttgggaaaacttgaacgtaccaaccgaaaaactcataaattagcaatggctgatagagtcatcaaagctgatgcagaaggagttttgagagatgaggaggggcaagcctacaataaggctggtcagagattggatgatcatggactcatcatacctgagaacgccaatgaggatcaggcgcgcctcaatgcgcaattagctgctagagatgcagcaggggtcggtgtcgagcgacaccaacagggtgtcgatcgacaacatcggagcagcacgcggatgcaatcagtgtcgaacgacacaacagaggtgtcgatcgacaccaacaccagattcctgcagctattcctgctgctgcggaaccacgtcgtactcttggggatttcaacaggccagacctgttctctgctaattgatcaccgattgtacccccactattccagagaaacgactataagatgaagcctggctactttgctttagttggccagcatcctttccatggcttatctcatgagcagccaatggatcatatcgagcgatttgaagatcttgttttgagcatgaaggctaatggagtctcagaggactacctactgtgcaagctcttcccttattcacttgctggggaagcagcttcttggctgaagcaacttaaagcaggttccctcaagacttggagaagcatcaagatagccttcttgaacaatttctacgatgatgctaagtctgaggaattgagaaacaagttgtctaccttcacacaagaaaaagctgaagcattcaaggctgcttgggttcgtttcaaggactaccaacgagatttgtccacatcatggtttcagtgaggtacaacttctaggtacctttttcagagaagttgattgaagatactagatggctctagatgcagtgagcaatggtaacttcaatacacgttacccagctgatgctacagccctgatagagaaccttgcttgcagcaacagtaccaagaatgctgacgtcgagagaaagaagattggtggagctgtttcaggaaatcaaatggcagaggtgaatgctaagctcgattcggttcataacttactcatagggaagaatcatgtccattttgcagctgaggaagagaccattgcgcctgagcctgagaatgagtcaaaggaagaagtcttctacacagatggtcaaggatagagggaaccagagttcctcaggctacactcctaaacctacattccaaaagacttggggtaagagcaagggagggtctagagtctacgggc

SEQ ID NO: 160792 - DNA, 1888 bp, Arabidopsis thaliana landsberg
aagaggacgaagacgctctaagtctaagccaagggggagaagaagagaagaggtatgaggaggaaccatacttttgttagagagatgctggaaattgtgatcaactacatgcaaaatgtcttttcgcctaaccacttaccatatttgatattttccttttgccaaattacacaaaccctatcttgtctctcacatatatatccaattaatacacccctgccacttgttaattctcgaccatgtatgtatacttatgtaaagaatatccaaaagctttctttttgttccttcgattttaagcaacttgtgttctcatttctcaatatattaaagaaatcctgagtaaaagtttatagcctccgtgaatcttaggaaattactctagcatattcaaattttttgagacaatatataaatttttctgaataattaaatttacatatctatgctacgaaacttgattaattaaattaaatatatatatataataataataataataataatataacattttttttaggacacaaatatctaatctcactatactctagaagtatttgcaatgcacgatatgtgaatggagaaaagacagaaagagcatgggaaaggatctcgtttcacggatcattatgtctaattattttaccatagaaaagcgacaattataaacaatttgttattcgtggaaaaataatatttaataatggttgtcgtaccctataaactacagccacacattcatacaataagaagttaaaaaaattcataccctaaaggcatcaaccagtgaagggtcagaaacttcccaagatgggtcaaaggacacatgtcagattctcagtgattgacagccttgataattacaaaaccgtgggatcgcttagctgtttcttatccacgtggcattcacagagacagaaactccgcgttcgaccccacaaatatccaaatatcttccggccaatataaacagcaagctctcactccaacatttctataacttcaaacacttacctgaattagaaaagaaagatagagagagaaataaatattttatcataccatacaaaaaaagacagagatcttctacttactctactctcataaaccttatccagtttcttgaaacagagtactcttctgatcaatgaactcattttctgctttttctgaaatgtttggctccgattacgagtcttcggtttcctcaggcggtgattatattccgacgcttgcgagcagctgccccaagaaaccggcgggtcgtaagaagtttcgtgagactcgtcacccaatatacagaggagttcgtcggagaaactccggtaagtgggtttgtgagattagagagccgagaaagaaatcaagaatctggctcgggacttatccaacggctgagatggcagctcgagctcatgacgtagcggctttagccattaaaggtacaacggcttacctcaattttcccaagttagccggcgagcttcctcgtccagtcacaaattctcctaaagacattcaagccgccgcctctttagcggccgttaactggcaagattcggtcaacgatgtgagtaattctgaagtggctgaaatagttgaagccgagccgagtcgagccgtggtggctcagttgttttcttcggacacaagcacgacgacgacgactcagagtcaagagtattcggaagcttcgtgtgcttcgacttcggcgtgtacggacaaagacagtgaggaagagaagctgtttgatttgccggatttgtttaccgatgagaatgagacgatgatacgaaacgatgcgttttgctactactcgtccacgtggcagctttgtggagccgatgctgggtttcggcttgaagagccgttttttctatctgaa

SEQ ID NO: 160793 - DNA, 1928 bp, Arabidopsis thaliana landsberg
atggattcatcgccgccgaagactatcaccaaggcgctgccgcgtttctctgaactcaaacctccgctctcagaagatatcatcgaggcgcttgaccggtccggtttcgaggtctgcactccggttcaggccgagacgatccctttcctctgcagacacaaggatgttgccgtcgacgcagccactggttctggaaaaaaactagctttcctccttcccctagtagagattatccgtcgatccaactcctaccctccgaagccacaccaggtaaggagaattagccgaatatcaagagtagtagcttatgctatatgttaacaatttcaatctcaggtaatgggggtgattatatcgccaacgagagagctatcagcgcagatacataaggtggcaagagccgtttgtgtcgactttgcgaaatgtgaactctgtcctgcttgttggaggtcgagaggtggaagctgacatgaatactctcgaagaagaaggagccaatctcttgatcggcactcctggaaggctttcagatattatgaaacgaatggagtttctggatttccgaaatgttgagattcttatcttagatgaggccgatagacttttggatatggggttccagaagcaggtcaattacattatatctcgcttgccaaagcaacgtaggactggcctcttttcagctacacaaacacaagctgttgcagacctggccaaggctggccttaggaacgttacggaagttagattgggagatgagtcaaagtcgaaaacgtcttctggtctgtattgtgaggtattattattgtaaggtcaatatttatatacgtatatgtgtttcgggatagtaagtttatttcttcttcgtgcctctgcagtatttgaaatgcgaagcagatcaaaagtcatctcaactagtgcatctcctgatcgagaacaaaaataaaaagcttatcgtgtaagttttggcacaacagactcatcaaattaagcatccttttacagatagtttaactagtatctcttctgcagattcttcatgacatgtgcttgtgttgattaatggggactcgtacttccaaaaattcctaccctcaagtccatttccttctttcccacccatgggaagatggatcagaaagctagagacaaggcattagctttgtttacagaggcatcaagcggtgtccttttatgcacagatgtagctgcacgtggacttgacattccaggcatcgattacgttgttcaggtagattgattaatgtttgttatgccatctttgttgcaatggattttgacaggttattgtatgtaactggtgcagtatgatcccccacaagacccagatgtatttatccatagggttggcaggactgcaagaatggaaagacaaggtagtgccattgtgtttttaatgcccaaggagacagactatgtagagtttatgcgcataagaaaagtccctcttcagaagagaaaatgctctgagaacgcttctgatgtcatcccgattgtaagaaaacccccacgtatctcttttttctctctctctctctcgctctcgtccacagggtgtggtttaataataagtgctacaatgtaaaatgcagatacgttcagtagccatcaaggaccgggcagtgttggagaagggattacaggcatttgtttcctttgtccgtgcttataaggagcatcaatgctcttacattttcaggttcatttctttccttgagttgctaaaatatgttagcttttgtaactcaattctttttttccccttcaatatacagttggaaaggacttgaaatcggaaagttagccatgagatatggcatcttgtctttaaacttacatatctgaagttaaacaagacagaattggcattgtcggttttacacctgtccaaggcatcacgtttcgtt

SEQ ID NO: 160794 - DNA, 2410 bp, Arabidopsis thaliana landsberg
  unsure (1)..(2410): unsure at all n locations
gctgatatgtaattggtccttatgtgatgatacacactcatgttcaactgaatcagtatgcatgatttaaccgagaacttttacgatgatatcaagttcttggataaggatggtgaaaagccaagaagcttcggccgtaataaaaggggagggccattcaagaaaagaaaggtaactttttttcttattctactatttttttctcaaatattctgcctgcctttttttgtttttgtttttcagtttcttttgtgtttgacaatgtattgttcaattttcgcagacaaggcactgatatggatacaccagtggttcctttagctgcttcagtgcaccaattttgttgccatgaaaaagatacaaattttcgatttgcttttatgattaaatgttgaaagtggtgaatgtgagaacttgttatcagttttagtattcgttcatggtcatgctcttgcagtaaaattaggaagagaccttttctctttagctaaatttagcctgttactactgaaacttcgttatcatttttaaaaagagatgtcaccaaatctgattgaaaacaaacaaacaaaacaaagtagtgtcgatctatttcttttctattcccattagcgatgggaaacagttcgagctctaacaccaatctcagcaaccctaagaacagacttctagaagatcatcaccaccaaagaaaccaagcacaaaaccacagcaactctgctcggacctctcacctaagcttcttaagatctcctctgccatggctcttcatcttcctcttcttcctccctttgcttctcatctctacaaccggaggaggtggctcacgcaagacctgccgtccctcttcttctacctacagccacctgtccctagtcgacaaagcaaactcatcttcctctgttgttcccgaggaagaagacgacgatgtgcctccacgtgtccccgctctttacccgcagcgaccaaggatgttcaacacgacgcttgatcacatcgttttcgggattgccgcgtcctctgttctgtgggagacgagaaaagagtacatcaaatcatggtggcgacctggtaaaactcgtggcgttgtctggattgacaagagagtcagaacttaccgaaacgatccccttccagaaatcagaatctcccaagacacctcacggttcaggtacttactcatctctacaatatctgacgtgttttacaagaaatctcttattcaaatcaagaagtcatgttttaggtacacccatccagtaggggacaggtcagcggtgaggatatctcgagtagtgacggagacgcttcggctaggcaaaaaaggtgtacggtggttcgtgatgggagacgacgacacagtgtttgtggtggacaatgtggtaaacgtcctttcaaagtacgaccacactcagttctactacgttggtagctcctcggaggctcacgttcagaacatcttcttctcatattcaatggcatttggaggcggtgggttcgccatcagctatgctctagccctcgagctctcgcgcacgcaggaccgttgcatccaccggtatcctggtctctacggcagtgatgatcgcatccaagcttgtatgactgaacttggtgtacccctcaccaaagaacctggctttcaccaggtgtcattttatacgtttcctcgatgtttattaacttcggtttggtttcggttcggattagaacggtttatctggattgaatacgtctaattttaatgtttctatgtatgcagtacgatgtttatggggacttattggggttattaggtgcacacccagtggctcccttggtgtcgctgcaccacatcgatgtggtgcagccgatattcccaaagatgaagcggtcacgtgcactacgacacttgatgtcttcagcagttcttgacccagccagcatattccagcagtccatcnnnnnnnnnnnnnnnnnnnnnnnntccatctcggtctcatggggtttcgtagtccagataatccgaggcatcatatcccctggcgaacttgagatgccttcaagaacattcctcaactggttccgcaaagccgactacattggttacgcgtttaacacgagaccagtgtcgaggcatccgtgccaaagaccatttgtgttttacttaaactcggctaagtatgatgaaggacgtcgccaagtgattggatactacaacttggacaagacaaggcggattcccgggtgccgatggaggctcgattcgcctggaaagatcgattcagtcgtcgttctcaagcgacctgatcccctccgatggcacaaggttggtccacatcttctctttgcttcattattaacaacttgcatcaaatatagtcataccggtttggttttggctagtcaattgacagagataaccggctga

SEQ ID NO: 160795 - DNA, 1694 bp, Arabidopsis thaliana landsberg
aggtaacacatcaggttgtaagatatatttcccggtttgacagcgggagctctttatcaacggtagtgtcggtgcagaagatagtggtggtggtgcaggtgacagcagtggtccagacgtcaacaacggtaaagggggcagtataggatcttctaataacgacggccgtggcagcagtgtaaatggtaatggcggtaccggtggtggccattctgtaggaagcgggggtgactgcttcaaacaccgtggtctcaccgaaactacaatatctctcgtcttcgtaagcactttgattctttatgcgttgaaacagtaattacatgttattttatttctgtttcaaagttaaatactccattgtatatacactttgatcatgtctgttgaacaataaaaaaaatgtatcctatgtgtttgaattaaatgtgggtagctttcctcagccggctcataataataacttgtggaggaaattactctcctgggtcctggccattaaggttttgccacgtggtattaagccgttaatcttaaaaagtttaacgtaataaaaaacatcgcaacgacaagttctaggatccgacggttcatattgatcgaatgacgatgatgactaccaatcacaaggctccgcatcaatttaccagtccccattacccacgtgttttttaatttctttttttgtttgcatatatatacactaatgttacaacatacaactatatcttcattttacgaaacgaaactttgattttggggttcggttctgttcttcatctctctctgcctcccgattctgttctggtgatttttttggttgttgtgtggattataatccgatatcaggaagaagacgtcatgtttttattcgattggttctatggaatcttggcctcgttagggttgtgcaaaaaagaggcgaaaaatcttgtttttaggcccccacaattccggaaaaaactactttgcttcacatgctcaaagatgaggtaggctttattacttctacgctctctcttcaactaatatatgtattactgagaaattttgtgattcttgtaatcgaagatgctttaatatcgcttttggtgttgcagagattagttcagcaccagccaacacagcatcccacgtctgaggaacttagcattggcaaaatcaacttcaaggcctttgatttgggtggccatcagattgctcgtagggtttggaaagactactatgccaaggttcacatcctaatcctaactagattacatgttttgtgtttattgatttgcttatgatggaaccaaaatcaaatctttctctgtgtgtgtgtataaactataaaggttgatgctgttgtctacctagtggatgcttacgacagggatagatttgtggagtcgacaagagagctagacgctcttttatcagatgaagccttagcaaatgttccctgtcttattcttggcaacaagattgatataccttatgcatcctcagaagatgagcttaggtattacttaggtctcaccaatttcactaccggtaaaggcatagtgaatcttgaagactctggtgttcgtccccttgaggtcttcatgtgcagcatcgtccgcaaaatgggttatggcgagggttttaaatggctatctcagtatatcaagtaggaaaccaagacagcattggtgatttgcttcacgttttat

SEQ ID NO: 160796 - DNA, 663 bp, Arabidopsis thaliana landsberg; identical to SEQ ID NO: 39631

SEQ ID NO: 160797 - DNA, 687 bp, Arabidopsis thaliana landsberg
tttctctatctatagtgaaagtcttgaaggttactcaaaagagataagggaactatgcaaaaggttgttgaagtatatagcaataagcttgggtctaaaagaagagagatttgaggaaatgtttggggaggcagtgcaagcagtgaggatgaattattaccctccatgttcaagtcctgatcttgtcttaggacttagtccacattctgatggaagtgctctcactgttcttcaacagagcaagaacagttgtgttggccttcagatcctcaaagacaacacttgggtccctgttaaacctcttcccaatgcccttgtcatcaacattggtgataccattgaggtattaattttaccatatcaatttcctataattattatatcacaatttaaatgaagtattttaatttgtggaaattatatatatatatgtaggtgctaagtaatgggaaatacaagagtgtagagcatagggcagtaacaaacagggaaaaggagaggcttacaatagtgacattctatgcaccaaactatgaggttgaaatagaaccaatgagtgagttggttgatgatgagaccaacccatgcaagtatagaagctacaatcatggtgactatagttatcactatgtctccaacaagctccaaggcaagaagtcccttgattttgccaagattctcaattaa

SEQ ID NO: 160798 - DNA, 2882 bp, Arabidopsis thaliana landsberg
atgagagtctcaggtcagagtatcatagccgtatctctattcacactctcactctacatccatcgtgttcaagcccgtcccttcgttctcgttctctccaacgaagatctcaacggcgggtttgatgataacggcgcctacgaatcctccgatttcgatgagtttggtgaatccgaacccaaatccgaagaggagcttgatcccggttcatggcgtcgaatcttcgagacaaatgattccaccgtccacgcctctgcgtcgccgcagtattactccggactccacaaaattctctcggctgcgagtgaaggaaacactacattgatggaggaagcggtttcagagatagattcgtctgcctcgtcaggagatccacacgcacaatcagtgatggggttcgtatacgggattgggatgatgcgtgagacgagccgaagcaaatcgattttgcatcatcatttcgcggctgcgggaggaaatatgcagtctaaaatggcacttgcttttagatatctaagacaaaatgtaagcaagcaacactgaacatttcaattggaacttatctaattttgaagttttttggtttcttgtgatccttttcacagatgtatgataaagctgttgagttatatgctgaactagcagagacagcagtgaatagctttttgatatccaaggattctccaatggctgagccagttagaatccacattggaacagaggagaataaagatgcactaaggaagtcacgaggggaggaagatgaggattttcagatattggaataccaggcagagaaagggaattctgtagcaatgcacaaaattagactgttttattactttggtttgagaggattaaggcgtgatcacgctaaggcgttgtattggttttcgaaggcgggagagaaaggagagcctatgtcaatggaacttttaggggagatttatgctagaggagctggtgttgagagagattatgataaggcacgtgaatgtcttacacttgcggtaaaacaaggtctctattcggcgtttaatggccttggttacttgtatgtcaaaggctatggagtagataagagaaactacactaaggtaacttttgcttcatacttactaggcttgcttctttatctgacttgaagaatttagttttacttagaaacaatgatgatggaattgagacatgggatagatttttgactgtatgtaaaacattctaaattagtcttaacaattaaagtaccaaactgaagcacatctcatctttagtggtgatcaggacatataaagagtcgcttagtggcactctgaaaccatcgtagatgcagtttttgttttgacttttccttcaatatattttatgacctaaagatatcccgttgatatttcccttcaagtgcaggcgagagaatactttgagatggctgctaataatgaagatcctagcgggcattataaccttggagtgttgtatcttaaaggcattggagtcaagaaggatgtgaggcatgcaaccaaatatttctttgttgctgccaatgctggtcaaccaaaggctttttatcaactcgccaagatgttccatacaggcgttggacttacaaagaacttggaaatggtaactatcttccgtaccatgaatgtcatatacaaatagtttttatatctatgcagttctgttaaaatgaaactccaacttttgttaacttttaaacttcagaagattaattgactggagctcattggcaatatttcaagattcttgcacaatcttacaagaattttctttttactatttgaggttggggtggtgtaatttgctaaaacgtataaccaattacagaaatctctgttaagttttcactgtgtcatgcttttatttctatttccatcaatttaaggtgtgtttgtagttttgctctgagcactatgaatacttcattgatggattttgtacttcaaattccttgttgtaggcgacaactttttataagctagtagcagaaagaggaccatggagttctctctctagatgggctcttgaagcttacttgaaaggtgatgtgggaaaggcttttatattgtattcgagaatgtcagagctcggttatgaagtagcacaaagtaatgctgcctggatcgtcgataaatacggggaaagaagcatgtgcatgggagtgtatgggttttgcacagataaggagaggcacgatcgggctcattctttgtggtggcgtgcctctgaacagggaaacgaacatgctgcattgcttattggagatgcatattactacggtcgggtaagtctacttacgcttgaagtttatgaattgtgaacatacggacaatggatataattgtcacttatctcatcccattcacatttgatttttccaagagaacatatttctcattcatgaaatctagacgttaactgattctatgaggctcatactcatgttcacagggtacagagagggatttcgtgcgtgcagcagaggcgtacatgtatgctaaatctcaatcaaatgcgcaagcaatgttcaacctcggttacatgcatgagcatggagaaggtcttccttttgatctccatcatgctaaacgttactacgatcaggccctccagagcgatactgctgccaaattgcccgtcacgcttgctcttgcgagtgtatgggtccgcagaaactatgctgatactgccctggtgagagagagggaaggagagtgatgatttatctgttaatggaattgtccgagtgaaaatggatgaccaaggtcacgttttatggatgcaggtgcaagtactgaattccttaccagaagtgcatcaaaaggtggtggaatgggtagagaatgggatgttggaagaag

SEQ ID NO: 160799 - DNA, 1105 bp, Arabidopsis thaliana landsberg
  unsure (1)..(1105): unsure at all n locations
aaaagggatttatataccctattgagtccacgtcacaccgtcgtcgttaatcgtggattaatttgttttgggcctaactgaactataaatccacttgtttagtttttacggtgaaaagtcacttttgccctttagaatccaccaaagtcgccactgtctttcccaatttctttgaacttttcaggtacccttaaacttcatcttcttcgatttttaccatttttttcaatttgcaatcagaaatcgaagcgatccaaattagtaagctcgcttatgcttatatccggtctggcttcgttaatcgtcgatgtcaatttgcggcgcacgttacgtccatccccaaccttttcttttccggcgcatcttagccgttgcattatcacttcccgttactcctcccgtacatctctaaggtttccgattcaaatatctcgccaccaacaccgtctatcctacttttcttcatcctcttcgtcggagcaaagcagaccaacttcctcttcccgaaacagtttcagtggtcacggtcagcttgatagtgatgannnnnnnnnnnnnnnnnnnnnnnnnnnntcttccaaagttcttacattgcctaccgtattaacacttggtcgtgtcgccgccgtcccgcttctcgtcgcaagtacgttactttgttacctccaattgttttggattcgaatgtgtcacagtatttgaactaataagttatcatgatccattctgggtttcctgagctcaactttttggttttgcttgaaaacaacattaaacacagatacacttaatctttggctaatgtggattctaagcttttctgttcgttttatcgaacgtctagtttccattactttaagttctaatctagtttttttggattgtatcttatgtaaaattgttcattcgtttgtttttgctcatagccttttacgttgatagttggtggggaacaactgctacaacaagcattttcattgcagcagccattacagactggcttgacggctatcttgcccgcaaggttctttatttttaccatcatctgtgtcttcgaccgcatttcacattgcaatcttaacgggtctgatcatgtacaaattga

SEQ ID NO: 160800 - DNA, 2028 bp, Arabidopsis thaliana landsberg
tgtgccttcacctcttctagaagctcttcatagacttctcatgtgttcggcccactctcttatagtacatatccaatactaggcctttcttatttgagtcttgatcaatattccccctcaagcgcaagacttatgcaagagtctaagcttggaacacatgattcatcacctcattaaaaaccttagtaaagaaaaccacatgggagaaaactttactaagggaaaaagagtgtgatgtccatggttagggaacatgagatcaagagtgagatagatccacaagtcctaatttgccatgtatgaagttgcaaactttgagacttgcggctttggtgaagatatccgccaattgatcttcacttcttgtataacacggtagtgtgactccttcgatgatcttctctcggactttatgacaatcgacttcaatatgcttggttctctcatgaaacaccgaatttgaggctatgtatattgctgccttgttgtcacaatgcatggtgataggcgtgtgttgttcaatggcaagatctttaagaagagctttaagccaagtgagttcgttggtgagctttctcattgctctatactccgattctgcactcgaacatgagaccaccttctgtttctttgtcttccaagttgcaaggttacctccaatgaacgtacaatagccagttgtagatcttctatctcctctatcacccgcatatctcctctaaagtctataaactaaaatctaaaatcaaaaactgaatccaaaatcagcatccattcagggcctaagtttgatatttttctgcttttgcacatttgcttcctcaagtccaccggatgatccggtcaagtgtgagtcaggaaacaacatgtgcactgtgacgaactcgtacggagccttccccgaccgttctatatgtgaagcggcaaaggtggagtaccccaagaccgaggctgagttagtctctatagtggctgcagccactagagccggccaaaaaatgcgggttgtgactcggtactctcacagcatcccaaagctcgtttgtactgatggaaaggacagtgttctcataagcaccaagtttttaaacaacgtggtgggaaccaatcccgaagccaagactttgacagttgagagcggtgtgacgttaaggcagcttatcggagaagcggctgaattggagctggctttgccacacgcaccatattggtggggactcacggttggaggattgatggggacaggtgctcatggaagttcgttgtggggtaaaggaagtgcggttcatgattatgtgagtgagataagaatggtgagtcccggtttggcttctgatgggtatgttaaggttcgggttcttagcgagacaatagatcctgatgaatttcgtgcagccaaagtttctctaggcgttctagctgttatctctcaagtaactttcgagttgcaaccaatgttcaagagatcgttaacctatgttatgcaaaacgattcggatttcggagatcaagccgtgactttcggggaaaaacatgagtttgcagatttcttatggttaccaagccaaggcaaagtggtgtatcgaatggacgaccgagttccggtcaacacttcaggcaatggcttgttcgactttttcccattccgtccacaactctctgtagcgttagccatcattagatccttaggtaaatttattctttctttctcaagataactaatacaaaatatatttgatcatttgcataatttttttggtaaaaaatatttgatttgcatagttataatgtttcttataaacaactgcttcatgatatgaagaggagagtgaagagtcatccggagatgcaaacaacaagtgtgcgagagcagagcaaataacgtcgtttttgttttccatctcctacggtgtgactaacaatggtaaaaatattcgttcacttacttatgcatctttctattgtttccatatgtatgagactattacaacaatctatcacatattcatttgtaatttccacgggcag

SEQ ID NO: 160801 - DNA, 1551 bp, Arabidopsis thaliana landsberg
gagcttctacttgattcagtaaatgggctgcagcccctttccaaattcaagcctgttaaagtgaatgcttttgggtcgaacaagattcgattgttggggttattgctaagtttgacagtgactggagtgggtttgctgctgccacagagcttgaaaaggaatttgagacccaagggtccagcaaaaaggactggactgagaggagcggagattcagagtcaaaggcttatggttggtgtgcacgtgcagacgactttgaatctcaaggtccaataggtgagtacctctccaaggagggacagctaagaacagtttcagatattttgcaaaacaatgtgcaggatagaaacactcttctggacgtactttcgaatatgattgatatgacaaacgaagatctgaacaaggcccaacacagttacaacaggacggcaatgtcactgcaaagggtcctagatgagaaaaaaaacttgcaccaagcttttgctgaaggtatttactcacacactgatatgtttccgactcatatagcatttagggtatctgactattttttatacttttctctcctcagaaacaaagaagatgcagcagatgtcacttcgccatatccagagaatcctatatgataaagagaagctaagcaatgaactggatcgtaagatgcgggacttggagtctcgggccaaacaattggaaaaacatgaagcactaactgaactggagaggcaaaagcttgatgaagacaagagaaaggtaatattttgtcattatagtatacttatgcgttgatgtttccagtgtactgatgatctttttgttttcctttgttatggcagagcgatgtcatgaacagctccctccagttggcttccctggagcataaaaagacagatgatcgtgtcctaagacttgtggatgaacacaaggtctgttttcagtaaatggtcaaactagatttatctgtgcgtgtcaaattccacacagtttaaaaaaaaaaaaagttccaaaaaaagatgtcttgtttgcgtttaaagattccaacattcttctttctgaactccagaggaaaaaagaggagacgttgaacaagatccttcagcttgagaaggagttagacagcaagcagaaacttcaaatggagattcaggagctgaaaggaaagctgaaagtcatgaagcatgaggatgaagatgacgagggcattaagaagaaaatgaagaagatgaaggaagagctagaggaaaagtgttctgagttacaagatctagaggatactaactcggccctcatggtaaaagaacgtaaaagcaatgatgagatagtagaagcacgcaaattttttattacggtaatatattttaaatgcttccatgtttttgggtgctagtgtaatatgtagagtgaaatgttggtgacatggtcaaacgctaatcggttgagaaatctgtatgatgaggatgcacaagggtgatttcccaactgctttaggtttctgttaaacagcgttacagatgctcaccgtgatataggtccataatctgtgaatag

SEQ ID NO: 160802 - DNA, 1354 bp, Arabidopsis thaliana landsberg; identical to SEQ ID NO: 16923

SEQ ID NO: 160803 - DNA, 3729 bp, Arabidopsis thaliana landsberg; identical to SEQ ID NO: 222

SEQ ID NO: 160804 - DNA, 7387 bp, Arabidopsis thaliana landsberg
  unsure (1)..(7387): unsure at all n locations
caagctcaagtgcgccgatttatccgtggactaaggatagagatccgcaaccattgtttggtccggacattcaactcggtttccgaattggttgaaagggcagcaatgattgaggaagggatcgaggaggagaggtacttgaaccgggagaaagcaccgatccggaacaatcaatccaccaaacctgcggataagaaaaggaaatttgacaaggtggataacactaagtccgatgctaagaccggggaatgcgtgacctgtggtaagagccacagcggaacttgctggaaggccataggtgcatgtggccggtgtggaagcaaggaccatgcgatccaaagttgcccgagaatggaaccagggcagtccaaggttctcggtgaagagacaaggacttgtttttattgcggaaagactggacatctaaagcgagagtgccctaagttgactgcggagaagcaggccggacaaagggacaatcgcgggggaaatggactgccgcctcccccaaagcggcaagccgtggcaccgcgagtttatgagttgtcggaggaagctaacgatgccggaaacttcagggcgatcactggtacgttctcacaactccctattcattatttcaataactgcattgcattgcatcatgcatatgggaaaggggaggtactcagcattctaagggaatgtgtagggaccttgagagtaggtgacgtagtaacgcacactctatttgattctggggctacacattgttttgttagtccagaattggttgaaataggtgggttcaggaaagaaccaaacaccgattatggaatggtacgagcggccggcggacaggcaatgtatccgaccggacttgttcggggcatctcggttgtagtgaacggtgtcaatatgcccgcggacctaatcattgttccactaaagaaacatgatgttatcttagggatggactggttggggaagtacaaggctcacatagattgtcaccgaggacggatacaattcgagagggacgtgggtatgttaaaattccaaggaataagaacaacctcgggaagcttggtaatctcggcaatccaggctgaaaggatgctcgggaaaggatgtgaggcatatttagccacgatcacaaccaaggaagtgggggcgagtgcggagttgaaagacattccgatcgtcaacgagttctcggacgtgtttgcggccgttagtggtgtaccaccggaccggtcagacccgttcacgatagaactcgagcccgggacaacccccatatctaaagctccgtaccggatggcaccggcggaaatggcggagctaaagaaacagttggaggagttgttggataaaggattcatcaggccgagtagctcaccatggggtgcgccggttctgtttgtgaaaaagaaagatggtagctttaggctatgcatcgattatcggggattgaataaagttacggtgaaaaacaaatatcctttaccccggatagatgagttgatggatcaacttggaggtgcacagtggttttcaaaaatcgacttggcctcaggatatcaccaaattcccatagagccaacggacgtgaggaaaacggctttccggacaaggtacggccactttgagtttgtggtcatgccannnnnnnnnnnnnnnnnnnnnnnnnncttcatgaaaatgatgaatggggtgttccgggatttcttagacgagtttgttatcatcttcattgacgatatacttgtttactcgaaatcttgggaagctcaccaagaacatctaagggcggtgctggaacggctaagggaacatgagctatttgcaaagttaagtaaatgctcattttggcaaagaagcgttggttttcttggtcatgttatctcggaccaaggagtatcggttgatccggagaaaatacggtcgataaaggagtggccacgaccaaggaatgccaccgagattaggagttttctcggactagcggggtattaccgaaggttcgtaatgagttttgcgagcatggcccaacccttgactcgactgaccggaaaagacaccgcattcaactggtcggatgagtgcgagaaaagcttcctggagttaaaggccatgttgactaatgcaccagtattggtcttaccggaggaaggtgagccatatacggtttatacggacgcatccatagtgggactaggatgcgtactgatgcaaaaggggagtgttatcgcatacgcatcaaggcaattgcggaaacatgagaagaattaccctacgcatgatttggaaatggccacggtagtatttgccttgaagatttggcgatcatacttgtatggtgctaaagttcaaatctatactgaccacaaaagcctaaagtacatattcacccagccggagttgaatctaaggcaaagaaggtggatggaacttgtggcggattacgacttggatatagcgtaccatctgggcaaggccaaccaagtcgccgacgccctgagtaggagacgctcggaagttgaggcggaacggagccaagtggacttggttaacatgatggggacattgcatgtgaatgccttgtctaaagaagttgaacccttagggttgggagccgccgatcaggccgacctgcttagtaggatccggctggctcaggaacgggacgaggagataaaaggatgggcactaaacaacaagaccgagtaccaaacctcgaacaatggtacaatcgtggtgaacggtcgagtatgtgtgccgaacgatagggcattaaaggaggagatcctaagagaggcacatcaatcaaagttctcaatccatcctgggtcgaacaagatgtaccgcgaccttaaaaggtactaccattgggttgggatgagaaagacgtggccagatgggtggccaagtgcccgacttgtcaactggtcaaggcagagcatcaagtaccaagtgggttgttacaaaacctacctataccggaatggaagtgggaccacataacgatgaacttcgtcactggactgccaacggggatcaagtccaaacacaatgcggtatgggttgtggtagaccgattgactaagtctgcgtacttcatggcgatctcggataaggatggagcagaaatcattgccgagaagtatatagacgagatcgtgcggttacatgggattccggttagtatagtgtcagaccgagacacaagattcacgtcaaagttttggaaggcttttcaaaaggccttaggaactcgagtgaacctaagtactgcctatcacccacagtcggacggacagtccgaacgaacgattcaaaccctcgaggacatgttgagggcatgcttcttgaattggggaggaaatagggagaaatatctaaggttagtagagtttgcatacaataatagttttcaagctagtattggtatgtctccctatgaggcgttgtatggacgagcttgtagaacaccgttgtgttggacgcccgtgggcgaacgtcggttgtttggacctacgatcgtggatgaaaccacggagagaatgaagttcttaaaaatcaagttaaaggaagcccaagatcgacagaaaagctacgccaacaaacgtcgaaaggaattggaattccaagtaggagatttggtgtacttaaaggcgatgacctacaaaggggcagggcgattcacctcaaggaaaaagttaagcccaaggtatgttggcccgtacaaggtgatcgaacgagtaggggcggtggcatacaaacttgaccttcctcccaaactaaacgcgtttcacaacgtcttccatgtgtcacaattacggaagtgtttaagtgatcaagaagaaagcgtggaagatatacctcccgggttaaaggagaacatgacggtggaagcatggccggtacggatcatggaccgaatgacgaaagggactcggggaaaatcaagggatttgttaaaagtcttgtggaattgtggaggccgtgaagaatacacttgggaaaccgagaataagatgaaggccaattttccggagtggttcaaggagatgggtaaagatcaacttgttgcggattcgaggacgaatccaattcaagggggggagacttgtaacgcccgcgatcctcaataggatcgttggctaggacttggtccgagagaggaaggtggagtctcggacaagtgagaaggagctggccataagctcggacaaaggggaaatcatgcaggctaagctaggatcgtaaagaaatcacttgggtcagctcgcccaaagctcaagctcagctggaaggagtgacggttactcaggtcgagtgacagtccagctcgggcagctggacgagtgacggacgagctcgaggcagctggacgagtgacggttgaacttgaggtagctggacgagtgacggacgagctcgaggtagctggacgagtgacggacgagctcgaggtagctggacgagtgacggacgagctcgaggcagctggacgagtgacggactagctgggcaattatgggcgaagagatacaactcttcggaaaggtgcaactcttcggaagggcgcaactcttcggaaaggtgcaaagaacggatgtgttgattcgggaagcatccactcaccacaacacaccgaaaacacaagaaactcaccattaaaactctctccctcttgggagaataaatagtcttaggattcggtagccgggctgtggccggcaataaagaaggagggtcggatcgacctaacctcgagaaggaaggtaagggatcctagactttgagtctaagggttctaggatgtgagttagtagtcggatccttgaaaggatcgactagagggctgggtagtatccgggtcatgtgcatcctacacaagactcggtccaggtagggatcggctgaggcggggacgcggctcggcggaggaccgacgggtcttaactgacctgccaagaatcggccggactgatgcgcgatcttcccctctctgaattctctccacgtatccgagtagtgtatggcatatagagcattgcatggacttgcatatgattaagtaaatgagattacttatggctctatgactttcaggaacaaatggtgatcgtgggaaggacttggcttaagcgcgagagactcaaggccgggctgatgggtggtgatagttcggatagtctagggatcgattatatgacttgtaatagcttatatgcaaactcataggttgtatcgaatcctttgcttaatcaataaagtatccgattggttgtttactctattcgtctcatatattgaatcaaggaatcatatggaacggattagactaggaaagaacctcataaacggttagggccgagtcacttagtggcttgggtcgagagaactcgtctggactttaggcagtccggatcggggcctttcagtgattttgttagatggttaaaattctatgtaagtaatatttggaaaatttgatatcttaattacttatgttgaaatgataaacttacataatatttactttatgtaggttactaacggatgtggaagtgaagctttacaactttggttgcatgagatcgttcaaaaaccaagatctaagatcacaaccgcaccgatgtacttcactcgcggctatacctttcatacatatccaaatgaaagtcgaagggcaactgcagattatggaatccatgtcgaaggtgaaacagagtttaatgagattctacaacaaattcttgaagtcgaatatccgagacttttgaattggaaatgcgtccttttcaagtgtgattggtttgatcttgtgaccggtcgaggggtacgggtaaataacttaggtgtggtcgaggggtacgggtaaataacttaggcgtggtcgatgtcaatgcaaacaagacttattcaaagtttgaaccattgcacaggaaaaaaccctttcgtcttagtctacggaacggaatgcgtaattccagccgaaatgatagtaccaagcctacgtcggagtctatctcccgagaacaaccccgataatactcagaggctcctcgacaaactcgatctgctcgatgaacgaagagattcagcattggttcgcatacaaaactatcagaatgaaacggctcggcattacaactcacacgtccgacaacgaagattccatgaaggagatcgagttctccggaaagtttttcaaaataccgtcgagccaaacgccgggaagctcgggacgaactgggaagggccatacttaatctctaagtcatccgacccggagtatatgagctcgccaacttaagcggcataagccgttccaagatcatggaacgcaatgcacctaaggaaatactacaactaaatccgaggtgactaaacttgaactacgaggtggcttgatccctgaaaagggtacgtaggcagctcgtcttcggacgagttcagctacccccccccattaaaaaagggggagtgggtccgtatattcatactcccatttctattatcttgtaggtttttgaaccgaaacatgaataaaaattctttgcaactttttactcggctaatacaatgagcgacggctcggagtatccattacgcctattcggctatagcgcgctatacaaatacgaggtgaaacttatcagattatttctgataagaaatttttatcttcagaaacccggttatacttttaacaccggtatcccagctcgttcctaaacgctggccgagaaatgaatacgatcggatcgcaaccgagatattataatcgtccataacttttggatttcaaaacgattcgggactaataaaccataacttttggatttcaaaaagtgacttaaattggataaagccgtccaggcacaggttctacataccatcggataaagccatccaagcataagtattataatcgagcagaaagagaagaggaaaacaaaaaccgcctcaggtccataatcgagatcttcagatgggcggttatccttggcagggaggagcgatccagcttgctctgtaattcccgcctcgtcggttaatgactcgaccgacctatgaccacccggactcagaggagcggactcgggagctggagctttgagatcatctttcagctcggccatgaagcgattaagattaacctcagcatcagcgaaatcttttaaccactcatcgacctgctccctctctctctccagaactccgccaccttcgagcgcctcgatcagctgcgcgttggctcgcgcttgagacaagtacatgaatcggtcattgacctcatcaaggagcgatactttgtgctcggcggtccttattttggcaatgaaggtctcggaaacctcccacctcgtcgtctgaatggcccgagccacct

SEQ ID NO: 160805 - DNA, 830 bp, Arabidopsis thaliana landsberg
tacctttgaagttacttggcaaggctggtgagatgggcactttggaatctccagaggatcaaagcatcaaaacgctttatgttggtgggctaaactcgagagtccttgagcaagacattcgtgatcaattctacgcccatggagaaattgaatccatcagaatcttggctgagaaagcatgtgcgtttgtcacttacacaacccgagaaggagcagagaaagctgcagaagagctcagtaacaggctagttgtcaacggtcagaggctaaaactcacatggggaagacctcaggttcccaaacctgatcaagatggttctaaccaacagggcagtgtggctcatagtggtttactacctcgagcagttatatctcagcaacagaatcaacctccaccaatgcaacaatactatatgcacccaccaccaccacaacctcctcatcaagacagaccattttacccatcaatggaccctcagagaatgggtgcagtcatttcgtcccaagaaagcggttcaagcaccagtgacaacagaggagcttcttcttcttcttacacgatgccaccacatggccactatcctcagcaccagccatacccgccaccatcatatggaggatatatgcaaccaccttaccagcagtatcctccttaccaccatggccattcacaacaagctactcatgattacccaccaggtcctggttcaagacctaatccacctcctccaagttcagtctctgctccaccacctgactcagtgtctgcagcaccttcaggatcctctcagcaatctgctgacgctgctgttactactggttcgtctcaa

SEQ ID NO: 160806 - DNA, 2688 bp, Arabidopsis thaliana landsberg
atgcggtggaacaacgcagcgacggtgctctgctatgattgtgacacgtgtagagctggcgttttagagactgtacgtcgcgattggcacaaactctctctagtgaacgtcattgttgttattttcctcatagctgtttactgtgttggctgttgcgcgtttaaaaacgccaaacgccctcaacattacggcttcccttatggacgttacggcatgtccaaatccagacctggatgggaacagtcctggtgagattaactgcttagagaattacaatattttttttcattgaatatacgtttataggtttgttctcttttctaatgcaacaattatttttattattttcgcggcatgtaggtcaaggtggtggcatgggagagatcggtattagtgaaaaatatttatgttaatgttttcgaatatcacggttcaactttttggtttccaatatataattattgattttgaacagaacataaattttttataatgaaatttctaattcgagaaaaaaaaatttagtcacttccgatccacaaaatctgagttaagaaattgaaaaaaaagagctaaatgatttatgtttatggaacattattttaaatgttattttaggtagtcaaatgggttatctttgggccagacattagtcattgaggaggcccacagaggtatagaactagagtaacgaagccttgccttgaagacaataatcgcttctcccacatcggaagtttgaggatggatactcgtctgtgacatagtataaataaagaacatggtcgaagcatgcaaattacttacctggacggggtcaactcgtgatcaagaagacgagtggcctaggctagtgacttccattgcacataacggaagggtgcatagcttaaggtcttcccatgtggaagagcctgcgtcattatttgtggcagagggggtttgcgttcgcgcagcccctaccattcccagttgtcaatcttttgttcatgaatgaatacccatggcctaggctagtggcttcctgcacttgaggtgcgctaagcctaaggtttccccaaatggccaagtgggagatcctgcgtcattatttgttgccttggggggctgcgttcgcgcggcccattccatccgcaatagttcaatctttttagctctctggtaactgttataacatctgaggtctttctttaattgttcacgtttttggtggagctattttattgaaggttgttaatttgactttggagatgcaatcttctaatcaaatctccacgtgagaagcgaggattctctcctcgtcattatttatccttcccaattagagtaatcacacttttctgtcacatatgaattattaaaatcagaacttaagcgaaatccttcgaccactaaagacgaaaatccctaacaaatctcagagtttgtgttaatttctgggttccttacatcttttccagaagaaaaaaagctgaaagatgtggttttttggatcgaaaggagcatctggattctcttctcgttccacagcagaggaagtcacacatggtgttgatgggactggtctcactgccattgtcacaggttttcttctatcaatagtttcatgcccttttgcgacttgggtttgtctaaagttgtagacttttctataattctgaattgatttcatatgtagggtagagattttttacttttattgtttagacaattggaatttgatgtttttatgatcagggtctgtttttggttcggtcaaccctaataaatatatggaggtcatcactgtttgttgttctaaagtttgtcttttttttttgccaataagtaacaagcttttgctcacaagaattggattgctatgtttggtgaattttaaagtacaacatgtttgggaccatttgatctgcaaataacatgtgctattagaaagttacatatatatacatacttgtctctgtttcagctgattctaagttatgttataatcacacactatacaatttctgaccaaaggaagaaaaaaaaaagatttgcttgtagatctcgtttcaatacttttgtgaagtgctgcttccttattttggttagattgagtatgtagtttagtatgcacatgttctgtatcagcctatcagggtattgaaaaggctaggaacgagcttaatctattagttgatacaacttaagaaagtgagatttctgaacatgttggatcctcaagttttgttttgtttgttttcatgttttttcaggagcatcaagtggtataggtgtagaaacagctcgtgttcttgcactgcgtggtgtgcatgtggttatggcggtgagaaacactggcgccggtgctaaagttaaggaagatattgtcaagcaagtccctggagctaaagttgatgtcatggagttagaactcagctcaatggaatctgtcaggaaatttgcatctgagtacaaatctgctggtcttccactcaacctcttgatgtaagctattgaaatatcgtggttcatctatagccgtttggatttattgacgtttatgttttgacttgtctcaattttgtaagcaacaatgccgggattatggcatgtccttttatgctctctaagcacaacaccgagctgcaattcgcaaccaaccatttaggtaagtatgataaccaaaccaacactatggcttcgtcc

SEQ ID NO: 160807 - DNA, 807 bp, Arabidopsis thaliana landsberg
agcatcataaacaagtacaagaatccattaacctacatcaccgaaaacggtatatgtagcattcaaatgttaaactttaaccaatgaaaaaactattttgtgttagttacaaatcttatgtcaatttgtaggagtagctgatgctgattttggaaacgtaacgatcgcaaatgctcatgccgataatggacgaattcaatttcaatgcaaccatctttcttgtctcaaatgcgcaattgagtgagtttaatatatcattcgtatttgatgtgatttactgtcttcggagaattataaatttatattcatatcaaaactacttttctaaaatatattatagggatggatgcaacgtagcaggatattttgcatggtcattgatggacaattacgaattcggaaatggttacaccctccggtttggtatgaattgggtcaatttcactaatcctgctgatcgaaaagaaaaagcttctggaaaatggttctctaagttcctcgcaaaataagttgaagccctagatttataaatccaaacctcgaatgtaataacaattgtactgtatgtattttaagaccttatgtgttttgtatatgatgttaataatgttgtaataatcggatcctaatttcgtgcacagttcataaataaataaaaatgtatacaatgtttgtaactgttcttgttctacactcttgctgaatataacatctccaaaaacaaaaacaaaaaattcaacgctttacaggtttacatatttgacaagtataaataacaaaagctccaagccaaggtgtaactgtgta

SEQ ID NO: 160808 - DNA, 2733 bp, Arabidopsis thaliana landsberg
caagaccatatacatatctaacaacttgtaaagtctgttgtgtagtaaagtccatgtggttgagaattttgtttggctgcttttgatttaatgatctatggaagggtggactttgatgattctacttgtttatggaactcgtgttgccttgcaggatgccagttaggaactacaacgattctgctgcgtttcaggctgagagggattcttcagctggtcgtggcttccaagaaccatcatcgcccaaaatggctaagtctccatctcttcagagaggtcataatgttttccgctcccaggaattgtgctttaatagtgaagaatcgcccaatgatcatagccctgcaccagagagactgggagaaaatggctcgtcgttggatgttggtgagaacgtaccgacagtcagagacaagatagtttcgagatgaggttgccacaccttcctaaaattgacgttcagtgtcccaacaaaaatcaaacggctcagagccagagtcccctgtttcaccccttttgacatcagatcctaaaaacgagcgttcccattcgcagacgtttagtcgtcctcttagttctcctgatgacactaaagcaaatggtaaggcgtctaaggatgctcaacacaaggagtcaccttcgttttggaggttggcacagcttagtttcccagagtggctttatgctgtattagggagtcttggtgctgccatctttggttctttcaatcctcttctggcttatgtcattgcgttggtagttacggaatattataaaagcaaaggaggccacctgcgcgaggaggttgacaaatggtgtttgatcattgcctgcatggggattgtgacagttgttgccaatttcttgcagcatttctattttggcataatgggagagaaaatgacggagagagttaggaggatgatgttctcaggtattggaaattttttaaattcattataatttactttatcccattttaactacttttacttgcctgagttcattaatttctctgatgtttcagcaatgctgcgtaacgaagttggatggttcgatgatgaagagaacagtccagatacattatccatgcgtttagcaaatgatgctacttttgtccgagctgccttcagcaacaggctttcaatatttattcaagatagttttgctgttattgttgctcttctgattgggttgctgcttggttggcgtttggcccttgttgcattggcaactctgccaattctcactctttctgccattgctcaggtttgcatcgcttcttctataaaattgtttgaaattatttatattttagtcaatttgttttcattttcccctgtcacatgtgtttctgactttgcaatacctttccagttcaagtagcgattttagcatatgcttctttgttttctgccatctcattctcaattcatgtagctcaaaaatgtttgtttattcagctgacacgacattctaatcattctcaaaacgaatttgcagaaactgtggcttgccggattctcaaaaggcatacaggagatgcacagaaaagcatctttagtcctcgaggatgctgttagaaacatctacactgttgttgctttctgtgctggtaacaaagtgatggaactgtacaggatgcaactccagcggatactcagacagagctatctccatgggatggctattggttttgcgtttggtttttcacagtttcttcttttcgcctgcaacgcgctcctcatatggtgcactgcgttatctgttaaccgtggatatatgaaattatcgacagctataacggagtacatggttttctcatttgctacattcgcccttgtggagccatttggattagcaccgtatatcctcaagcgacgtaagtctctgatatcagtgtttgaaatagtcgatcgagtccctacgattgaaccagatgataactctgctctcaaacctcctaatgtctacggaagtattgaattgaaaaacgtagacttctgctacccaactcgacccgagatactagtgctgagcaactttagtctcaaaatcagtggcggacagactgtagctgttgttggcgtttcaggttctggaaagagcacgataatctcactagtagagagatactacgacccagttgctggccaagtcctactagatgggagagacttaaagttatataacttgagatggttgagaagccacatgggtttggttcagcaagaacccataatcttttccacaacaatcagagagaatatcatatatgcaaggcataatgcaagtgaagctgagatgaaggaagcagcaagaattgcaaatgctcaccatttcatcagcagcttacctcacggatacgacacacatattgggatgagaggcgtaaaacttacccaaggacaaaaacagagaatagcaatagctcgggtagtgctgaagaatgctccaatactgttgattgacgaagcgagttcatctatcgaatccgagtcgagccgtgttgtgcaggaagctcttgatacattgataatggggaacaaaacaacaattctgatagcgcatagagtagcgatgatgagacatgtggataacattgtggttctcaatggaggcaaaatagtagaggaaggtacgcatgattgtttagcgggtaaaaacggattgtatgtccgtttaatgcaaccacattttggcaagaatctacggcgacatcaactgatatag

SEQ ID NO: 160809 - DNA, 1485 bp, Arabidopsis thaliana landsberg; identical to SEQ ID NO: 6596

SEQ ID NO: 160810 - DNA, 2456 bp, Arabidopsis thaliana landsberg
ggtattaaattgggaatgggtaagggttcctacattattattgctttttctgaagcttttggtagaactgagtcggacggggagcagcaatatacgcaactgggagacttggggcttgtagcaaatgggagccgttcctctcagactatgattttcatgcccaaaccattaactgttgtcaaggttgctgatacacttcgcctaattgctaaggtattttagaccatctatctctattttttttactctaaaatagagcgtagtaaaaatagttgctctgaatatagagcaatcctctcttttactttattttagagtgagatacaaaagtaggttggagagaaatttgctctataatagagtttagaggagtggggttggtgattctcttagacactttcttgtgtttgctttaaattttctttctttttgattagttgttggactatgttatgtgttaggaatctggaaaaggtagtaaggataagaagaaggatctaatgaaggcacttcttgtggcaactacagattgtgaacctctttacttaactcgtttacttcaggtatgttagatcaattgttacaaaaaaaaaaaatctgctcattcctttgtgttccttattccgttacaatgcaggataatttgcggttagggttctcacgtcaaactgttttagctgccttgggacaggctgctgtatataacgaagagcattctaagccgcccccaaatatcaagaatcctttagatgaggtttgcttctcaaggatgttacttgtggctttaggctctatttgcagtattcctttagagacgtcacaacttaccttgttgtctgtccttgtaggctgcaacgattgttaaagaagtattctcaatgcttcctgtctatgacattattgttggtgctcttctaactagtggtgtatggaatcttcctaaaacttgtaacctcacactcggtgttccagttaggcccatgcttgcaaaagcaactacaagagtagatctcatacttgagaaattcaaggacactgttttcacagctgaatacaaatatgatggtgaacgtgcacaggtgatccattgctttctactcttatccgatgaatgctattattcgtaaagcaaagttatttatatgtgctgctacgtttggcttttcatcaatctattctcgcagatatattatatggaggatggtacagtcgagatattcagtagacatgctgaaagaaacactggcaagtaccctgatgttgctcttgtgttatcaaggtgcacttgtttgttgtgttgttacttgttgaaaaaattagaatgagcccatatttctaatgaagttagtgtaaatatcttctctatacaggttaaagaagcccactgtgaaatcttttattctggattgcgaggttgtcaccttcaacagagaaaaagagaaaattcttccactccaggtacctcaatagccaggctttatggttgcaaatatgaacattcttgtttttcttcttgttagccaatgaatgatcaaattaagcttaagctctactagaccagattttggtgatttgacaacaattttttttgccaacattagtttaaagataacttgttacagttactgatagtttaggtttttatatgtcttagcttgttttctttgttttcttttctcagacttagagtacacgagcccataaaaatgtgaatgtcagtgatatcaaggttggcgtatgcgtctttgcttttgatatattatacctaaatggccaactacttatccatgagaatctgaacattcgccgagaggtaagccatatattagtaaatcgtaaaatggtttatcagtgaagcaactagtgttgtgcaaatatgtaatcatttgtttgcaccttgcttctgccagaagctacactattcatttgaggaagatcttgggtatttccagtttgcaactgctctaacatccaacgatattggtgaattacaagagtttcttaaagcttctattgacatagggtaaatattcatatgacactgcctcataatctctatgatgtttcaattcttcatcacaagtatgttattttggcagatgtgaaggtttaatgataaagtcattgtactcaaatgcaacctatgagcctgcaaagagatcaaataattggctaaaactgaagaaggactatatggacaagcaataatactcttttaaacaaaaaaaatttaaaagttaagatagtagagtcctttactaactaactctagggtatatatgctgcagcattggagattccgtggatcttgtaccaatagctacgttccatggacgtgggaaacgcacaggtacaaacaccattcgaaatgtgtagatgatacatttttttcacaagaaatgttgtaaacggcagctatatgtatgctctccttataggtttctttggggcctttt

SEQ ID NO: 160811 - DNA, 1913 bp, Arabidopsis thaliana landsberg
  unsure (1)..(1913): unsure at all n locations
acgtggacgactgagatggagcgcctcttcagcgcaccatatctaacggtccagattaggcacggagaagagatctctgcaatctcgaaaatcgtggtgatgatggctttaaataacttcccacctctccacttgacatcacgtcaactcacacgactctcaaggtaatttctctccacctttattatttactgcgttttgtttctagagatagaaaaatttcatctttttctgctatctccattgtttctctgctactcccttctttctcgatctgccctcttcgctcttttctttcatctctctcgtctttctctaatgaaaccaaaagatgagcgacttcgagaactcccagaacaaaagcaaccacagttacggtgacgatgagannnnnnnnnnnnnnnnnnnnnnggcgttactaccacaagtacaaaggtgcataataaccctaggcggaatgggtccaattcgtccgccgtcaaccagagccgacaggccgaagaagaaaaaggctgccaagcaaaaaggcggcacaccgattacgaacagcgacctggtcgaccttcggaggagatgctaggttccggtgggggtaactatgatactcccgagttcgctgctctcaccctgagaatgtcctgcaaggatggtgttgcgcctacgccaacttctttgggaagtacaggctgttcttccagattctggcgtgcatcctcgagatgctttactgtcttgccttcgcctttcctcaaatgtgcccaaattatgtctgtcatgtgctggcgttgtacactcgagcccgagaagtgaacatagagttcggctaccacgaattgttacttaggtggtttaaaggccttccgggacacgaattggcgagttaagtaggcttcttttgggtggatcatcattccgtcaacgattttgaccctgcaaggataacgaggacatggtcctctaacctgggtcagatggagatctgccgctttgaatttactgttttagtcgtgtatagatttcttgcttttgaaatattggtattgttactaacatcgatcttctcttggtggtttgcaacaaaaatcaaagaagttaccctttcgaagacagaacttgaattgctgaccctcctcctgcgtggtcaaattgattgggcaaccttcaacagggatcgcatcagaactgctctcgccgtagctacaacaggtccagtaattgctcttccaacagttcagcgggatccaattgaagaggtcccgcaggtccaactagaccatgtggccgatctgcctataggtacaatttttcttgtttttattttaacttcgtttaatatacaaacgaattaccagttgacaaacgatatatatttgtttttctagttctcccaaattccagttctacttcagaaagtccgcttatccccagaagaatgtggcgaccaagtcttcgtgctcagcgagctactgccaggatctgttgtcgtacaggtcatatgtcggctgtagaggcccgacgtctcatcttctgctccttgaagctattgttgggacctctacagcaggccaggtaggtgctagtaaccaggtcacccaggtctctggaccgtctgaggttaccatggcggacggtgcaacatcttctacaaaaagagctcgcatcttgccgggggcgcacccagcagctggattggtcataactgaccaggatgtcgcctttaagaaggggggggggcagtacccgaggctttatattcggaagcacctgtgcctgctgacaggcgaacctatggacgaggccacattggaggtctgaccttgagaggtgggggcgggtcctctattggagtttcgcaccgaactcagaggttagacagactctcaataaacggatgacgacgctgtgctatcgaa

SEQ ID NO: 160812 - DNA, 826 bp, Arabidopsis thaliana landsberg
  unsure (1)..(826): unsure at all n locations
gaaggatgacggagatgccgtcgaggttgacagagatactgcagaagtccaggaagaaacggccaacatacctgaatccaaactctcggaggacacaggatcacctcatcatcatgctgatattctgatggtgcaggaaaaagctgcagaagaacatgacatgatagcctctggagaccatgaagaatttccagtcaatcctgataacaaacactctgaagaaaatcagtcaccacatcatcatgctaataatgtgatggagcaggaccaagctgcacaagaacgtgagatcatatccccaggagaacatagggaaattccagccaatcctgatactaaagttgttgaggagaacaatgacaggatagatgagggtgaggctaacaatttgaatttggctggcgatggaagtggagcagtcgatcatgattacttgaccaaaacggagctggacaaagtgctagaggtgcctggttctgagaccatatcaaaactggaggataggccatctgagcatctctcagaaacctcaatgaacgtggaaaaagaactannnnnnnnnnnnnnnnnnnnnnnnnnnnnnnnnnacaaaaactctgatgtgttggcagttggagtttctggagacagtgacaatgtggtatctgtcttgcccgcttcccaaacttcctctgatcgtgatgaaggaatgattacagttgatgctgaacctacggaagacatgaaacttgatgttccagattctaaattggtaactgacccccactgtcgcctctactaataacaagggtgccaatgttagaactaatactgaaaggccagataa

SEQ ID NO: 160813 - DNA, 2023 bp, Arabidopsis thaliana landsberg
catttacactgtgcgacatagaaccgctcaacatcactgaccccgcaactgaacacgctatgcatcttgatcgcccaccagcgtttttacgccaataccttcaaaagatcgacgtattggtaatgaacacaggtcaccattggaaccgcgggaagctcaacgggaacaaatgggtgatgcatgttaatggcgttcccaacactaacaggaagttagctgctcttgggaacgccaagaatttcacaatccacagcacagttagttgggttaactcacaactccctctccatcccggtctcaaggcattctacagaagcctttcaccgagacatttcgtgggtggggaatggaacaccggagggagctgcaataacacaaccccaatgtctatcgggaaagaagttttgcaagaggagtcaagcgactacagcgcgggtcgtgcagtgaaaggtacaggggttaagcttttagacataacagccttatctcatattagagacgaaggtcacatatcacggttcagtatctcggcttcacggggagttcaggattgcctccattggtgcttgcccggtgttcctgatacgtggaatgaaatcctttttgcaatgatctaagttttcaagttacagctgttgcatcaatcaacagaaaagttcagagaaagggcttgagccaaatcaaagccagcctttgatagctttctacaacacacattgaagttttagcggcaggaggtgtaagttagtatttattttggtacaaaaccaaagctctgggtatcatagacgtattgtcgttatcgtaaccataccggggtttggtttcgaccatattttatagaacagattctaactcttggaatttgtctttgatcgattaaaagaaaattttagagttacttctaaatagttcatgtgttatcgtttggattctgcctaagcactaagcatttttccttaaaagcatgaatttgatgctgcctaaatgtgcgcaaataacccgagacatatgaatcgactggaaacctattcgatttgtccgaattttaagatactaaatttagtaattgtaattatttcagtttctataacagtgatgagacatttacctgttgaaaaagaaatagatagagatgcaaatgtataagattacacttcaagatccttatcaaaaaattctcaaagctctcagaaacaagcaaataggattacaaaaattataacaaaaacactatttttggacttaaaaaaaagtctaaactttgacaactaattcaatcaaagaaaaaatgccaccctttccttctcatctgtcacagtcaaacaatgtccaaagtttggagcaactaaggcaatctaaacacaccctcacctttcaactaactatacagcatcatcatcattgtcaagcacattgtccttgttttaagacgtaacatcccaacaagaacaagaaaaagaaaaagagcatctcctctcttcaatccatggctgctgctgttctgaatcccggtttctttctcctcatcctcctcttatctttctcaatctccccttctttgcagtatgtgagcgagtccgaaccgcttgtgcggttcaaaaactcggtgaagataaccaaaggggacctaaattcatggagagaagggacagatccttgcagtgggaaatggtttgggatctattgccaaaagggtctaacagtctcaggcattcacgtcacacgtctcggtctctcaggaaccatcaccgtggatgatttaaaggatctcccaaatctaaagacgatcaggcttgacaacaacctcctctccggtcctctcccgcatttctttaaactccgtggcctaaaatctctcatgctctctaacaacagcttctccggagagatccgtgacgattttttcaaggacatgtcaaagctcaagcgactatttcttgatcataacaagttcgagggaagtatcccttcctccattacgcagctccctcaactcgaggagcttcacatgcaaaagtaa

SEQ ID NO: 160814 - DNA, 1514 bp, Arabidopsis thaliana landsberg
  unsure (1)..(1514): unsure at all n locations
tgtaacgttttacacttatcaacacataatatatctctcaaatctcgatttcttttcactaattagcctttccagatttccagggaccgcttgcaaggtttcctaggattctaggacacgaagcagtcgggtaagaatcttctttatttacttgttttactttcttttttcaagaatttttaataatatcttgatcttgttgtaatctagtgtgatcgagagcattggtgaacatgtgaatggatttcaacaaggtgatatcgttttgccagtgtttcaccctcactgtgaagaatgtagagattgcaaatcctcaaagagcaactggtgcgcaagatttgccgacgatttcttatcaaacacgagacgatatggaatgacttcaagattcaaagactcctttggagaagatatttatcattttctctttgtctcgagtttttctgaatatacggtcgtcgacatcgcacatcttgtcaaaatctctcctgatattccggttgataaagcagcattgctcagctgcggtgtttccacaggttacttcaatatttgttgcgtagagaaagatcaggggtgaaaacatattttcaaatatttttgggggttaaagcataaaaagaagtagaaatcaggagttaggatggtaattttaaaatatcacgtggatcaggaattggagcagcttggaaagtggctaacgtggaaaaaggctccaccgttgcagtttttggccttggtgctgttggacttgcggtatcaatattttgtgtccttcaaatgaatgaatttgtatacattagattgtttttggtagtaatattagttaaatgatttggtaacaggttggagaaggagccaggctgcgtggagccggcaagatcattggtgttgatctcaatccagaaaaattcgagctaggtaaagtttttggcttacacgttgggtttggtattatatcttacaaaacactaaaagtactagtttgtagttggnnnnnnnnnnnnnnnnnnnnnnnnnnnnnnnnngtctaggctgtattatttatttgtcaaaataaccatatccgaatgtcgtagtttagtcttttgttttgttataacttataaattatattcccattgaatacacatggttgcaaatatgatatgttttattctataacatgattaagagttttattctataacatgattaagagaataaaacaaaactcaagatatataacctaatgtttgtgtactaggaccgttgatgcgtcaacatttaatttcaaatctatatgtaataaaatatcatttgacataaagataaatattggataaacaaatgctatttttgcattgaaaaggcattacattattgaaatttacatttgagattgcagattaactaatactataatatagagcgaacaaatattcatcatgtaatacattgaataggcaagaaatttggtttcacgagtttcatcaatcctaccttgtgtggagaaaagaagattagcgaggtat

SEQ ID NO: 160815 - DNA, 670 bp, Arabidopsis thaliana landsberg
caaagagtccttcttcatgggctcaacacgtatcggcctcagctattacccaagttgtcccaatccaggactcacggttggagtcggacgccgctctgatgtttcctcactcacaatcctcttacaagacgagatcggtggtctccacgttcgttctctcaccacggggagatgggtgcacgtgcctccaatcaccggatcttgagtcattaacattggagacgctatgcaaatcatgagtaatggtcgtaacaagagtgttgagcatcgtgtgttagcaaccggttcttatgacagaatctctgttcctatctttgtgaacccaaaaccagagtcagttattggtcctctacctgaggtgattgcaaacggagaggaaccgatttacagagacgtcctgtactctgattacgtcaagtatttcttcaggaaggcacacgatggaaagaaaaccgtcgattacgccaagatctgatcataaataacctcaaggagttcgatttctttttttttttttggttttgtttcctgtttgtgttgtgttagtgaataaaagaagagagaagagagacatatgtgatgtcttcttgaaccagtttctctgttcagaattgtgttgtataaattgctatcattgatcaatacagtttctcttttatcagactaaaat

SEQ ID NO: 160816 - DNA, 1021 bp, Arabidopsis thaliana landsberg
tatgccgtctggggatgaaggtatgtctggaagtgaaggaggtttgtccggaggtgaaggaggtaaatccaaaagtggggaaggtggactcaaagctaaactcgaaaagaaaaaaggtatgtccggagggtccgagagtgaagaaggtatgtctggaagtgaaggaagtctgtctggggggggagggaagtaaatccaaaagtaaaaaaagtaaactcaaagctaaattgggaaagaaaaaaggtatgtccggaggcatgtcaggaagtgaagaaggtatgtctggaagtgaaggaggtatgtccagtggtggaggaagtaaatccaaaagtaaaaaaagtaaactcaaagctaaattgggaaagaaaaaaggtatgtccggaggcatgtcaggaagtgaagaaggtatgtctggaagtgaaggaggtatgtccggaggtggaggaggtaaatccaaaagtagaaaaagtaaactcaaagctaaattgggaaagaacaaatgtatgtccggaggcatgtcaggaagtgaaggaggtgtgtctggaagtgaaggaagtatgtccggaggtggtatgtctgggggtagcggaagtaaacacaaaattggaggaggtaaacacggaggtcttagaggtaaattcggaaagaaaagaggtatgtcaggaagtgaaggaggtatgtctggaagtgaaggaggtatgtcggaaagtggtatgtccgggagtggagggggtaaacacaaaatcggaggaggtaaacacaaatttggaggaggtaaacacggaggtggaggtggccacatggcggagtaaagaacaatggtcaagttgttccaacattaagcagatcattgtgcattagttcaagattgtatgattgggaaagtaaaagaaagaaaaaatattttctaataagttttatgtttatatgtaatgttgaatctgattattatgataaaaagacataaatgtgatacaatgtttattttaagaacaataataatgtggcaacagttttagtc

SEQ ID NO: 160817 - DNA, 1061 bp, Arabidopsis thaliana landsberg; identical to SEQ ID NO: 21694

SEQ ID NO: 160818 - DNA, 556 bp, Arabidopsis thaliana landsberg
  unsure (1)..(556): unsure at all n locations
gatgttgttgttcctgtttctttggtgcataagtcggtatctcggattctccgttgtgattaggagataatgatgggaggtttttgtaattgcaggatatgaactcaatgacagttcttgttctgggtaaaggcggtgtcggaaaatcatccactgtcaattctcttatcggcgaacaagtcgtccgtgtcagtcctttccaagtacgtaattcagtttccctaagcttgatttttttaatttggattaagaaagagtagtcatttcaagatatttgatggctctgttttgttgattttgtaggctgaaggattgagaccagtgatggtttcaagaacaatgggagggttcactatcaacattattgacacccctggacttgtggaagctggatatgtcaatcaccaagctctcgagttaatcaaagggtcagtagctactcttttggaatatctcttcgttgattgttgcatataggattatctcattcgtttttgaattaattaagctaagtatatatattgatncatgtttacatgtgggtttctgttaaatt

SEQ ID NO: 160819 - DNA, 2750 bp, Arabidopsis thaliana landsberg
atgaatcagcgacgagtgtcgatcgacacactcttggtgtcgatcgacaccagttttggcccagcaaaaaccctagacgctttcgagtttacagaagctcaagtttgccccagaagtttccctatttacagtattagtccctggacgtttttagggtctatatatattgtttttagacctaagtttcttttatcaagttctttgcaaaaccctattgtgagagacataagctattcatccattgttcttgagagtttcattcagatctatatacagtgaagagatcccttctttccctttctctatttactgtgtttatgctttttatctcaaatatgttgtttgcttcatccaatatgtctaagtaacctgattattaggaatagggtttctcattagggattcattggtttagtagattgctccctttgctaggttatctatagaattcttcatctttaattatgcctaatgctagatctagagtaattaactagatattgaatccagacaatagatattcccgccataggtatctgtagttggatctattatttgatgaatctggtttatagatgtgtaataagaatcggcctatttactaagatgaacaattgaactcgttaagaatgcatatttaggttgatagtttctcggcttctccggtttttattttttatagatatagggagttatgcggtacgcccaccggttattcataattagagtttgagtttaagaatggttcgataacaacctagctttcattagatctactaaccaatagttacctgagaataccctgttcctagctctttattaaatcgtttacaacacaatcaatctgctgtctttttactttgttctcttttattttcactatcaccctgctagcttaatctcgacatttaactcattgtttaaacaaaagaactccgtgaattcgatcctaaaatactgcaattgatctcttatttgagagagtagttctaggtaatttgaaccttatcaaatttggcgccgttgccgaagttctttggaatcatcattgagtttagtttagagatttcgtctagtttttacttctattttgttactcacgcgtttcttgttttcttcttttctgtgtttcaagtgtatgcctaggcaaacaaggagcacaaaacagaaggagcttatcaacttgtttgttctggacttgggaaaacttgaacgcaccaaccgaaaaactcagaaattagcaatagctgacagagtcatcagagctgatgcagaaggagttttgagagattatgatgggcaagcctacaatgagtctggtcagagattggatgatcatggactcatcctacctgaggacaccaatgaggatcaggcgcgcctcaatgcgcaattagctgctagagacaccctcctgtgtcgatcgacaccatacgtgacccttttctcagagacgactcaatacgacggtgtcgaccgatacccattcagtgtcgatcaacactggatccggactgcaccttgtgatgtgcaaatacctatgcagcccgagtctgtctacactcttcctgtcccatatccgaggaggcgtcgttctaaacaggagattcatgctgctaagtgcacagccataatggagaagatcctccatactcttcctaaggatgcttgagggacatcttccgcctcactcaacaggtatgtcaagcaacttgttgacaatggaattagttcagatgaagctaagctgctcaccagagacatcagtgcaatcatgctgcctaaagccaaagaggagaaggcacagagagtagacatagctgaatatatctgcaccattactcctggtcagaccactgagaagcttccagatccaggtagctttgttcttgattgctctatctccacaagcagattcagccgctctttgtgtcatctgggatcaagcaccaacctcatgcccaagtctgttgctcagagactcggcatgaatcactatagacctactcgcattactcttctcttcgcggatcgttccaagcgaatccctgaaggaatccttgaagatgttcctgttaaggttcgtaactctgttatccctgctgattttgtagtcctggactatgagaaggaacccaaagatcctcttatccttggaaaagcgttcctagctacagctggtgctaggtttaatgtgaagagatgtcgaatctctctattggtccgagatttggagatagagtttaggatggatggttcagagcttactaaacctataactagtattccctctagcacaaacacacctccttagactgctcagaatcccacataacagccacacacaacgctcccatcagctcagctcgccaatgagagttacggagcaacggtgtcgatcgacaccaccactcctgtcgatcgacaccttcgggattcacagacagagggttctgcacaatctcttcagcccacaccacttgaagacctatgtgataagttctcttctatctcttctcctgctttaccttcgattaattctttagattcttcgaagtctgcttcactagataacaagcctagagttcttagaaagcttgtttctcctgttgttcttgcaggtgatgagaagagtgtcgattgacacaccactgagtgtccgtcacacctgcagctgctccgaccagatcagtctcacaccgcctttgaaggcgaggaggcagcagaaatctctcacattttacccacat

SEQ ID NO: 160820 - DNA, 746 bp, Arabidopsis thaliana landsberg
cgatgttagagagctctcgagggtttatggttacgcagtgaccatgcgaatgttgtttggaaggagacatgttacgaaagaaaacgtgttttctgatgatggaagactaggaaacgccgaaaaacatcatcttgaggtgattttcaacactcttaactgtttaccgagttttagtccagcggattacgtggaacgatggttgagaggttggaatgttgatggtcaagagaagagggtgacagagaactgtaacattgttcgtagttacaacaatcccataatcgacgagagggtccagttgtggagggaaaaaggtggtaaggctgctgttgaagattggcttgatacgttcattaccctaaaagatcaaaacggaaagtacttggtcacaccagacgaaatcaaagctcaatgcgtagtaagtaaaatattacttttataaaagagtgtatgcatatatgtatatatatatatatatatatatatatatacaaaaatagacgtgtacactaaataagatgatcatgtgatgttttgtcacaggaattttgtatagcagcgattgataatccggcaaataacatggagtggacacttggggaaatgttaaagaacccggagattcttagaaaagctctgaaggagttggatgaagtagttggaagagacaggcttgtgcaagaatcaaacataccaaatctaaactacttaaaagcctgttgtagagaaaccttcaggattccccc

SEQ ID NO: 160821 - DNA, 354 bp, Arabidopsis thaliana landsberg; identical to SEQ ID NO: 14588

SEQ ID NO: 160822 - DNA, 733 bp, Arabidopsis thaliana landsberg
ccagattatcacaaatcacaagcatgactcaaaacaacaactcttaacttcacaactggtttttccctcgcacgaaaattgaagaaaatagtaagaatcctatacgtttcttccccgatttgggttctcttattcaaattgattaaaccctatatgtgatttcagagaagaagaaacactcaaaacaaaaacaaaagtatggtggaattggagattgtgtggttggttagaggcgcttggatcactgtttggatcgtctctatacttcctttggtgattgcttcgatacccacttcaaagcttaactcttttcgtgaactcgttttgagtttcgctggtagaggcaagattcttcacccctcttctcaggtattcgtaaaaatattcgaacttgttctgtttttgattgttgaatgtggaaaagggctaaagcatttttaagtaactcagatgtgttatactctctatgtagaagtttacagttcctcagaagttctttggtcacttctatgttgtcggagtggtgtggacaactctcctgcttgctgcaacttggatgtatgcttgcaaaatggccggaggttcccacgttttctccttccatatgactcatgttgagcatcggtttaaagtgtggcgagcggtgtttctacttcttctgatggagatccatgtcttgagacgtgtaatagagtcattctatgtattcaaatatagcacttccgctcggatg

SEQ ID NO: 160823 - DNA, 568 bp, Arabidopsis thaliana landsberg; identical to SEQ ID NO: 21603

SEQ ID NO: 160824 - DNA, 888 bp, Arabidopsis thaliana landsberg
gctgccttgaaagctttattggaccttgggtgaaggtagacagcttgtttctcagctcctcaaacttagcatcattttagaatttgttcaataaggctatcttgatgcttctccaactcttaagggaacctgctttcaattgtttcatccacgaagcagcttcccagcaagagaataagggaagagcttacacagtagatagacctatgaaactccattagctttgatgctcaatgcgaggtcctcaaaacgctcgatatggtccattggctgctcatgagataagcattggaacggatgctggccaactaaatcaaaatagccaagcttcagctcatagtcgtttctctggaatggtgggggtacaatcgctgattgattagcatagaatagatctggtctgttgaaatcccaaagagtacgacgtggttccgcggctggaggaatagctgcaagaatctggtgttggtgtcgatcgacacctctattgtgttgttcgacaccaattgcatccgcgttctactcccgatggtgtcgatcaacacccagttggtgtcgctcgacaccgagccttgctgcatctctaacagctaattgcgcattgagacgcgcttgatcctcattggcgtcctcaggtaggatgagtccatgatcatccaatctctgaccagcctcattgtaggcttgcccatcctcatctctcaaaactccttcagcatcatctctgatgactctgtcagccattgctaatttatgagtttttgggttggtgcgttcaagttttcccaagtccagaacaaacaagttgataagctcgttctgttttgtgctccttgtttgtctaggcatacacctgaaacacagaaaagaagaaaacaagaaacgcgt

SEQ ID NO: 160825 - DNA, 2067 bp, Arabidopsis thaliana landsberg
atgatgatggatgaagatgttgagcaggccactctggtttcttacagtgacaagccaaggaccttcccggatatgcgtagtaaaacttacagtccattggttaggacataatacccttctctctcgagcatatctttcttgcatctaaacaccgtcatatttatacaaatatgtattggtgttatatctggttttatttctatttcttttggtatctttataatgagttgttttgtgcagataatccgcattctgagaaatttaaatgttcgtgccctttctgtacttctgcttttgagctttggagggatcttttacatgggagcacgtacttctcccatcattgtgttcgtctttgtagtatgcatcatcagtttcatgttgtcagtatacctgaccaagtgggtattagccaaagatgaaggacctccagaaatggttcaggtaatttcacacaagttttaatttgttctattcgtgattgtgtcttctttgttactcagttgcattttcagttctgtgctatgagcttattcttttctgtttagatatcagatgctatacgtgatggagctgaaggatttttaagaacgcagtatggtactatatccaaaatggcgttcttgctagcttttgtgatcctttgcatatacttgttccgtaacttaaccccccagcaagaggcttctggtttaggaaggtgatcatacatcttctacagaatcttttcttttatcttttgtgttgttataaataaaactcaaatgtataactttgtgcttcaggacaatgtctgcatacattactgttgctgcatttcttttgggtgcactatgttcaggtattgctggatatgttggaatgtgggtgtcagttcgtgctaatgtacgggtttccagtgctgctagacgatccgcaagggaagcattgcaggtttgttttttagtattaataggaattcctgtacacatggccaaatactaagtgatggatttaatgcagatagctgttcgtgctggtggattctcagctctggttgttgttggtatggctgtgattggtattgccatcctgtattctacattttatgtatggttggacgtggattcacctggctcaatgaaggttactgatcgtaagtcatagcttcctgttctctggatatctttccttttatgtttggccattctatagtaaccagctatattctatgcatcagtgcgctgagttcatgtttattttcagagattcaaatttaatcacaaacagtatcttcttataccaagttggtacatatatgggtttgaggaatccgttttgctgaatttcaagaaatggctatttgctaaagaagcaacagcatgggtcgagtcttcatctgtagaaccggaatgcaaacttttttgatgttgttctcaaatgtttaacgtttgcaaacccgaaattgcatttgcatgtactagtgttactttttagcttaatgatttgactttcccatttttcttacagtgcctcttcttcttgtgggatatggttttggtgcatcatttgttgccttatttgctcagttgggtggtggaatatatactaagggagctgatgtcggggcagatctggtcgggaaagttgagcacggtattcctgaggatgaccctcggaaccctgcagttatagctgatttggtattagttctttcatttcacgatcctttgtgtatgattttgtcgggcctggaaccttttgtcatcactgaagcttcactctcatcttcttgcaggttggagacaatgttggggactgcgctgctcgaggtgctgatttatttgaaagtatagctgcagaaatcatcagtgcaatgatacttgggggtacaatggctcagaagtgcaaaattgaaggtttgcgaggcatcttgattttattttaaagagttgtactgttggtatttttagcaataaaattgcaaggctagttatactgtggtcaaactaccagaaagggttttagagttacctttctttttgcttcatgatttttttatttcttactcaactttatacgtgtatc

SEQ ID NO: 160826 - DNA, 658 bp, Arabidopsis thaliana landsberg
atctaggagttggtcgatatggaaggaaaaacattcctagttcctggaaacttcccgctggaatgctcagcaacgtatttaacattataccaaacatcaaacaaggaagagtatgatcctctaacaggatgtttgacatggctgaacgatttttcagaatactacaacgagaagcttcaggcagaactcaacagactcagtaaactttaccctcatgtcaacatcatatatggtgactactttaatgctctgttgcgcctttaccaagaaccatccaaatttggttagctttcttgatccttagtttaattacctaaaaaaccaagttcattgattcaatttgataattgagttaatcattcaattcattgtacaactagggttcatggacagacccttacctgcttgttgcggtttaggaggaccgtacaacttcaccttaagtaaaaaatgtgggagtgtaggagtaaaatattgtagtgatccttcaaagtatgtgaattgggacggcgttcatatgactgaagctgcatacaaatggatagctgatggattactcaagggtccgtatacgattccttcgttccattggttatgcctcggctcaaaaattaagagcaaggagtcattagacacgtagtgttcttttgacaaacag

SEQ ID NO: 160827 - DNA, 535 bp, Arabidopsis thaliana landsberg
tttggagaatacattgaagaagtttatgctgcgtatgagcaacataagtatgaaacaatggtaatgattctctactgtcttctcctactcttgataccgaggagacgaaaaaacgattaatgttaaccgtttcctacatttgtgactctatagcaggacacacagaggagcgtgaaatggaaccctggagctcaaatgactgaggaggaagcagcagctgagcaacaacgtatgtttgcagaagcacgtgcaagaatgaatggaggtgtttcggttcctcaacctgaacatccagaagaaccccaacaacaacaacaaacaagtctacaaagctaatcaacaaaaccgcaaaggaatcccttattttaacattatccttttgacttctttttctttctagcaatatctctgtaaagtgcaaaattcgtcgcgtcttggtgttgatatgctctttacattttttaacttagggttgtgttttttcccctttctttgaatctaaaatcacttaggtgattcagatgtaattagtaag

SEQ ID NO: 160828 - DNA, 390 bp, Arabidopsis thaliana landsberg
aaacacagcaagaacgagcgaatctcctcaacttcccaacctaataatagcttgccgtgtcgtgactcacagagtaggaagctaacgttatccaatgcttcgactttcattacagtacctaaacccttcttgtccttccccatcaaaaccaatgctcctactctacctcagcagacccttctcggtacaaatcttaatccatgtttctttgttttctggattagcttctcttttgtctgtgtcttccccatcattgattcctttcttgtttacggatttctataggaattcgaatccaattccctttagaattgaacgccgtttccaccaaatgggaaccggcaaaggtacgaccttttagttttttttttctgcgtttcgttttaattt

SEQ ID NO: 160829 - DNA, 2206 bp, Arabidopsis thaliana landsberg
ctcaataagctgtctcataagatatcaaaaccgacgaactcttcctcctccgtctccgtcgcgaatcgtgaaattgatcttccacctcctccaccgctgcaaatcaatcaagggaatctccatcaacatcaacctcctgtttacaatatcaacaagaacgatttcagagatgttgttcagaaactaaccggttcacctgcacatgaacggatctctgctccgccgcaacaaccgattcatcaccctaaacctcaacagagttcgcgtctacataggatccgtcctcctcctttggttcacgttatcaatcgtcctcctggtttgttaaatgacgcacttatccctcaaggttctcatcacatgaatcaaaactggaccggcgttggatttaaccttcgaccaacggcgccgctttctcctctcccgccgttaccaccggttcacgcggcggcggaatctccggtctcttcgtacatgcggtaccttcaaaactccatgttcgccatcgattcgaatcggaaagagttctctggattatctcctttagctcctttggtctcacctcgttggtaccaacaacaacaggaaaacgctccgccgtcgcagcataacagtcttccaccaccacatcctcctcctccttccgctgctgtttcgcagacggtgccgacatcgattccggcgcctccactgtttggatgttcaagttcgcctaaatctccgtatgggttactctcaccgagcatacttttatcgccatcgtcaggtcaattagggttcccggtatctccgacgacggtgccgcttcctagccctaaatacaaaggtcattgatcagaaaatcggaaacccttgtcggtcaaagtgagaaaacgtcgtcgttttgaccgtcacgacaaaatcccctttgttctttttgtacatcattagtggagagtggtgggatcatttgttttttttttgttaattaactcaaagattacttaaatccgtttttttttaactttcttttgtttcatggtttgttcatgttagaaacaaagaagactaggaaaaagaaaggaatacacttttgcaactctattcaatttttataagtttgccgttatgatttcatctctttgtagatcagattgcatacaagagttttttcttcatcgtctattcgatggggtattaaatttttgattggttgatcagctataccaatcacttcactgttcctttgtttgaattttatgctctgatgctttcattttaagttgaaacttcaaactctgacgagatcattaattttaaacctgtaaagtgtcaaatgactaacgagtgtctattgcttaaatagttcttttgaaatgtatttttatttttatataatcaaattgatgattgatttcagaccaggtaaagtaattggctttacgcagtccaataaactagtccgcttttaaaattaaaaattgataaacaatcaatctacgcaacaagataagagacaagagactttatgatcttcaaattgatgagaaaagaaagcaagtttcgattacacagacattgaaatcgataacaacaaagaaataagaaaagagaaaataaattaaaaagagatagaaagatgattgatggttcagacttgccacaaatatgatgaatgaataagcttttgaagatgagcgaaatggcaagagcgacctcttagatggattaagaaaaacatatggacgagaaagagaagaaattccaaaccctagaagaaaactagcagtttcactcaaaagatcactgctgttcctcggtcggttttggcgctgctgcttccttgatctcatccgcagcatcatcctaatataatccccaaagttacagaatttagtcaatggaatgcgaatcatccataacagaaacaaagaaagaacaaaggttagaggattatgaacggacctgcatatcagatgtccagagagtgaggttgtcacgaagaagctgcatgatcaaggtactgtctttgtatgactcttcaccaagagtgtccaactctgcaatcgcctcatcaaaggccttgacgatacataacaacaacaaaaccagtcaaatttatgtccaatgaggtcaagtgttaaaccaagtccaatcacattatcataattgaaagatgagtagattgaaatacctgtttggcgaggttacaggcacgatcaggaga

SEQ ID NO: 160830 - DNA, 1110 bp, Arabidopsis thaliana landsberg
tcattgcaaggttactgcaaggttaaagcgggaagtgagcaacgagaggcagcggcggccgtcatggattcatcggcgaacataaacaaagctctaacggagacgcgtttctccgacctcgaacctccactctccggagatatcattgaggctcttaatcagtctgatttcgagttctgcactccggttcaagccgcgacgatccctttactctgtagttacaaggatgttgccgtcgacgcagccactggttctggaaaaaccctagctttcctccttcccctagtagagattatccgtcgatccaactcctaccctccgaagccacaccaggtaaggagaattagccgaatatcaagagtagtagcttatgctatatgttaacaatttcaatctcaggtaatgggggtgattatatcgccaacgagagagctatcagcgcagatacataaggtggcaagagccgtttgtgtcgactttgcgaaatgtgaactctgtcctgcttgttggaggtcgagaggtggaagctgacatgaatactctcgaagaagaaggagccaatctcttgatcggcactcctggaaggctttcagatatgatgaaacgaatggagtttctggattttcgaaatctcgagattcttatcttagatgaggccgatagacttttggatatggggttccagaagcaggtcaattacattatatctcgcttgccaaagcaacgtaggactggcctcttttcagctacacaaacacaagctgttgcagacctggccaaggctggccttaggaatcctgtgagagttagatcgggagctgagtcaaagtcgaaaacgccttctggtctgtattgtgaggtattattattgtaaggtcaatatttaaatacgtatatgtgtttcgggatagtaagtttatttcttcttcgtgcctctgcagtatttaaaatgcgaagcagatcaaaagtcatctcaactagtgcatctcctgatcgagaacaaaaataaaaagcttgtcgtgtaagttttgacacaacggaaaatatcaaattaagcatccttttcaggcagtctaacaagtatctcttcagcagattcttcgtgacatg

SEQ ID NO: 160831 - DNA, 855 bp, Arabidopsis thaliana landsberg
aacgcgtttcttgtttcttcttttctgtgtttcaggtgtatgcctaggcaaacaaagagcacacaacagaaggagcttatcaacttgtctgttctggacttgggaaaactggaacgcaccaaccaaaaaactcagagattagcaatggttgacagagtcatcagagctgatgcagaaggagttttgagagatgaggatgggcaagcctacaatgaggctggtcagagattggatgatcatggactcatcctacctgaggacgccaatgaggatcaggtgcgcctcaatgcgcaattagctgccagagacgtagcagagctcggtgttagcgacaccaattgggtgtcgatcgacacctttgggagcagaatgcagacgcgattggtgtcgagcgacacaacagagatgtcgatcgacaccaaccccagattcctgcagctattcctccagctgcagaaccacgtcgtactcttcgggatttcaacagttttgacatgttatatgctaaatgatcagcaatcgtacccccacccttccagaggaacgattatgagctaaagcctgactactttgctttagtaggccaacatcctttccatggcttgtctcatgagcagccaatggaccatatcgagcgttttgaggacctcgttctgagcatcaaagctaatggagtcttagaggactacctactgtgcaagctcttcccttattcacttaccggggaagccgcttcttggctgaaaccacttcaagcacgttctctcgagacttggagaaacatcaagttaggtttcttgaacaattttttatgatgattctaagtctgaggagctgagaaacaagctatctacc

SEQ ID NO: 160832 - DNA, 749 bp, Arabidopsis thaliana landsberg
  unsure (1)..(749): unsure at all n locations
gttgtgaggagaaaaaaagggttgggaggcnccgaaagaacgcaagtagtgcaattcggaggaagaaaaagttgtggaggagaaacaaggcaactctagggctcggagaggtaagaacagtgagattgtccagaaatcaatcaaattggaagttgaggatactcccaaggcagtggaaatctcagaggtgaaaagcaggaagagagtgacaaggagcaagcagatagaaaatgaatgttttggattggaggttaaagatgagaagagaactacaaggtctaccagaagcaagacgactgaaattggtggagagtcttttctggagttggagatggtcctgaaccaagcccggaaaagccgtgcaaagaggaagaaaatggatgaggagccatccaaggagactagaaatgatgatgccggagaagaggttttgaagaactgtcatgttgaagaagataaggaaaatgaagctcaggaaggttgcagtggaagaagtgatgacatatgtgatcaagaagatgagaaggaatgcgatggatctaagagggtagagcaggtggagattgagttaaggaagaaaagcacagtagaaggcctgaaatgcactgataaagaagatggagaaacagagaactcacaagatattgaaagagaaagagaaaatgaaaatgaaaaagaagctcaagaaggttgcagtgaaagaagtgataaagaatatgagagggttggtggtggggctaagagggtag

SEQ ID NO: 160833 - DNA, 1231 bp, Arabidopsis thaliana landsberg; identical to SEQ ID NO: 11214

SEQ ID NO: 160834 - DNA, 626 bp, Arabidopsis thaliana landsberg
tatttgaaatttagcgtcttctcaagaggttttagagctttttttttggattcatatagttttgagcttgctgcttcgtttatgcttcagtctacagattgaattgtttatgcctaactattgaactttgctagcttaagcggatagatacaatacaatggtttggactaattgagtattttttggttcttaatctaatcttctttcacgttttggttgcctttggtgcaatttcagaaaagctggaaagccgcttggttacaaagaatgtcagtttcacagagtcatcaaagattttatggttcaaagtggtgattttcttaaggtcagtaccctttacttcttataaatcctcacttcttgattgcttatgttggttctcaattggcactggcttttagttctcttgtttgtgtgttcttggttcgttacttaaatctcttcttactgcattatctaatttgtgcagaatgatggtagtggatgcatgtcaatctacggccacaagtttgaggatgagaattttactgctaaacatactggaccaggattgctctccatggtatgtaatttgctttatgaatctgagttataaatttgtgtaacttgaatcagcccccttgtga

SEQ ID NO: 160835 - DNA, 1193 bp, Arabidopsis thaliana landsberg
accaactcatataaaacaagagaggatttgatctaaagattaaaatgatgggaaatatgtttggttcaagcttggcgagtttgttcttcttgtgggcaactattcaacaaatcttccctaaccaccttaagatcgccattaaggagtttttgctctctacaatccaacaaatctcttttctccagagattttccgacagattcattaattttttctcaccttatgtccaaatcaacttctctgaatacgaagattatcgagtcaatcacgctttcgaccctatcgagacttaccttggagcaaaagcaactgataaagccaagcatctaagagcaagccaggttagagagagtaagggcttggttttaaaacgagacgagactaaagtccgagatgagtatgaaggaattcgtgtctggtgggagatggaaaccgactccgcaggatataaaacattgaagctcactttccatagacgctcgcgagatattgtaaccaactcttacataaaatatgttgttgaagaaggcaaatctattgatgctaagaacaagaagatgaagttgttcacaaacaatccgagttctcattggggatccagcaagactagtttttggagatatattgactttgagcatcctgcgactttcgagacgttagctatggatccgaagaagaaagagcagatcttgaatgatcttgctgcgtttaataacggtaaagattattacaagaagattgggaaagcttggaagaggggttacttgctctatggaccaccgggaaccggtaaatcaacaatgatcgctgcaatggcgaatcttttgaactatagtatctacgatcttgaactcccggctatacagaacaactcagagttgaggaaactactcactgctacttctaataagtcgattatcgtgattgaagacattgattgctcgttggatcttactggcaaaagaaagaagaaagagagcaacttgatgatatggagaaaagatggagaccaagacaatgaagaaaacaagagtttcgtaacactctcgggacttttgaacttcattgacgggatctggtctgcttgtggacaagagcggatcattgtcttcaccacgaatcacttggcgaaacttgaccctgctctaatcaggagagggagaatggatatgcatatagagatgtcctattgg

SEQ ID NO: 160836 - DNA, 626 bp, Arabidopsis thaliana landsberg
acagacagagtaatgatttgccttacttgaaatgataggtacttttttcgagatcagttattaagcttactatggaccctatccaagactcgcttacccaatcttagtctgtcgtcctttagagttaagagtaccggcattatgaccctgtctctacggagtaggtgttaccgaagctcttttaactctcaacctacctattctccaattatcgagttcagtcatgttttaatctattgcttggataatttgtaaccctctgtttgtttaggaaagtacggcgaccatgtcttcgagaggtggttaccgtccctttttcaaccgcgctaacaagatagcctcctccgtggagcaccttttcaaaagctcggatgcattgtttgcaagagccgcttatgaccacttactggtcgaggatttcgtgaagcccgccttcatggtcgaatccaccaaggcctcaacagatttttcaatctttgtaaattttcttaaaagtacacatcttttggaaaactcataaaacccatatctttattttcattatattatcttaatgtcattgtgtacgaacttcccttttttaaggtttgaatgaatgaaaatcttgtttgacaaaaaaaaaagaa

SEQ ID NO: 160837 - DNA, 856 bp, Arabidopsis thaliana landsberg; identical to SEQ ID NO: 21588

SEQ ID NO: 160838 - DNA, 618 bp, Arabidopsis thaliana landsberg
tcgaccatgtacacagaggaccgactactgcatctcctgctcgatctcttccaatgtgttaagcaacgcctcgtatggatctttccacgacctagttttagtccacgaatgatcaagatctgtaaaacccaacttagagggattgacatcgacatcaagattttcttgaacaataagggatcagacgagattggtgagtatataaggatggttatcgcccaagaaaagaaatggcttctcgaacgagttccgccaggaagagaaaaggaggtgcgagatcgttttgatatcagcggtattgtttagtacgaagtagcggagaacaaggctatggaagtaacttgggaagtaagacaacggaccaagcccgtgaaaccaatatcaaaaaatattttagatatcctattacgataatgattaaaagatttagaatatttacttattcatatttatctatttccatttctaattagattaaatctaaattaggttctatatatattgtattaatactattgaaatcaagaacacaataataaagagttttccccgaccctttttttagtttctacaaaagctaacatcggtggtctagaagaagctccgaccatgtattag

SEQ ID NO: 160839 - DNA, 722 bp, Arabidopsis thaliana landsberg
atggacactacagaaggaaagctactacctacttatgagcattctctttttccttcagctcgatctataatgcgcgaatgtgctggctgccatgtaaatggtctcctgtacggcggctatttttgcaatgaaccttactgccatatttggttccataaggagtgcggcgaggctccattggagatcatcaaccatagtttccaccctcaacatcctctccttctcaccaatgagtcaagagatggtctatgcgatttgtgtggacaacaactattgtctccctcttatagttgttccacatgtgagttcaagttggatttgacttgtgggattaaaccatcaccgcctgctatcgaacatccgttgtgtcataaccatccagtcgtcttcttgaagatacgagaggagaaggttccttgtgacttatgcaaggagtctattgatggaccatcgtattcatgtcttgaatgcgatgtgtacttccacgtgaactgcgtaaatacctcggaagaggtaaatcatccttgtcatcctattcaccctctcaagttagtcgcatctgggacacgtacgaatgatttcgagaccagttgttggttatgtggagaaataccaaaaagcgtgttttaccattgtttcatttgcaatttcacatcgtgccttcgttgtaccaaaaacccaccacctcttgttattgatcatatcaagacccacaaacatcc

SEQ ID NO: 160840 - DNA, 583 bp, Arabidopsis thaliana landsberg
caaaaatcaaacttcagaagctattctaaccgttagaaacaattatctgcattcagggccgtttaccactgtccattctgcaacctttgccgggtcggggaaggactaggaatcgattttttccattgcatgacatgtaactgttgcctagggatgaaattagtaaaccacaagtgcctcgagaagagcctcgagacaaattgccccatctgctgcgaatttcttttcacatcgagtgaagcagttagagccttaccatgtggtcactacatgcactcagcttgcttccaggtttgcaaatctctctttctctcattaaacttaaattaacttttaacgcctaaaatcaaaacacttgctgttactctggtctttcaggcttacacttgcagtcactacacatgtccaatctgtggaaaatcattaggagatatggctgtaagatgatccccgcccctcaagagtgtaacatgcatatcacatcatgcaaatattgtttactgaactgtctcttcttcgtttcttttgcgaactccacaagtttaatttggtatgcttgatgcactgttagctgcagaagacc

SEQ ID NO: 160841 - DNA, 845 bp, Arabidopsis thaliana landsberg
  unsure (1)..(845): unsure at all n locations
caagaaaagagaaatggcgctcgaagctcttacgggagtcaacggtgatctattcaccatattatggatggcgtcgaagggagctaaccaaacggagcactatctcaaagaagaagcaggaggaaccgctttttacgccttccgagcatctttctcgtcggaagaattgttcgctacggagaatacatctccctttggagaaatannnnnnnnnnnnnnnnnnnnnnnnnnnnnnnnnnnnnnnnnnnnnnnnnnngacgctactgttaacgaagcttccctcaagccacttgaagttcctatcggaccaagaacctcattctatgcttctgtaagtaaacaaaaacttcttaaatgcgttttaaatcgaaaacatcagaataatttgtgtctgaaacttactctcttcaggtgccaagcgcggttgatagaaaacaacaggttgtgttcacaggacattctttcggaggcgcaactgcaattctagcaacagtttggtatttggagacatacttcatacgtgacgcctatgctgcccctgagcctcgttgtgtgacatttggagctcctttggttggtgagagaattggagccggtttttcgtaaactttgttacaagattcgatattgtccctcggattatgcttgctcggaagacaatgatggagcaaaccctgtcttacgttcttggcaaattggattctacaagagctccgatccaagagagcgaccaggtgataacagaattttacacaagggtgatgcgagacacatattctgttgcacccaaacctgtctgtcagttgattggatcgataaagcatttttagaaactctttctagtc

SEQ ID NO: 160842 - DNA, 2043 bp, Arabidopsis thaliana landsberg; identical to SEQ ID NO: 66325

SEQ ID NO: 160843 - DNA, 891 bp, Arabidopsis thaliana landsberg
caggagttttctctccaaatcttgaattctccgaagaaaagattgagctgacatttgctacaaactttctaggtaattatgtgacacatgaatatatctatgtagagtgaaagaaaattaatgatggttagcataacttttcaggacattacttattaacagaaatgctgatagagaaaatgatagatacggcagagaagagtggaatcgaaggaagaatcattaacctttcctctgtgattcacagttgggtcaagcctgattgtttctccttccctaaattactccatcccattaggtaatttacatttgttatccattttttacgtgtgaaagtatctaagatataaataaattaaaaaaaaaaaaaaagggaaagtatctaagaaaaaaggtatctcaaaaaataaaatttatcattaggtttgtgtaattgtgtttaatttgtaattgtgttttgtaatcgtctagtaggtataacgggacaagggcatatgctcagtcaaagttggccacaattttacatgccaaagcgttgagcaagcaattaaaggtacatttcataattaataattacatctttgttttttgtttcattttttcacgtaaaataataatcagaaatatttatcactgaatgtgcttacaggacagaaatgcaaacgtgacgataaatgcagtccatccaggaatcgttaaaactggaattatcagagcacacaagggtctttttacaggtaaatttttttttttttaaccatacatatatatagaagtgcaaaaggaatctaataagtaaaaaaaagaaaatctaaaacatgatgtggtctgatgatgcatgcagattctctgtttttgatagcttcgaagctgctaaaatctataagccag

SEQ ID NO: 160844 - DNA, 915 bp, Arabidopsis thaliana landsberg
gctaataaagggtttttgcaagtataaaagggtagaagagggtatggaagtcttccgtgagatgtctcaaagaggattggttggcaacactgtcacttacaacattcttatccaagggttatttcaagctggagattgtgatatggctcaagaaatattcaaagagatggtatctgatggcgtgcctcccaatattatgacatacaacactttgttagatggactctgtaataacgggaagctagagaaagcattggttgttttttactatatgcaaaagagtgagataaaacttgatatttacatatatactactatgattgaagggatgtgcaaggctgggaaggtggatgatgggtgggatctattttgtagcctcagccttaaaggagtgaagcctaatgttgtaacctacaataccatgatctcaggcttgtgtagtaaacgcctattacaggaagcttatgccttgctaaaaaaatgaaagaagacgggcctcttccaaatagtggtacatataatacacttatcagggcacatctgagagatggtgacaaagcagcatcagctgaactcatcagagaaatgaggagttgcaggtttgttggagatgcttcaaccattggcttggtcgctaatatgttacatgatgggagattagacaaaagcttcctcgatatgctttcttaaaacagtttcatcatccttgagtcgagagaatagtcgagcaaaccatgttcccttgaaagcagcatctgcgaggtgaattaatttttttttctattgcttatttcttaacggatgttctcatgttacaggcagataaatatgtgtatattttggttacggttttgtgtaagcttcttgaacatgactgatactaatctttgttatttatctgttaggttgcaaaca

SEQ ID NO: 160845 - DNA, 1069 bp, Arabidopsis thaliana landsberg
atggctacaacagcagtaaacctaccaattcatgagcaccctctttatccttcagctcgatgtattataggtgaatgtgatggctgccatgtaaatggtttcatgtacagcggctacttttgcaatgaacctttctgctttatttggttccacaaagagtgtgctgaggccccagcggagatcagccatagttcccaccatcaacatcctctcctgctcaccaatgactcgactgatggtccttgtgatctgtgtggacagaagctattgcctccttgttataggtattccacatgtgagttcaaggtggatatgacttgtgcgatgaaaccatcaccgcctgctattgaacatccgctgtgtcatcaccattcacttgtcttcttgaagaaacgagaggagaaggtctcatgtgaattgtgcaaggattctattgcccgaccatcctattcgtgtcttgaatgcgatgtgtacttccacgtaaattgcatccagctctccaaagaggtaaatcatccttgtcattctgctcatcctctcaacttaatcccatctgagtcacttacggatgatgccgagacaacttgtcttttatgtggagatataccagctgaaaatatgctgtatcattgttcggtttgcaatttcacatctgccttggttgtaccaaaaacccacaagccttgttgctttaacagggcttgcatcttaatctgccagagactgaaactgtttctcccagaaaacttgtcgatcttcacatttatcgcagacatcttctcaccagattacaaacgcggaattcccaaaacctgagtctgcacaaacctgattctgcacaaaacttcttctgcacggattttgcacgaaaccttcttttacacagatctgcacgaactttcttcaacccgaaaatcgcacgaaacgcagaaaaggaaaccttgtgctctgacacaaattttgtataaatctgaaactgcacgaaattcgcacgacggacacagaataaagaaccttgtgctctgataccagtttgttataatagatgtgagcaagataacaaaaacgt

SEQ ID NO: 160846 - DNA, 314 bp, Arabidopsis thaliana landsberg
gggaaatccttgcttccgagcaaagaccaagaatggtacttcttcagcccacgagaccggaagtatcccaacggctcaaggacaaaccgggcaaccaaaggcggttattggaaggctacaggtaaagaccgccgagttagttggagagaccgagccattggaaccaagaagacattggtttactaccgtgggcgcgcgccacatggcataagaactggttgggtcatgcacgaatatcgacttgatgaaacagaatgtgagccttctgcatacggcatgcaggttcgttgctaactaactggattcgactacaa

SEQ ID NO: 160847 - DNA, 979 bp, Arabidopsis thaliana landsberg; identical to SEQ ID NO: 30463

SEQ ID NO: 160848 - DNA, 1452 bp, Arabidopsis thaliana landsberg
tgagttttgaaattttggttcttgttcttgagttgattttggatttttatatagatgaagtaatatatactaggatttagggttgcatttcctcaagaaaaccctgttcctctttcaaatccaatttgttttaattagtttgtttcatctacggttgaatataactggtgttttgatgtagagctgaatacaatccagaacatgatctcttggaacaagagttcttgcttaaagggagatggtaccagaggaaagatttagaggtaaagctttttttcttctgttgttgttgtgaactcctgactagagaatccaagcaaacatgttgtgattcaatgtcaatgtagatttcatcagttgttcactgttgatcagcgtgagttccttattttccagccttggactgcctttaggatctcaaggttttagttgtgctttgttcacctaagactatagaagaacttatattgtgacaggttaaaaacatcagaggagatatccttcagtgtagtcattacatgccagttgagcgtcctgaagataggcctctaccttgtgtaatatactgccatggcaacaggtaatcgtaacttttattttaataaaacgtgatttgagctgtactggtgaaataagctagttaactcatccttcaatcgatgcaatagctggtaggatactatgacaaccatgcattgaaatgaaacacctgatatggttgccaacattactaaagttttccaattatcattttagcttaatgtttcttttagtatactattcagtaatggattcattcttattcagtggatgtagagctgatgccagtgaagctgcgatcgtattacttccttcaaacatcacgattttcacgcttgacttttcgggatccggtctctctggcggggagcatgtcactttgggttggaacgaagtatgtcctcctttgatcttttctcaaaatattcctcttcttcccttcagctgttatggcctaaacttatcgttgtttggagtaaacaagctgtcttaagtcaatatatctgcttctcgattgatatttgttagattgaatgtctcgtggtttattggaattctatcccactataaccaatacacctatgatgcttcatttggtctatgaaggtattgttatctttctgaagaaagatttccaaatgatttagagtttttgatgctctatttcatggtagacttaggtgcctttgagtgtccttgattaggttgtcaatgatttttccttccctcacagtcgctgccttcataagtcataatcctgaattgtgagagcagtcacttcttttatcactgttaaacctgatgtgagtgcttgcagaaggatgatctgaaggctgtggttgagtttttgcggcaggatggaaacatatccttgattgggctatgggggcggtcaatgggtgctgttactag

SEQ ID NO: 160849 - DNA, 1909 bp, Arabidopsis thaliana landsberg
agttaacttgtattcaaaaaaaggacttcttgtagggacttgatgtcaccaatgcttcccggaataggacctgtgaatctgcatcacatcacatgtaattcccccccaaaaaataactttagaaccttaaaaatacaagatacaattcacaaatatctcgtgacatcataataccaaacttgaaataaaaacagagtaaataactctgtaatttgaaacagagtaaataattccctgataacaaaacgagaatgaaagtgtggagcttttgagacctgttattagcgaatgtgaggtaaagagcggtgatcgatccaagattttcagggagtctctgaacaagattgttgttgttgatgaacaatacgtcgaggtctagattgaaaacctgaggagggacagaaccggagaaagaattgaatctgagatcgagaaacgtgaggttcgttgcttttaacacagagcttgggaactctccagagagcttattgttgctgagatcaagctcgaaaaggtacttcaatttgctgaagtttggaacagagcccacgaaattgttactgtttgcgtgaaagatggtgacttcttctaacttgttgaggaagttatctagccggagtttcttgccacccaagttaaaattgttgaactgaatgctggcaagtgcgaggtcgtttgttcccggtaacttggcgcactcgagtcctatgtatttgtcctgagcgcaaatgtcggtgcctacccatgttttaagtatgctctttggatcatcttcgattagcgtctggaaattcttgatgactggataaactttctttattaatgggcttgagaaatgtagcggcggtggcggtggaggaggaagtggccgtggtggcggtggtgatggtgttatataatgatgataaggagggggaggatagtgttcaggctccggagatggggatggaggagggagtgactgtggtggcggcgggggtggtggcgtttgaggaggaggaggcagcggaagatagtcttctggctccggagatggcgcaggagaattgtaattggtgctatcactgccaccgccgatgatgatttcgagagattttctgtaggtgttgtggttgtttccggtggctagaattgaaagaaagtgaacagacagaatcaagaaaatggaaggataataatttggggccattgctgatagattgatgagagccttgaggattggcttaggcagagctacatatagagaaagtgactgaaaatgatgagaagtcaatgcacatgtcttcttgtgggctggttttaggttacaacttacaatgcaattagctaaatttacatttgaattattggtaagaaaaaatattaattaagatcttcatattataatgccaaagggtggttggatacatgtgtagctatagcttcgttggtgtatgatttttttccgtcaacggcttccacgaaaaatcttggtaatagaaaaagagtaacataaattctttagtgtgtgattagcaaaaaataataaccaattagtatttgcaacaaacaattttctaatagaatctgatcaaggactctaccatagattttggtgctttggatccattcttagagtcaaaggagcgaatgcctctggtgagtcaaagggcattggctttgtacagtacaacactgaagaatcagctcacaaagccatagaacatatgaaacgaatgtttcttaacgataggaaagtatatacgttggaccttttcttcagagagatttccaagcgaaaaggagatttaatttcacggatatttatgtcaagaatctctccaagtccttgactgataaagatctgaacacaatttttcaagagtttggaccaacgaaaagttggtgtgatcattagggatggttttgg

SEQ ID NO: 160850 - DNA, 595 bp, Arabidopsis thaliana landsberg; identical to SEQ ID NO: 31480

SEQ ID NO: 160851 - DNA, 512 bp, Arabidopsis thaliana landsberg
agagttaagaagttcggcattatgaccctgtctctacggagtaggtgttaccaaagctcttttaactctctacttaccctttcatcaattatcgagttcagtcatgtattaatctattgcttggataatttgctatcttctggaaggtggggaaagtacggcattatgaccatgtcttcaagaggtggttaccgtctctttctcaacctcgttaacccgctagcctcctccatggagcatcttctcaaacgctcggatgcattatttgcaagagtcacttttgaccacaatgtggtcgaggatttcgcgaagcccgccttcatggtcgaatccgccaaggcctcaacagatttttcaatcattgtaatcttttttaaaaagttcacatctctttggaaactcatgaagctctatctttatttctttgtatcatctttgcttcattgtgtatgaaccttcctctttttgaggtttaatttgaatgaagatcttgtttgacaaaaaaaaaaata

SEQ ID NO: 160852 - DNA, 446 bp, Arabidopsis thaliana landsberg
ggtctagactacgtccggagctgcctcctggttactttgggaatgtgatattcactgcaacaccattggctgttgcaggggatttgttatctaagccaacatggtatgctgcaggacagattcatgatttcttggttcgtatggatgataactatctgaggtcagctcttgactacctggagatgcagcctgatctgtcagcccttgtccgcggtgcacatacctacaagtgcccaaatttgggaatcacaagctgggttagattacctatttatgatgcagactttggttggggtcgtcctatatttatgggacctggtggaattccatacgagggtttgtcttttgtgctaccaagtcctactaatgatggcagcttatccgttgccattgccctccaatctgaacacatgaaactgtttgagaagtttttgtttgagatatga

SEQ ID NO: 160853 - DNA, 970 bp, Arabidopsis thaliana landsberg
ctcattttgtcaaaagctgtcgtaattatatgattacaaatattttcctatattgctgactttattggtctaaacttcttttgaaaaatctaaaactaaacagtatttggtaagtattactgacaatgtcatatgaattacatgcaacatggatctctactattggtcactagatatcttaaatggtactaaaaagtatcctattttctactagtttcgaagattagttgtctgaatcttcatctataatccacctcagttaccaaaaaagggtcatatgaaaaatatttatctatcaacagtacttgtttcacaaatgaatttacatttgtattcttggttttatcagtcagtcagtactcagtacatgtcttttatatttattaactaaaatagagtatttatagaatcatttggtcacgagatataagattttctagattaaataattttactaccgtggtgttacttccaatgatatttatctagaaatgatattcttgatttgaacccaaccgttttacgtaaacagattctgaaaaagacgatctagttcaggagtttctaccgcttcgaaagaaagatgttttacaaattattgataaagaaacggaagtactagactcgtacttagatatgatgttagaaacgacaaaagcgtcttcaggtcttatactcatgtcctgtgaagagttggaccaagactcattgagtcaagcacgtgaagattttcaagtcccgatctttacgataggaccttctcattgctacttcccaggctcgtctagtagcttgttcacagtggacgagacttgcattccatggttagacaagcaagaagacaaatccgtgatttacgtgagtttcgggagcattgtgaccatcagcgaatcagagttcatgaagattgcttggggtctaagaaactgcgaccaacccttcttgtgggtcgacgggtggttgctgtaag

SEQ ID NO: 160854 - DNA, 571 bp, Arabidopsis thaliana landsberg
tgaaaattaaattccattagagatgttaatttctttttaatattaaactaggttagtacctatgcttcatgcttttattagtttataaattttgctattctagcaaaattacttaatcaaagaaaaaaacacaccacttaactgaagttacactggacacttactaccacttagctgacacaagaggtcaaaggtatggacaaaagcaaaccaaggcaaaactaaaccaaagcaggagagaggtaatcggaatcttttatgtgatcatataatgagtctgaaccttcccactatcatgcttactcatcccgtcccatgttgtttgttgggcgatgcatctgaaccctcttagatttgttggataaaactgcttcggcttgctcgatcaaccctctcctcaagccttatgaaaccggctaatctcggtcttttgattagaagattatctgcgctttgaacttgtaatcttatttgccgattgcattatgcttactcctctaatgaaaacccttccctgaagccttactcctgtaagagatatcctctttgaaacttgaacccggagaaaagt

SEQ ID NO: 160855 - DNA, 675 bp, Arabidopsis thaliana landsberg; identical to SEQ ID NO: 57999

SEQ ID NO: 160856 - DNA, 2982 bp, Arabidopsis thaliana landsberg
atgcagcaaaccatgtcgaaaatgtcacaatagttctcggatgtggaaaaggctgttgaaacactacaaacaaccaaggtatctcttagtcaaaatgttagcactatacaatctcgtattcgttttatgaatgtaggaaaccctgttggagtccgaagtactatgttcaattcgccaagctcccttgcgcgaaatggaaccagcgaacaaacaactcctgatgccgctaacacggtagttcatccggaggatggggaaacacagctcaagggcgaagacaaatttgcagatcaacacgagaaagaaagcctcgtccagttcaaaaccatgaggaaggttagccgggaactgaaagaaatgagaacaaagttccctcaggccactagtttggaacctgatatcaatcgggtcatcgaacaagccaagcgaacacctttcatcccacaacaagtttgagaatcacagattctcggaaactcaacctagaaccttacaacggtttggaagatcaaaaagctatctcgcagcttttctaattgccacaagacgagtcaacttagatgaagctgaggaggacacagggtactgcaaacttttttctgagaatctttgcggacaagcattgatgtggttcacttagttagagccaggttcaatcaataactttaacgaattatcagccgtgtttttgaaacagtattttattcttatggataaaagcatttcaaacaccgatcttacgaatctgtcacaagggccgaatgattcacttcagatttttatcaccaagttcaaagttgtactttcaaagttccaaaggatttcacaacaatcagcattatctgcccaacaaaaaggattgtggcatgattcaacgtttaaagaagatataatacttcacaagccgtacacaatccaagatgcacttttccgagcaaccaagtggatggaagtcgaagacgaaaaagaaagctttacaaaaaggaataaacaggcaacactggcaatcactttccctgccaagaagttcgagcccaaggaaaaccaaggaccaaagaagtttggatcgcagcctttcaacaccaacgtcggcaggcaaatccaaggaaaaggaaagtcgaacacttgggttcgagatgaaagtctgtactatgacatacatctaaccaaagattgtagtgtcctcaaaagacatctcgctaagctatgggccagcgaagatctttccaaattcaatagagacgatttcgtgaagaaatattaagaagcaagggataattccgaacttcaaaactccaaaagaccgaggccgtttaacgaggaagaacctgggagtttgaagcgaaagatcaatataatccttggaggctccaaactttgccgagatggtatcagtgcaatcaaaaagcataggctaaatgtgttacttaaatcgagcttgagcgaagaaattgagtaccaaggcgcttcaatatcatttgacgagaaagaaacacgacaccttgaaaggcctcatgatgacgctctagtcattatgctggacgtggctaactttgaagtgtcaaaaattctcgtcgatacaggtcgtttggttgatctgatctctctaggtactttggaaagaaagggaattagtagggcagatgtagttggacctccgtctcctttggtacctttcccgagcgatcagccatgtctcttggacaatcaagtacatgtttagcttaaaatgtcgaagatcgtagactttgtcgtttttgataaaccagcagcctacaagatcatccttgggactccctggatttatcaaatagaggcgatcccctctacgtattatcaatgcatcaaatttccaactccaaacagagtaaaaacaattcagggagatcaagaagcttctcggacatgttatctagctagccaccgtctgaagatccaatagcaattaacgaagcccacgaagaaagaaataatgttagaagaggacaagccagatcggaaagttaaaattgaagctactctaaccgatgatataacccaattttcaccgatttatctatgttttaggtataggattttgagtctttatgttatttctcgagtctttttagtgtcttttcaggtatctatgcaatgggacatcaatggttatgtttagacattttggagcaatagataaggaaaaggaagctaaggacgattttggatccgtgaatcaagaggagtgtcgatcgacacactcttggtttcgatcgacactagtttcagcccagcaaaagtccatgacgctttcaattttacagaagaggaaatttgcccagaagactttcctattttcattattagtccctcacgttttatattgtttatatacattgttctagaccctagtttctattatcaagctctttggaaaaccctgttactgagagacataagctatttatccaatgttttcagagattcattcagttttcaatacagaaggagcttatcaacttgtcggtcttagacttcggaaaacttgaacgaaccaactgaaaaactcagagattaacaatggctgacagagtcttcacagctaatgcagaaggagttttgagagatgagtatgggcaagcctacaatgaggctggtcagagactggatgattatggactcatcctacctgaggacaccaattaggatcaggcgcgcctcaatgctcaattagctgccagagatgcagtatggctcggtgtcgagcgacaccaactgggtgttgatcgacacctttaggagcagaatgcagatgcgattggtgttgagcgacacaacagaggtgtcgatcgacaccaaccccagattatgcaacaattcctccatctacagaaccacgtcgtactcttggggatttcaacaggcctggcttgttctatgctaatcgatcagatatcgtacccccacccttccagaggaacgactatgagcttaagcctggct

SEQ ID NO: 160857 - DNA, 1173 bp, Arabidopsis thaliana landsberg
agcaacatagaagttgtggcacagaggacaccacttccaaaacttgatagaaacgagctaccgtattgaaatccagcgaatttagcagaggaagagttaatcatgatcgtaatatcctctgctccatcactactcattggagacaatccatcatcgacaaaaccatcacttcctcaaaagcattaatttttaaggtcgacaatcatacaaaaaaataaaaaccaattattcaattatgcttacatgccatcaaaattccttactaattattcatgtccaaagagaaaccaacctctataatgaatctttgagagaagtaaaggagtcgatagagaagattacaaatttagaaatatatatccaatagtacctgaacaatcgagtcgcaagtagtaacagaggcctaaagactaacaacctgaagaaaaagaagattcttcaaagtgaacaacgactcttaacagactagcaaccggaagaagaggaatcgtagcaaaggagcataacagtgctatcttggaagaagaagtggggcaacccgaaaatccgtggtgcaaaacgggttagccttatttcaaccgcaatccaaacgggccaagaccgcgaggcccacatttttttggtcttccatacatgggcccaaacccaccccgcaacatccctaaacgggccaggcccgcggagcagaggcctgattgacatggctaaagactagtatcggctaccgttggcattggacagttaaggttatcgagaaagttatcaaggctatcaagattcttataccaggatttgttatgggcaatttggttgatcaaggaaactagtatcggctgcggttggctttcggtagttaaagctattgatataaactgatttttactgattttatctatgttttaggtataagattttgagtttttatgttatttctcgagtgtttttagtgtcttttcaggtattctatgcaatgggacaacaatggagataaggagacattttggagcaaaagctaaggaaaaagaagctaaggacgattttggttcaggaatcagcgaggagtgtcgattgacacactcttggtatcgatcgacactagtttcggccctggacgctttcaagtttatagaagatcaaatttgccctagaagacttccctatttgcattattag

SEQ ID NO: 160858 - DNA, 2846 bp, Arabidopsis thaliana landsberg
tctccacaatcatagtaatgcaggctttgttgaaatttatatcaccatttaaacttttatatcttgctcattccatgctgagtaaaatttacgaggaagaattggcgagccagattctcagtttggggttggatattgctggcggagcttttgaaatgcttatattgtattcacgccagcctgctgctaagagaagggtctatgattttctgtgggaattagaagacaagaattatgacagtagaattattgagcaagtgtatagcctggcatgcaggttttctacctcttttggtttggcttcggcagatacttgtttgcttaaagtcgttagtggcattttcagggggggaaatagtcagcattgtagtgttcaccagttgacggtgataatgtcacagattgttgggagaacttctaaagaccttattatccattgcattaaccaggcaagcatgagcagggccaagatattgttctatcttgtggagtccagtcccttgcatctgtcagtctttggacacattttctttagtatgctaagtaaactacagggtgactctgcgcttattacagatgatcagtttgtcatgcttctgcctcctgtgctattgttcctggcatcagtttttgcaaaactcgagaagtcatgtagtaaatgtttggatataacttcactttattcaaatatactaataaaaggttttcttcagtggcccaagttttgttctggctgcatctttgaagagaagtatgacgagattcttctgtcgacgagtgaggatatcgagactatgtttaatgcgagtcttcttgggaaggcagtacgtatgtttcagtatcactttgccttgactgaaagtccaactaaaacagacgatctcttgaaggtattctattccatgtttcctcacactagtgctggcaaagagatgttggattacgagataaaagaagtggacgttaagtcagtagaccaaatgtttaatattactaaccgtttagttgcaaaagtagagctttcaaggatctgtttgtttcccgaggatagctgtatgcatcatttaaaacgtcaagcaggtggttgtgtgaaggaaagttctccagaaatgggatccaacagagagagtttattaaacccgttactaaatgctttcgttaatacttggcaatgcgttgtcgagagatctgatggttattataaagggaattccgaaagggaggagcaagacaaatattggttcctgtgcaaaagccttgaatacttcattttgagaagtattctaaagtttttggaaggcatgtgtgaggagcttgctcacttggattcccttcctttcctggagaggctgatgaacttaattcttcggtatagatttaaggactcgaagacattgaagatactgagggaaattttctccttcttgtctagaggaaagtactcgtatcatttccaagatttagtatcgcactctcagtttacagagagtatcagttctctttccatttcatcctcacatactggtgaagtattcaggcctgtctccagcattctaaaacttcttatcatcccaaatctaaattccgtcagagttgaaaattgttgtctcgaagcacctgagtattatttgagtcagatagaaattctcaaaattctcggagtgctgctctgcaaatgtggaaaagattcaggaatctttttgaaagatttgcactttcgtcttttgtgttcttatggtgcaactccgagcgaaatcgacttgcagagctacaagctgatgcatgatatcaagttgattgttggcgaacacacgctgaatgattctgaagattatttgtggggtaatgcagccttgaaaataagagagggactgccttccgacggtagtgattctgatatagtggaagatctcaggcagagtcttttcaaagagaatctttgtcttgatcccaaaagatgtgctcaaactgttttgtattttccttatgggcgaactgcagaggcatcagataacacttacatatatgatgatccaataagcgaggtacccttgtctttcattttaattttcagttaaaagttccgtgtacttgcattttcaaactaatccctcctccttgtatagaaatgctcacctgctattgaacgatatgatccggttttcatcctgcgattctcagtacaattattgtccatgggatacattgaacctgtggagttctccagtttaggcttgcttgcagtggcatttgcgagcatgtcttcagcagattttgggatcagaaaactgggctacgaaactctagggatatttgtggatgtccttgaggtgatagttattttatgttttaatgtatctctatgacgggtctgtctttgcaaaggctcattggtcaaatttgcttctgaggaaacgggttagaatttatttgtttaactaaaactttttgatgtagagttgtaggaagaatatgcatgtaaaggtacttaggcttctgcggacgtatgtgcaaaatggagttgaggaacaatggcaaagaatcccaactgtgtctgctgttttttccgctgaggcatctctgatattgctggattcttctcacgaacattatgttcccataattaaacttttgaagaggtcatcaacactgaagctgagggtacttattctctgaaaactgacaaactcttgtctttaaacctttacaatttccctgcaaattgaactgttttttttttttttctcttcgctagggaatacctttgtttcatgataatttaaggagtagcactgttaactttagatcacagaggctttgggtacttcgcctagtgtttgtaggct

SEQ ID NO: 160859 - DNA, 673 bp, Arabidopsis thaliana landsberg
ctctcgtctctcctcagtcgccgtcgattctctctaaccggtgtttcacttcgctccaccgtcggtaagtttcacgagaagcaaatacgctcttctaactcagtccaattttgtcagcttttcaattccaaaccaattttaaagttaagtaatttcgattgtcgtagaactagtctagtgaatcagttttgctattcatactctgttctcttatgaagtaagattactatcctcaattcatactttgcataggttttggtgaattagcctgaaattttgtttagttttcgaattgaagtattgaatagatgcctagaaggccatcagggagaagaagattgtcaaagtataaacctttagcattttcaccgtttatacgttctcttgcctttgcttcaacggttagacgtaaattgcctcttccggatatgtcttttggttagtagtaaccttaaagattaagactttctctagacagaacattgtagcgacttgatgagtatgtctcattcttaactttgtagatgaaaagttccataatttgtctaagaaagggaaagagaaatcattgttggaatcctctgacgaagaagactctcaggtaaccgattttgtgaagttactctgctatcaatttcgtttatctttttgttacgttttaattcgttgtttg

SEQ ID NO: 160860 - DNA, 349 bp, Arabidopsis thaliana landsberg
gccatgatccttgtagtcataaaggacaagagaagtgtgtggaatctgagcaagaaggagagaggtgatctcgttactggcgattcaagattccctgccgccggtgatgttcatcgagtcgaatatctggaagccagtgagttcttcatcacttgggatggccatgtggacatattccttgcgagagaccttggaactgcagagagagccatcgaaggagcagcttgaaggtgtaaacgttgctctagtaccctctttgtttgcatgttgtaagttaagagagtaaactttcttacattgatgtactttgtaagagtcttcgtgttcgcgaggtggtgtattaaacgca

SEQ ID NO: 160861 - DNA, 1415 bp, Arabidopsis thaliana landsberg
  unsure (1)..(1415): unsure at all n locations
gcatgtacntagtgttgttagaagattctgttcttttcatgatacaataaatatttttcctattctcaagttaccttcgatacctntgcattgagcaaagtagcaaacgatattagtctctctctatatttattcttatgatgcgatgtttctaatcattatgctatttggttcagatgaagtggtgtcctgccccgggatgtgattttgcgattgattttgttgcagggtctggaaattatgatgtttcctgcttgtgctcgtttagcttttgctggaatgtaagttcttgtgtcaaagcccactgatctgatttatcctagttattcaatgttattggttgatcaatagcgctgtggtaaatctgaattgtagtgcactgaggaggctcaccgacctgtggattgtagcccagtttcaaaatggatattaaagaacagcgctgaatctgaaaatatgaattggtatccactctatctatatctttttcttttactcgtgtacttgatccctgaactttggcttttaaatagatacagatatcttaccacctctgagcatcttgagttcatatatatttcttggtaatcaaactctgccttctcttatgctcaggatacttgccaattcaaagccttgtccaaagagtaagcgtacaattgaaaagaatcatggttgtatgcacattacatgcacaccaccttgtaaattatagttttgttgttaatgccttctccacatctctggaagtatctaaccttggttgttactcttttcctgcaatgctgagtagctattacctgtctgatattctaggatttaatcttgtgatagaaatgcaagatgtgctcatgaacgcatcttcgtttgaatctttaggctttgccttaacgcatggacagaacacggggaaagaactggtggattttatgcctgcatccggtatgaggcggctaagcaagaagggttggtaagacctcttgtacttatttgatcatttgtggtgaaattttctgcaatcacttgagctaatggtattgtttgattgatatcaattaaatttctcctgttttagtatgatgaggctgaaaggaggcgagagatggcaaaaaattcgctagagagatacactcattactatgaacgctgggcaagcaatcaagtggtatggacaatttatatttgatttcttatgctttttgtgattttccatcatatatatttactttttaaagtgatttggcagtcgaggcaaaaagctatgggggatctgcagaaaatgcaatcagagaaggtaagagttattaatcttatttttgaattttatttccttcatcttttatctaccaaatgatagttaattcttcttttggagtggagaatgatgtgagctagcagctattcccattgcttgt

SEQ ID NO: 160862 - DNA, 1123 bp, Arabidopsis thaliana landsberg; identical to SEQ ID NO: 17124

SEQ ID NO: 160863 - DNA, 1292 bp, Arabidopsis thaliana landsberg
gctttcttttaaaagctaagagtttatagaaatccgtctgaaaaatgtctccatacctgtgcagatcccttgagaaaaaacgttttggattggaccctgcggttcaggatcatggaagggataattcaagggcttttgtaccttcacaagtattcgagattgaaagtgatacacagagacatcaaagccagcaatattttgctggacgaggatatgaaccccaaaatatctgattttggtatggctcggatttttggagcccaagaatccaaagccaacacgaaaagagttgctggcacattgtaagttaagagtgaccagaaaaaacgattctctgatcagtcataggcatcaatgtctgattaaatctcttgtgttgatattatgtgtagtggatatatgtctccggagtatttcagagaaggactgttctccacgaaatcagatgtgttcagcttcggagttctaatgctcgaaatcatttgtggaaggaagaacaatagcttccaccatgactcagaaggacctctgaatctcatagttcatgtagaaaaagctaaacttcttcttctctcatttgttaacattttcggcttgctttgtccttggatctctgaaactttttttatcaggtgtggaatctgtttaaagagaaccacgttcgcgaggtgatagatccgtctttgggggattctgcagttgagaaccctcaagtgttgagatgcgttcaagttgctctgttgtgcgtacaacaaaatgcagacgatagaccaagtatgttagacgttgtgtcgatgatatacggtgatggcaacaacgctctttctttgcctaaagagccagctttctatgatggtccccggagaagcttacaggagatggaggttgagccaccggagctggaaaatgtatcggcaaatagagttaccatcacagtgatggaagcaaggtgaagcaagtgaattgaagaaaagtggtcgttttaaatcctacttgggttgttgaattctcccgacagatataagatgttggacaaaaacaaagaacaaaattgtgcaatgaatttgctcgagaacagaacatggcgtctggttctggttatgtttcttgttttgggaaattttggcatgaacgagtcaacttttcaatttatatggtcactgtcagcatcagttttgttggtaatttttgctgtagctcggaaactttcaacgggcaagaattcaaatttgtctgccagagtagacttggacttcttagacttgacccctgaacgagatgtctctttctag

SEQ ID NO: 160864 - DNA, 346 bp, Arabidopsis thaliana landsberg
cggtggagaagggaggcgagggactggagagttttggtaaaagcagcctgagcgtcatagcttcaaagacatttcagcttccgtcaaatggtcgtctttttccctctcttagcttaactcatctcaagcgcaagctatctctttccaccacctcgttttcctccaagattcagtctcctctgtgtaactttcatgctctctctctctctctctctcgctctctctctgctatttgacttgtaatttttccgagttggtgtaggcgagtcaaataagggaaatcccctgtcgcgaggggcgggagaaggagtcaaggaagatgcgaggagtaagctgcttcaagtag

SEQ ID NO: 160865 - DNA, 1031 bp, Arabidopsis thaliana landsberg
cagacatcgggtaactattcttacgaaactcatttctttatccgaatcgctacattgctcttgtgagtgagtgagttcatggctcatgaggtatcattgacagagtaaatgtactgttgttttgaaagttttagtgtagttcaattttggaaagatttgggcatcgactatttgtttgcatttgtgtttacttatatgcatactgtgtggcgacattagaattgattagtggtgtgtatacttagcaaaatggtctgttctctacttagtgttttggtgtcaagatctcttaaacgaatttgtataattttaacttgatagggagggttaatcagagaaaaactatgggacttgctggtcaatgagcctggcgttgtcatggaagaaggttttcctaatgcaacaggaagggaacagtcgatgagaggaatgagaaactcagaggtctgcttacatccagctggtgacactcccacttcatgccgtctctttgatgccattcaaagtctatgcatccctgtgattgtcagcgacaccatagagctcccgtttgagggaataatcgattactcagaattctcggtttttgcctctgtaagtgatgcattaacacctaaatggttggctaatcatctcggaaggttctctgaaagagagaaggaaacattgagaagtagaatagcaaaggttcagtcagtttttgtgtatgataatggtcatgccgatgggattggacctattgaacccaatggtgcggtgaatcacatatggaagaaggttcagcagaaggtgccaatggtgaaggaggcagtgattagggagaggagaaaaccagcaggtgcttccgttccacttcgatgtcaatgtatctaaataatgcaaccaatccaaaagatagaaagtgttccttttactttgttggtcttttcttttgtacttgtttcgtttacgaacattgttatggccactttaaaatccatgttccttagggttcacagaaaatattgaatcatgtaagaggtttcattatc

SEQ ID NO: 160866 - DNA, 315 bp, Arabidopsis thaliana landsberg
agactttgacgctcaccacccacacaggcagacaccctattttttatgtggactacgccaaacaagagatgtacgaggctgatccagacatgtctacgtgtgcatgtacccgacccagccatggattcaggttggatagggacgctccgtggatctgcatgacgacaccggttgtacgctccttgactgttgcgcatacgaatccgctgtgttcacaccgccaaggaacggaagcggacgtgtttacctatgtgatcgtgaaagctcctacattcgcaccatcttgtactcaaattgcaggtaacccaacattga

SEQ ID NO: 160867 - DNA, 510 bp, Arabidopsis thaliana landsberg
caggctgatagtagaacaggagcacagttactggagagtattattttcattatcgattctgtcctacccttgatccgcaagctgcctctaagtgtcacagaagatctggaacaggatctaaagcatatgattgttcggcattcgtttctaactgttgtgcatgcttgcgttaggtaccctctatatttcaactaccatcactcctggctctactcatcgtattctctttcacatatgttcattgtttttgggacgattgcatgtcttcatagaagatgcagtcgagtaaaatcactcatccttttcaggagactactaatgcaaccttttgaattctcaggtgtctttgttctgtgagtaaattggcggggaaaggtgttagcatagttgagcatcttcttcagttcttttttaagcggctggaggcccaaggttccgataacacacaggtgggtttactttgaaaagatcatgcatcaggattgtttcatgtttaagcacaattaaggt

SEQ ID NO: 160868 - DNA, 114 bp, Arabidopsis thaliana landsberg
gtgtaaaaggtactattgagaggtacaagaaggcaatatcggacaattctaacaccggatcggtggcagaaattaatgcacaggtaacttaatattacacgcatgctgtcaatt

SEQ ID NO: 160869 - DNA, 483 bp, Arabidopsis thaliana landsberg
  unsure (1)..(483): unsure at all n locations
tttgtgggggaggctgacgtcagctgatggtggagtggccatgagcctctatacctctgtggttaacgaagaatcgcgccagaaattcatcgatcagcttaacgaggtaatgaatcagactagataacaattattatgtcattgcttttacatatatatcaaaacttcttaatggttatgtttttgcagattgcgagaatcgccatctcgaatcctctattcacaccaagcgatttcaacacattgttcataaggtttattaaggtagaaaactaaacaagaatagttaattaacattaagaaagtaatgattaattcagatgaaattatcgaaaactgaaaaatttgttgtctattatttatagggtgttggaatagcagctgcattggcgtgcttcattgnnnnnnnnnnnnnnnnnnnnnnnnnnnnnnnnnnnnnntccaagaagcaaaaaactaactgatccgattttgcttatttac

SEQ ID NO: 160870 - DNA, 393 bp, Arabidopsis thaliana landsberg
acaaaagcttaaccgaaactgttttgcttgaattttataggggctttcattctcaatattcagccagagattggttaaggggagcatttgtttatacagccatggttaattatccaactgcagctaatttcatggcgccactgcctggttatcccgtagagcaggtgagatattcattcgttaaagtgtgtcatcgagtattttctttttcccgaccgtcattttctcttgcatcagatgtgcaagatcatcgacgggttccctcgaggatccagtaatcttgaccgtgcctttggtgctgcaagcttatactacaactattcgggatcagaaaaatgcttcgagatggaacaacaaactgatgatcatggacttgatggttggcaatatcag

SEQ ID NO: 160871 - DNA, 712 bp, Arabidopsis thaliana landsberg
gtgtcccctaatcatccgggcatgagtttgattctttcatggcccttggtgagaaattgcgtgctgactatgatttcgcacacactttggatgctaagtttcttcctcgtggagagtctgtggaaggacctgcagtgaggctgttcaagccttttgatgaattgtttgttgactccaaggtaaaggggaaccttttcattttgtacattacatcaattagaagtcaagttttatgcaataatgtttcaaattatttatttgattttcgaatcatggattcaggacttcaatggggaagctctagagaaatttgtcaaagaatcaagtatcccacttgtcaccgtctttgacagtgatccaaacaaccacccttatgttgccaaattctttgaaagccctgccactaaggtaattctcagtaaagttattttggatctcactgcagtgcaatacattaatggacgttttcagttatgccttgcatttttactggacaagtattttagatttctgaagatggtagtttagtaatttagtatgtgcttgaaggttaaaagcttttctttgccggtggtagtgttaactatgacaaaagctgtgatatcataaagtagtgattgaatttgggtaatagcatcatagttctctagataattgtaaaagcatttgttctgtttctgaaatttcaggcgatgatgttcgttaacttcac

SEQ ID NO: 160872 - DNA, 258 bp, Arabidopsis thaliana landsberg
  unsure (1)..(258): unsure at all n locations
gttcgcatttaacaagcttatgatcaataatctcttcaccgtatgtgatatnnnnnnnnnnnnnnnnnnnnnnnnnnnnnnnnnnnnnnnnnccctaaacaacagaacaccttccggaataagcaaagccgaaagcgagaacaaagaaactaggaactagtttcacgatttcgacttaccacacgaaccatgggagcaagaacaagcttgttctgataatccatcttcgtcttctttttcttcgtggcaccgtcaaac

SEQ ID NO: 160873 - DNA, 1861 bp, Arabidopsis thaliana landsberg
ctttttgcaatttcgtgtctttgtgtctcttgtcactgatcgtctcggaggagaagaagtgtggaggttgaagaagggagaaaatgagcggtcatgattctaaatatttttcgactacgaagaagggagagatccctgagctcaaggaagagctgaattcacagtacaaggttcttcttctccgtctaatttcatatatggatctgtgatccgccattttcacgattctaatctcatctctttctcgttcgttgaattatgcataatcattttctggtagatctgtatgattatggattcgaattgatcggttaattttgttgatattttagtttgaaagattgatgatggtgtacgttataatgttatgtgttcaatggttcatttgaaactatgtagaaatggaatgaaattcagaataatggttaatgcggggatgtgtttagattgggggatcataagttttgaatatggatcaatgcattggttggacgatagaaacagttcttctttgagtagatggtccaatggttgtatatggtactgattgaagatgatggaatgcgtttttgcttcagtttcctaaattctctttttttctttatgttcctaggataagaggaaagatgctgttaagaaggttattgcggcaatgactgttggaaaggatgtttcatcacttttcactgatgtagtcaattgcatgcaaactgagaatctggagttgaagaagcttgtttacttgtatctgataaactatgcaaaaagccagccagatcttgctatcctcgctgtaaatacttttgttaaggtaacacttcagctactttgcttatatagcctacccaaacataaagacctaacatatggcaagtttcttggtctttctctgattttggtggatggaaaattatttaagaaactcatcgttattaagttctcgctttgtatttggcaggattcacaagacccaaatccattgatccgggctttggctgtgcgaacgatgggctgtattcgtgttgataagattacagaatatttgtgtgatcctcttcagaaatgcctaaaggttgagtttttaatgctaccttgtcactgcaccttgtagcaaatatttatgtccctcaagaatttttttattctttgactgatgacatatttctgtattttctggcatgttgcaatttttttatttttcaggatgatgatccatatgtccgcaagacagcagctatttgtgttgctaaactgtttgacataaatgctgaattagttgaggatagggggttcctggaagccttaaaggatttaatatcagacaataatccaatggttgtggcaaatgctgtagctgcccttgcagagatccaagagaatagtactagtcccatatttgaaatcaatagtaccatcctcacaaagctccttacagctttgaatgaatgtactgagtaagtcgttcctgatttccatctcttactttcactcagattgtgtatgattgactaattttagtcagatcatattaggttttgttttcggagaacagacaggctggcctaaatattcacagtaggataatctgttgagttgcggacttgcttcttgtgttaaagcatcagtttatctatgcattttgttctgtatctaacctaaaattgtgacagaactttgttgttattgaagttgaaggttttctgtgtagataaaggactcatggttttgaacattggggaaagggatccataaagcgactattgtttccttttgctgtatacatatttatagctctcaatttttaatactgctcgtgttctttacagatggggtcaagtttttatattagacgctttgcgag

SEQ ID NO: 160874 - DNA, 454 bp, Arabidopsis thaliana landsberg
aatggatgatccagagaacatcccagttcctctatactgggcgactataaagagcaaaggacacggacgattcctgcagcaggtctgtacagacccgccatctcctcaatgcttctatgagaaccgggcagctacattgaaacccttgaggaccaggcctgcggtatgtaatcaacactttccttttccctgctaagaacagacacatacaagctttagagtccggctcttctagtctagtcaataccaattagagaaagaagaagatccacctatcctgccaaatttgggtggttttgtacacaggaagtgttgtagagaaagggagatgaagctgaagaagaaaagaacagacagagtggagaaagcaaacaaccaacaaaggagtaagccgttctctggttcttaaagccttgccctttagccagctaggaagccttctccaaatactttg

SEQ ID NO: 160875 - DNA, 741 bp, Arabidopsis thaliana landsberg
  unsure (1)..(741): unsure at all n locations
ccactaaagaaccgttgtgccgtttttgctttgggtgagaggatacaaattataaaggtattcatcatttatccagtgattatattttttcagaccattgagcatgatttggcgaattcgttagttccacgttcacttgatattttcctgtatttcttatcgttgactcggaggtattatatcgcaagagtttgttaaaagacttaagtttcactatgtatgatgtaggaaattgatcaacctgctttgatcccgcacatagcagaagccagctctctcaagtatccttatgaagtgctcttcaggagcttgcannnnnnnnnnnnnnnnnnnnnnnnttctgagttctgttgatctttcctcttttctatttgcgttattgtttctcaccacccacccccttgttaacgtcatttgttttcatttgacaggtatatcttttgtgaagatttctttggtgaacagtctatattttatgaaatatttgcgggtaagttttaatctttcctcctttttctataccaaactttgtagtcagaatagttgttacaaatttttatatggtacttgagtagtgtgtaagaaatattgtcttacgcaattttttcttggataaattctgaattctccatgacacaggcccattctctgttatctatgagcacttggattccgtcctctcaagctgatatgatgctatcggtttgctgcttataaaacgcattatacaccaccaccagg

SEQ ID NO: 160876 - DNA, 241 bp, Arabidopsis thaliana landsberg
accgaggcaaaacactaatcaacctttaaaagcctcaaggtacttcgagcttttacaacctcatatatttctttctttatgttctctttctagctaaaccggatttctgatgtggaggatccatgaatatggcaaccgcagagcatactttccataatagcatatagtagataacaactctacgatgtattacgacttaagaagataagagccaaagtttagattgccatggatcgaattc

SEQ ID NO: 160877 - DNA, 646 bp, Arabidopsis thaliana landsberg
atgcaaaagattttgttcagggaggtgaacgaaggccaacctctcgtggacattcttgagctatatcggattcacagacaacttctttttcagtcatacatgtgggatcaccgcttaattaatgcatctactttacataagcttgagaatagtgatgacacaaagagagaagagaacgagaaacctcccttggctaagagccagacgctcccggagatgaatgctgggaccaactctcttcttactggctctgaggttaatctgaatcctgatggtgattctactggtgacactggctccttaaataatgttcagaaagaagcggatacgaattcagatttgtatcaggaaaaggatgatgggggagaagtttctcccagcaagaccttaccagatacatcttatcctctggaaaataaagtcgatgttcgtagaacacagtctgatggccagatagttatgaaaaatctatcagccactcttgatgcagcatggataggtgaacgtcaaacatctgtggagattccaaccaacaataaggtctcgcttcctccttccaccatgtcaccctcttcaacttttcctccaatctcagaggggaaaatgaaaatagatctcccagaacagcaaaatgagttcaaggtgg

SEQ ID NO: 160878 - DNA, 552 bp, Arabidopsis thaliana landsberg
gatgggcatcgtatctttgcttcactaaagtaagtcacttatgctacctagtatgataattcacacactttatgttgttgttaatccattttttttcttttagaccaatcggaattatagaacatatgctcttagttccagcatatggagcaattattggaggatggtttggagcttggcctatgccacttgactgggaaagaccatggcaggtaatgtttatttcttctcaacatacagtcaagggcttgtttctgaactttattgctcccttttttcgcagttattgcaagaatgaactaatccttatattatttttcccgacaggaatggcctatatgtgtgtgttatggagctataggaggctacattggtggacaaatggtgagtttgttgacttttctcagcgaacacaagaatttgaagctagcctagaatagattgatcgtctctggatcggcagaatgagtgtcattttgttttgacttgattgctagatggagagacaacaataggcaaagggttttgttagcttgacaaatttgttatatt

SEQ ID NO: 160879 - DNA, 371 bp, Arabidopsis thaliana landsberg
cctacctttatctggaaagattccttcctaaccaaacctccggcgacttctctcttttcctcaacggattgatgcaaaatcacgcttccacctgataactacatcgctacttattctaacaaagtaacgggtcggatctctcagggtaagatcgcggagctccaagggattcgggttcgggcgtttttcaagtcgtggtctattactgggattcgatcttctggagataatcttgtctttgaggttgctgggataactgctaaatacccttcgaagaatttcgatgagagtcttgattgtgaagggaaacgatcttcttcttgatttcaatttgaataaaaggctagaactttgggatctttagggttcta

SEQ ID NO: 160880 - DNA, 647 bp, Arabidopsis thaliana landsberg
atgaacaatgtgacaataatcgatgaaaaggttttgaatgatttcttaaacgagattactcgcgctttgctccagtccgatgtttcttttggccttgtggaaaagatgcagaccaatattaagaagatcgttaacctcgacgatctagcagctggccacaacaaacgcctgatcatcgagcaggtttagttttaccgcagattcattcctaatcaatttccaaaacagaggggttaattctgtataattgatcatgattctctttcaggctatcttcaaggaactctgtaggatgctggatccaggaaagcctgcctttgcccccaaaaaggccaaacctagtgtagtgatgttcgtcggtttacaaggtcaggtttctgtaagatgctatactgttttttgcacagtgtttgattgagtttggtgagtagatagatcacatttgagtttttgactatgtttaggtgctggaaaaaccacaacatgtaccaagtatgcttactatcatcagaagaaagggtacaaagcagctctagtgtgtgcggatactttcagggccggtgcttttgatcagctgaaacagaatgccaccaaggctaagatccccttttatggaaggtactcaaatcaacccctttgcatgctgt

SEQ ID NO: 160881 - DNA, 450 bp, Arabidopsis thaliana landsberg
caataatgctaaaaaaaactctgataaaaaaaataaataatgctaaagaaaactgctccaaactctccaaaacgtcgccgttgttcatccttcgccgccgttgatcttgtcggtgagttttaaaaattctctacatttttctcatttggtgaagaaaaacaaaaaaaaactcttcttttggattctctcttttaccttttgcggttttttctaaggtttatgtttccgaattgaattttcagttcaaatttttgtctctgttacattcttcacaaaaaaatctcttcttttggattcttctctcaatttacttttgctattttcttctaggatttatgtttgagagttcaggttttgtctctgttacattcacgttataggttcacttgtatcgttttcagcttcacaaacaaaactttagtaaggtgtttgatttacggagaaatccaa

SEQ ID NO: 160882 - DNA, 544 bp, Arabidopsis thaliana landsberg
cctgaggctttgtgaaggtatgttggtgttatggatgagattgctcagaaacattttgagacggaatgggcctatcaagatcaacttattgtcttccctctcaccaaaaagtatgtaacgtgcatctactcttcttttatatgttgcttgcctttgtttatgcgttgaaatgtttatgtaatttgtttttgtttcaaccaggttcacgttttctatagcatgccgtttgttcctgagcatggacgacctcgaaagagtaagaaaactcgaagagccattcactacggttatgacgggtgtcttctcaatcccaatagatttaccgggaacacggtttaaccgtgccatcaaggcgtcaaggttactcagcaaagaggtttcaacgatcattaggcagagaaaagaagagctgaaggccgggaaagtatcagtggaacaggacatcctatctcatatgttgatgaatattggagagaccaaagacgaggatttggctgataagattattgccttgttaatcggaggacatgacacaactagtatc

SEQ ID NO: 160883 - DNA, 2505 bp, Arabidopsis thaliana landsberg
attagtagactgaagttggagctagagaggcttcacgaggagaatcacaaactgaagcatttattagatgaggtcagtgagagttacaacgacctccaaagaagagttttgttagcaagacaaacacaagtggaaggtcttcatcataaacaacatgaggtacttgataaaatcataaaaatgataataaaatatatatcaacatttcggtttattaaaaaataaattgtatatttgtcttttttatgtggcaccgagattagcttaggttttagtgtttgatttatctggttttgaaaatttaaagtgatctattagttttgtttttctcgaaagcaattaaaattttaaaactatgtgtaatatgcgtaaataatggatgtagtttagttatgtaatgaattcataattttcatcttaaatgcccagattgaaagtcataagacgaataaatacgtgcagcttttatttgataaaatatgaagaagatgaaataaatagctagccaatgacttggtcaagaaaaaaatgtttcataacttaatattaaatggaaaatcaaatttcggactaagatatttcaaactagaaaaaaccttttgttttcagaagctacaaacgataagttatttgtttatagttaggtatgttcctgtatatgcatcatattttgtttgtccacaatctgtagatgcatcatatatgagtctttgccttagaattttaatagtttaatacgtccatatgtgaatgcatatgtggtaggttatcaaatgtctattattatgtgtgtgtttatatttattatcttgtctttgcgtctatcggtactatatatattatgaggttacttgatcaaattaattacagatactagggtatgattttgggtaaatttcaacgtctttttctttcaattttcttataaaactgacacatctttcttgcaaatttttgtttggcaaaaaggatgtacctcaagctggttcctcacaagctctagagaacagaagaccaaaggatatgaaccatgaaactccggccaccaccttgaaacgacggtctccagacgacgtgtatggtcgtgatatgcaccgaggatcaccaaaaactcctcgaatagaccaaaacaagagtactaatcatgaagaacaacaaaaccctcatgatcaattaccctatagaaaagctagggtttccgttagagctagatctgatgccactacggtaactttctataagttactaatttttttgattcgtttaaccttacatatatatatgagttatgaaaattgaatcaatattaatatataatataggtaaatgacggatgtcaatggagaaaatacggtcagaaaatggcgaaagggaatccatgtcctcgcgcttattatcgttgcaccatggccgttggatgtcctgtccgtaaacaggttagtataactatatatatgagaaaatgttatcataattatagaaaaaaaaaatttggtgttagaattttgtattgattaacgtatatagtattggttcttttcgtcaacatgtagctttgaatataaaaattgacataataacaacactaatataaccgattatattacgtatcctttagaagtattgatttagagcaataccataaaaccttattaaagtccttcatacaacagatttagaaagttttaagaagagtatagaaaataattctaaatttagaaaggctttactaaatccctttctaacaaaatcttttacttatgaaaaaccaaaactagaatgcgacatatttattcttaaagaaaactttattgttttacgtaacaaaatgatttaaaatgtttatttgaatgtaaataggtccaacgatgcgcggaggatacaactatcttgacaacaacgtacgaaggaaaccataaccatcctcttcccccgtcagccacagccatggctgcaaccacctccgccgcagcagccatgctcttatcaggctcctcctccagcaacctccaccaaacactctctagcccctccgccacgtcatcatcatccttctaccataacttcccatacacctccacaatcgcaacactctctgcctcagctcctttccccaccataaccttagacctcaccaacccacctcgaccgctacaaccgccaccgcagtttctaagccagtatggtcccgccgcgtttttaccaaacgctaatcaaattaggtctatgaataataataaccagcagttattaatacctaatttgtttggcccacaagccccaccacgtgaaatggtcgattcagttagggctgcgattgcgatggatccgaacttcacggcggcacttgcggccgcgatctcaaacattatcggaggaggtaataacgacaacaataataatactgatattaatgataacaaggttgatgcaaaaagtggagggagtagtaacggagattcgccacagcttcctcagtcttgcaccactttctctacaaactaa

SEQ ID NO: 160884 - DNA, 657 bp, Arabidopsis thaliana landsberg
gtatgtgaaagaaataagatcactcttgtgaacgaccacgatttaaatgccatggagctagagtaagttattttacttttatacattcaatccccaaaaaatatatttggatatggtttgttcgaatatataggcttaaacatctctaaatttcttgcttttgttttctatatataggctgcaagatcagaagcctctatgtaactgtagcaacactgaagctaatactactaccaagagcttacctgatgatcataaaagctgcaaaaccggtttttcggggcttgaaaccgtcaagctattgcttcgacttttacctatatggacgatgcttcttatgtttgcagttatattccaacaacccgcgacctttttcacaaagcaaggtatgactatgaagagaaacatcggaccaaacttcaagatcccaccagcaacactacaaagcactatcactttatccataatccttcttatgcccttctacgacaaaatcttgataccgatcgccaaaaaactaacgaaaaacgaaaagggtatttctgtgaaggaaagaatggggattgggatgttcctgtccatcatcgccattgttattgccgcgttagtcgaaagaaaaagactaaagataagcaaaatgatgaagactacacctag

SEQ ID NO: 160885 - DNA, 919 bp, Arabidopsis thaliana landsberg
tatgcttcacggctgctttgatttcgagcgcaagtggtattggcgatggatttttcttcattccaattatgaatttagtcgcagggatagacttgaaagcagcttcaagcttctctgcttttatggtaaccggtggatctatagcgaatctaatcaacaatcactttggctgtaaaaaattgattgattacgacttaagccttgcttcttgagccttgtatgcttctaggagtaagtgttggtgttatctgcaacaaagtttttcctgagtggctcatcactggtcttttcgtggtgttcctcatgtggtcttccatggagacttgtgaaaatggacatacttcttggaaattgagtctgatattgcgcgagaaagaggacatgagagactcgagactggccgaggtgaaacggaggaggacaataatattcttcaagcacctttacttgaagatcaagaaaacagaaacaaagcaaagcttccttggaagaaacttggtgtcttagctattttttgggcgtctttctttgtcatttatcttctccgtgggaataaagatggcaaggtataatgatatataactccaaagttcgatagattttatacaaagtcgactgattctgtttatgttatgtgcagggaatcatatcgataaagccttgcagtgtggagtattggattctactgtcacttcagatacctcttgccttagttttcacaattttggctctctctagaaccgaaagtctccaagaacaatccataagcaatcaagaaggtacaagactggaccaccagttcaagcggttaatgttcccagtgatgtcatttttagccggcttattaggcggtatattcggtattggaggtggaatgattataagccctcttcttcttcgagctgggataccaccacag

SEQ ID NO: 160886 - DNA, 952 bp, Arabidopsis thaliana landsberg
atgaaccggactacattctgggtcaccgggtcatcgggtcaaccgggttggaccacgggttaattagttaaaatctatttaataagtttaatattaatagaaattttagagtattttatataaaaaaaatttagtatttataaatataaaacaaaaataatcatatcatatttaatcaaatataaaattatattatgtttaataaaatagaaaattatttatacccaaatatatagaaaaaatcaaacaataataataaagtggttaaaaatttgaaatccaactaaatgtctaacaccgtaacaaatatattaagagatcatcaatgacagaaataaattaataaaacatcgtgaattcaaacaactaatctcgattgtctctctcaccattcgattcaattttaaggcggtattgtaaagtcttcaccaaaatctaaaacatcaaatgaatttaagaactgaaaaaaacttttaaaaataattgaataaagtctaaaatcccttattttattgtaaaatcaagagaactttttaaaactcacactcggccggttcaaccggttcaccgggtcacgggttaattgcgagtttttgtgggttttttcggttttgaacttgttgggttttagcactaaacccaaaccggaaacgtgttcgggtcacgggttaaccggtcggaccggacggttcgggtcgggcgtgaaaacactggtctaaatagtaaccgaaaaatctggctgagtcaggctgaattgctgactaactgaattttagtgattttcagatggatctagctgaacttttacatttccaaaccgccggaatcaaactgaactttcttttttgtgatttttggtcaaatctgtcaaaatagttaagaaatttaattcaaaaataacgtcaaataattatgaatgttaataatataaaatacatcaaaattatctaat

SEQ ID NO: 160887 - DNA, 1275 bp, Arabidopsis thaliana landsberg
atggcgaaagaagaagtgaattgcatacgcggccattatcctgatggaaagaaggactgtaactgcttgcctcttatagcaccaacaatggacatatatgaaaccaatgagtcttgccgcacgaattccgaatgcatcaagtactgtcctaagggctgcaagattgttgactgtaattttggaacctgtttgtgtgagtactgttaaagaaattagaaaccatcataacttataagacatagaaaatattctccttgtagaaaatatctctgcatcactctattcaactggaattgggtcaacttgagacacataccagttttggctttcgttaaaggaaatatatcttcaattctaaaatgtctttggattctcttggcaatagcattgaatcttgtatttatctcaaacaatgcatgtatgtggtttattaattccctctatagatacaaattcaacaaactatcaaatgatttcctaaaatggagaaatttcacaagttggattaaaacaatgtgtaatcaaacttggtatataaaagaagacaatctgacttctctcttcctaacttgtacattcaaaataaacaagaaaagacttttgagattacattaacgaagcaatggagaaaacgtctctcaagcttatcttcttgttctccctccaagtcatagcattttgtaagcttcttctacatgataagttcttctttgttatataatgttttgttttggtcttgtttgacgtttatggtgtgtatttgttgatataggttcatctttaggtgatgctagagagatggtgaaagcagaagtgaattgcatcggcggcaaatgtcctgaaggaaagaagaactgtaattgcatgccaccgatagcacatgtgatggatgatatcaggccttgcaatacagatggtgactgctacaagttctgtcctagggaatgcgagcttggaacttgttactgtcggtgtgattatggttgtacatgtacctgttgactgttaaactagtatttgaatcaattaattattattcttgaaaacatatctctgaagaagctagtattcaatacaattgaaatttgaaacaattcagtactaaaggcctgaaacaggtccaatcatatgatcataaccatgtcttcaagttccaaatctgttttacatttcttttagtgctaacaagagcttctgagaaagctctgtctctgtagaactgttgtgaactcttgttaagaattttctgagggcgagaatcacgcgaagagggct

SEQ ID NO: 160888 - DNA, 3121 bp, Arabidopsis thaliana landsberg
  unsure (1)..(3121): unsure at all n locations
atggagtctcgtcggaaccctcgcgccgtagtagatccaaaggtccgacaagtcggtttcttcacatcatctcaacccgattcatcaactcaacaacaacaacccgacccgatcgctgctacctctgcttcttcttcttcttccaccatttctccttccggtaactcactctcccccgtcatgattcctcctcctcgtctcaattcctctgatactttccctcttcgagtcgctgtcgctggtgctgctgcgtcagccgtgtctccttcttcgttttcttactcaagtcgccgtgatttccctgatggatcaacgacggcgtctcctggacgccattccaggggtagtttcnnnnnnnnnnnnnnnnnnnnnnnnnnntcgctgcctggtattgggatggattctatggctgctgctaaatctagtagtgttcctgctagtggtttaaccactgtctccgtcgttaccatgcctcctggactttctggtactctcactttgatcttgtggaataataatttgatagattttgaaatcggttctttaggatattgaatgctaatggaatcacaatgttgttcttatgatttaattgcagagaaggctagtggaatggaggttcagagtgaccagaagaagccattgaaagagaaaaccactaaagctgagagacgagctattcaagaagctcaaagagctgctaaagctgctgcaaaaggtgcatttttgatttataccaatgtgtggtgttatcgcaatgaatgattcgtcagcttagtacagagatttgatatagctggttgctctgttctgttatcgttgtgtcttttgcaatatcttgatcaatctgtgtaatactgtgctatatcagctgatggtgggaaggtggcaccagtgtccgcagcttcagtggcttcaacaagtgttaaagctgctaaaccagcgaaggctacatctcagaagaatgatgttgctgttgctgctggagcagctgagaagaagggaggtccatctgaaaaagatagaaagaaagatgctcctcatccccgcatgcagtatgatgatgagagtagagtcgtgaaggctaaaagacgtgctgttgtgaaacagaccgaggctaaaaacagggttgagctatttaggcatttgcctcagtatgagcatggcactcaacttcctgatctcgagactaagttcttccaacttgaccctatgcatcctgctgtgtacaaggtaatttgttttcctcttgaattcattttgttgttaataatctaatatagcattaataatctctttgttaagacaaggaaccgtttgttctaatgagtggtttctattacttcattaagatgaatgttacttgtgtactgaatgagtatcagctgttgttgttatcaggttggtcttcaatatctttctggggatatctctggtggcaatgccaggtgtattgcgatgctccaagcattccaagaggttgttaaagattatttgacaccgcctgagaaatctcttaacagggacatgactgcgaaaataagtagctacgtctccttcctcatagaatgccgtccgctttcgattagcatgggaaacgcaatccgatttgtgaaaaacaggattgcaaagctgcctataacactttctgaatctgaagcaaaagctactcttcagtcagatattgaccggttcattaacgagaagatcatagtggcagatacggtgatagtcaaacatgctgttactaaaataagagacggtgatgtccttctgacctacggatctcccactgctgttgagatggtattattacatgcacatgaactcaggaaaaagtttcgagtcttggtggtggattctcgtccaaagcttgaagggcagctactgcttcgtagattgatcaaacgaggcattaactgtacatacactcatataaatgccatttcatatatcatgcacgaagtcaccaaagtgtttttgggcgcctcgtcagttttgtctaacggaacagtttattcaagggttgggactgcttgtgttgcaatggttgcaaatgcattccgtgttcctgtgcttgtatgttgcgaagcctacaagttccatgagagggtgcaattggattcaatatgctccaatgagcttggtatgcaatatcttctctcgatatcagtatcttataccgcctttgattttgttttaccttacattgggtttcttgcttgtttacctttaggtgatccaaatgctatttcaaaagttcatggaagagaagacataaactacttagatggcttgaccaacaacgcaaacctgcagtttttgaacttgatgtaagcttgtgtttatcggagaagagaaactatgttctgttaatgctattcctctctgccactaaactcgtttgtgatttttctaatgacaggtatgatgctacaccttcagattacatttccatgataatcacagattatgggatggtaagattaatcatcgtctcttaaaaacatagcattagggtcctcaagtctcatacctatacaatacagtttctccacttattcagaatctcaaaccattgaacgcaatgttctcgttttcaggtgcctccgacaagtgtgcctgtcatcgtgagagaatatcagaaagaacacttgctttaaagctcaaagattgttatttagatgctcaaaatagaagtaagaataaaaatgaaatgatatggaggagtaggacccaagattataaggcatggatgctgtactgttgattgttacatctaattctcattccttattccaattctgtgggcttctttcactattttccctatagaataccattctcgttttttgtttcaattttcaaaaaccactataaggaactttttcaatagttggttgtttgtttagaccaaggaagatgtcaaattgatttcttcacttttttgattaatgttttggggtaattaattagtcaaagaagacatttgtgctgaatgtttttttttgctgaatgttttttttttatcgcggggattgattcaatgcatcatattgttccaaccttttgactctttctcttgtttccttttcttttctttttagacccttttctctag

SEQ ID NO: 160889 - DNA, 576 bp, Arabidopsis thaliana landsberg
gaaaaaaacaaatatttagaaacaaaaaatgctataattcttcctttttcttgttctttcagagattttgatttctattcaatcgactaagagggtgtgtttttaatccctctctgttttaattttgtttcctagtctttaaagatccatggcagccatagatatgttcaatagcaacacagatccttttcaggaagagctcatgaaagcacttcaaccttataccaccaacattgattcttcttctcctacgtattcaaacacagtcttcggtttcaatcaaaccacatctctcggtctaaaccagctcacaccttaccaaatccaccaaatccaaaaccagcttaaccagagacgtaacataatctctccaaatctagccccaaagccagtcccaatgaagaacatgaccgctcagaaactctatagaggagttagacaaaggcactggggaaaatgggtagctgagatccgtttacccaagaaccggacccgactctggcttggaactttcgacacagctgaagaagcagccatggcttatgacctagctgcttacaagctaagaggcgagtt

SEQ ID NO: 160890 - DNA, 516 bp, Arabidopsis thaliana landsberg
tccacaaacaatgattccgattcgacgaacaaaatacaaaaatttaagtctaaatacaaataaaagacacacacatgaaccgacgtattcatcctccaccaccgctgcatataccggttaaagaaaccggaaatctacaaagggacgtggctaccggcgttccttctccggtaaccacttcagctgaagccggaggaagaacccttccgtcagcgaacaatgcccgctcccccatcaccggctgctgatcttggtaccgtgccaccaccgcatcctctagctctgcctcggcggagttgtaaacggcttcatctccaaacctccgttccacctctagatactccccgagcgatgaccgctttgaatctcctgttccacggtggattccatttccggcggcgtcgtcatcgtcatctcggcaaaaccgccaccatttacggcggcgatgcggctcaggctcagaaaaatttaaaagaggacgctttctctggtggttgcgtcttgcatgggagttag

SEQ ID NO: 160891 - DNA, 6865 bp, Arabidopsis thaliana landsberg
aaaatgttcaattcgatgaagatactaccactggaggctcctcctgctgacgggaatttaggtccacttcctccgtcgcaattaacggatgaagaaatcaaagagaatgagtttcaaggagagcaaaacaattcaattcaaactcccatagctgtggctactcatacgaatccaatcggaatcatttatccacctccagagatccgaaaaatcgtcgagacaacggctcaatttgtttcgcaaaacggtttggcgtttggaaacaaagttaaaacagagaaagccaataatgctaatttcagctttttgaaaagtgataatccttatcatggcttttaccggtacaaggtcactgagtatagttgtcatattcgtgacggagctcaaggtactgatgtagatgatacagaagatcccaaacttgatgatgagtctgatgcaaaacctgaccttcaggctcaatttagggctcctcgtaagattttagaagcacctgaacctgagaagtatactgttagacttcctgaagggatcatggaggctgagcttgatattattaagcacacggcgcagtttgtggcgcggaatggtcaatcgtttttaagggaattgatgcgtagagaggtgaataattctcagtttcagtttatgaagccaacacatagtatgttcacttttttcacttctttggttgatgcgtattctgaagtattgatgcctcccagagatttgaaagaaaagctgagaaagagtgttgctgatttgacgactgttctcgagcgttgtttgaatcggcttgagtgggatcgtttccaggaggaggagaagaacaaagaagaggatgagaaagagaaggagagagtgcagatggttatgattgattggaaagattttgcagttgttgagtctatagattttgcagacgaggaggataaagatttgccaatgcctatgacacttgaggaggttattaggaggagcaaagtttcagccatggaagaagatgaaattgttgagcctggaaaggaagttgagatggatatggatgaagaagaagttaagcttgttgcagaaggaatgagagcagcgaacctggaagagtatgttggctctgtggagattgaagaagaagcaccaatgagaattgttaagaactggaagaggcctgaagataggtttctgacagagagagattcgagtaaagttgttatatcacggattactggtgagctgattcccattaccgagatgtctgagcacatgaggatttctcttattgatcctaagtttaaagaacagaaggatcggatgtttgctaagattcgtgagacaactctcgcacaagatgatgagattgctaaaaacattgtcgggttggcccgcctccgtcctgatatctttggaacaacagaagaagaagtttcaaatgctgtaaaagcagatattgagaaaaaagatgagcaaccgaaacaagtaatatgggatggtcacactggaagtattggtcgcacagcaaaccaagccttgactcacaactccaatggagagcaaggcgatggcgtttatggtgatcccaatagcttccctggtccagctgcttttcctcctcctcgaccaggtgtcccaactgtccggccactgccaccacctcaaaatctcgccttgaaccttcctcgtcctcctccttctgttcagtaccctggtgcaccaaggccattaggtgttccaatgatgcagcccatgtatcaacaacaccagctctctatgtctgggccacatggacatccttcaatgatgatgagtcgaccaccacaaatgcaacctgttatgcgtgtgccgcctccaccgggatctcagttttctcatatgcaagttcctcaaccttatggtcagcttccaccgctttcgatggggatgatgcaaccaccacctatggctgagatgcctcctcctccaccacccggggaggcaccaccgcctcttcctgaggagccagagccaaaaagacagaagctcgatgagtcagcccttgttccagaagaccagtttcttgctcagcatccggtaatattttcttcgactcttgattcattttcttatcttttatctttcttctttcgtttgagttgtatcttacctgttttacacattttcagggtccggctacaatcagggtttctaagccaaacgagaatgatggacaagtcatggagatcacagtgcagtcgttatccgaaaacgtgggaagtttgaaggagaaaatagctggggaaatgcaaattccagcaaacaaacagaagtaagtggaaaatctggattcttaaaggacaacatgtcgcttgctcattacaatgtgggagcaggagaaatccttacactgtctttgagagaacgtggtgggagaaagagatagagacaactggtggattcagggaaatgccttttaatctcttaattcaaattaggtgttccttaatagatgttttttattggtggccaaagctatatgtactgcctgctctttattctagctcattatatctctactgttactgacttaggtttgttttggatttgcagctagttttggggcaacgctttgctctgtaatcttaaaataacatattggatactttggtttatgcgttcttactactgttaagcatttttagtgaagctttgtttctcttctttgtaggtaccatacgaggatgctgccttgcttgttttctgcgggatcatcattgtcgaaggtacacacgcaattagaatagctaagatgttagttgaaacattgagaaccttgtaggctttaaaagataggttatcttttctggttgtagaaattgtttggttctacgctgatgctgccacctcctgagaccagaagtccttgtctcggctaagtttgtttccaaacacggttagagtagagtatgagaagaggattataaatattatcgtccatagtgctaaaattttaactttttgagatgctcagatcaagtttttgatagagttcctctaaaagatacggttagacttttgtgaagggatattatcaagcttacagtacagtcagtggcgcttaaatgggagatcgttcttcaagagattgatcacgagtagagagattaacaatcgttggttttactttttgaagcaaactcatagattgtttgcatttttcactgatttggttgatgcgtatacgaaattattaatgcctccccaatagtttgcagctgaattggaacagatttgaggaaccgtggttaagctttctgaattccttactcataataataacactgtgcataagctttttagattaggttgtccggttaaaaaacaacaaaattggtttaagttctctgttttgcattttcgtgctttttgttctttggccttttcccccttagcaaacctctttgttcttttaacaagaataatcgattgaccctggccttatcctgaaaatttagatggtttataatgtgacgcaacaaatcatctatatattcttaaatttgtgtttgttcacccaaggtttcaggtgatattccttccacaggttcatttgactttaactcatgaagtctctaggacttttttcgaaagtgtgatctcagaagagcaaatgagttttgcgattgagtcaacgaatagttaaaatgtttggaaattggaacactgttatgatgtagttcaatagcactcccagctttagagtaaaaaaacatgatcatgcgactttgcagagacagcggaaaaaaacagagaaaactttgtcatttaagtacctagttttgttgataaaaaaaaaaaagtacccagtccttccggatccaaaactttcaagcttgtattacagatcggatccaaaactttcaaacttctaccattattcctgtctaatcgaacgaaattccaagcccgttaaaggcccattaaccagctggatacgaagtttggttcataaatcctagggctcaatttaatctgtttcattaaagagagtatcttcttcttcattttccttctactgttagttctatcgactttcatcaaatcgtccgtcttgtaagcaagcttcacatctccaactggttcgtccgccggttcttctcgacgtcgcggcggaactgtttcttcccgactgaggtgcggtgtttctaatccctttctaaaaccctcagctggattcctttgccgtttcctcttttttttttcactgtcgatctctttctctcgcatcttagtttccggattttatccttgtccaatcggaataatcataggactttaacttttatcaaccgatttcagtagatttgatagtttatactttctacagctgagttttaaccaatgaattaggtctaaaagttatcatgaactttgatgtttctggttgcagaaaaatgttcagctcgatgcagatactgccactggaggctcctcctacggatgggaagttaggtccacttcctccgtcgcaattaacagatcaggaagtcgaagagagggagttgcaagcagagcaaaataattcaaatctagctcctccggcggctgttgctactcacacgaggactatcggaatcattcatccacctccagatatcagaactattgttgagaaaacggctcagtttgtctccaaaaacggtttggagtttgaaaagaggattattgttagtaatgaaaagaatgctaagttcaactttttgaagagctcagatccttatcatgccttttaccagcacaagctcactgaataccgtgctcagaataaagacggagctcagggtactgatgattcagatggtactacagatccccaacttgatactggagctgctgatgagtctgaagctggtgatacacaacccgaccttcaggctcaatttaggattccttctaagcctttggaagctccggaacctgagaagtatacagttagacttcctgaagggatcccgggtgaagagcttgatattattaagctcacagcacagtttgtggcacggaatgggaaatcgtttctaacgggattgtcgaatagagagaacaacaatcctcagtttcattttatgaagccaacacacagcatgttcactttttttacttctctggttgatgcgtattcggaagtattaatgcctcccaaagatttgaaagaaaagctgagaaagagtgctgctgatttgacgactgttcttgagcgttgtttgcatcgtttggaatgggatcgttcccaggagcagcagaagaagaaagaagaggatgagaaagagcttgagcgagtgcagatggctatgattgattggcatgattttgtggttgttgagtcgatagattttgcggacgaggaagatgaagagttgccaccgcctatgacacttgacgaggttataaggaggagcaaagcatcagccatggaagaagatgaaattgttgagcctggaaaggaggtcgaaatggaaatggacgaagaagaagttaagcttgttgcagaaggaatgagagcagcaaacctagaagagaatgttaagattgaaaatgtacatgatgaagaagcacctatgagaattgttaagaactggaagaggccagaagacaggatcccaacagagagagatccaactaaagttgttatatcaccaattactggagagctgattcccattaacgagatgtctgagcacatgaggatttctcttattgatcctaagttcaaagaacagaaggatcggatgtttgctaagattcgtgagaccactcttgcacaagatgatgagattgctaaaaacatagtcgggttggcccgcctgcgtcctgatatctttggaacaaccgaagaagaagtctcaaatgctgtaaaagcagagattgagaagaagaaagatgagcagcccaagcaagtgatatgggatggtcacacaggaagtattggtcgcacagcaaaccaagccttgagtcagaacgctaatggagaggagcaaggtgatggcgtttacggagatcccaatagcttccctggtccagctgctcttccacctcctcgaccaggtgtcccaatagtccgaccattgccaccacctcctaatctcgccttgaacctccctcgtcctcccccttctgctcagtaccccggtgcaccaaggccactaggtgttccgatgatgcagcccatgcatcaacaacaccagctcacaatgccagggccaccaggacacccgcagatgatgatgaaccgaccaccacagatgcagcctggtatgcatgtgccacctccaccgggatctcagtttgctcatcatatgcaaattcctagaccttatggtcagcttccaccatctgcaatggggatgatgcaaccaccacctatgcctgggatggctcctcctccaccacccgaggaggctccaccacctcttcctgaggaaccagaggcaaagagacaaaagttcgatgagtcagcccttgttccagaagaccagtttcttgctcagcatccggtaatgtgttcttcagtcttttgaatcattttcttagccattttctttcctctgagttgtatcttacctgttttgtacattttcagggtccggctacaatcagggtttctaagccaaacgagaatgatggacaatttatggagatcacagtgcagtcgttatctgaaaacgtgggaagtttgaaggagaaaatagctggggagattcaaatcccagcaaacaaacagaagttgagtggaaaagcagggttcttaaaggacaacatgtcgcttgcacattacaatgtcggagcaggagaaatcctaacattgtctttgagggaacgtggtgggagaaagaga

SEQ ID NO: 160892 - DNA, 1716 bp, Arabidopsis thaliana landsberg
gttttttgctctcatggagtatatctctttgctggggcaagtttactaatacaatgatgctttacaagtcctttctggagatttgggatctcttttgatgattgaagtcgataaactacggatacaggtaggttataagactttttggctggagagaacagaaaactttatgctttttgtgttatattctccgtagaccacagaaattgtgcattttccctagtttttggttgaacctatcgttatacatatatatattagtatgcggagtctgttgaggtatgcttacacaaactctctcactttaagctgacaggggagactccttgctagggcaaatgactattctgctgctgttgatgtctataaaaaaatcttagaattgaggcatgttttcaaggctgcttctcagatatcagagcctttagagttggatatgtttccagtatgatttctgataggtcattcgattgtttctatatctgaggcctgtgcatatcatatcagcatgctaacataaaatttctcttcaattggcagtccagatgattgggagtgtttcctacactatctcggctgtctgcttgaagatgacagcatctggaaatactttgacaatattgatcaaattcatccgacaaagcacatagaatgcaaattttctcaccttacggaagaaatggtgatcatattacccacttgccttgcttaatgtttcagtttgtgttttcctttgcttttttcttaatttgtggcttatatataatctattttctttcccaccatgcagtttgattctcgtatatcaagtgcctcagatttggtgcagaaattacagagggacgctgagaatagtaatttaaggggtccgtacttggcagaactggaaattgagaagagaaaattcttatttgggaagaagaacgaagacaagttactagaatcgttactgcagtattttcttaagtatgtcgctgtatgaaaccctttggagttgatctagttatttataagtaaagcctactggttcttatatccctctgagctcgttttgatttgcatgcacatttggtcatttagcttgctatgcttccgacgttgaggcatacctacaagtattatccccaaataaaaaggcaggatttgtggaaatgttagtgaaaaattctgattcttctgcgtcagcaaccaaagtgctcggtcaaacaacaacaattctcaaagtccaagaactgacgggaaacatttttgggcttcctacagacggtgtgttctcttagcttacatagtttttctgcaacttccttgttttctgcttatagttttttttatacaagccatgttactgtatggtgataagcctttttgaatgagttcttctgaatctaattccgattcaatttttttcttccaatgtctagaaattgaagcctctgctgtcaaactggcaaagttatactgccaaaatctttctctttctaaggacttggaccctcaagagagcatgtttggggaagaacttttatctttgattagcaacatgttggtccaggtgacttggctttgtttcaacagacttgcttcccttgtactggtttacccattgttgtatattaattaaccttactgttggttccagttattctggagaactcgagattttggctatcttgctgaagctataatggttcttgagctgggcttgaccatcagagg

SEQ ID NO: 160893 - DNA, 325 bp, Arabidopsis thaliana landsberg
gatgatcagttcatcaggagtgaggctggcacggttccacgtgggttaatctttcactattgtgactatgtggtggatgactccatgagcgtgttaaggacagtgttggtaatgaaacgaacacttgtggcgcctgagacattgaccgatggagagtgtgttcatcttcgctatctctggcaggtttgaagtgtttgtccttttcgagtagattatacaaattttagtaatctgattttgtagcgatgagattgatgttctgatcctttaattgtagagtgcggatcaagctcttccatttagaagcgcatgcaaagatgtcatc

SEQ ID NO: 160894 - DNA, 362 bp, Arabidopsis thaliana landsberg; identical to SEQ ID NO: 62213

SEQ ID NO: 160895 - DNA, 2325 bp, Arabidopsis thaliana landsberg
ctgaatcatactcatcatgtcgctttactttatctgaattttgtctattatcgattggatattcaatatctgcacggttctctcctttccattgcttatctgttgatggtatactgtatccaaagtcactttctttctggtcgttgcctatagaagaccgggattgtaatggcattcctttctcaaaacatccaatacctcctgctagcttaatttcttctgtatattcttctatcatatcatgtaagacctacaagacaaaagaaggagaaaactcactggaagaagaggatagtataagtttattgctctcaggagggccgacaaatcactcaaagagttcaatgagagaagattaacagaatcaaaaagtgaaaaggaacctccactatccaagcgatctcttgacttatctgatccagacatctgagctttatattctgatgatgtaagggcataagctatgatactagtaggttcgtcatcataaactggcagtactaagtcattacatcccagaggaagcagcagccttgcaccacttcgccattcaagctctctatatgaagaaacataaacaggccggtcttcagccatgatatgcttgcgagaattaagcgaataattcttgttgagtgaatagtagaaactaggagaaggcaactgaacttgtgttgtatgttcatcattggtagggcctcctttaaagttcagctcactttctgaacccaacagccttaaatcagggatctgagttccatttgttgaagcagctctgctaggcggacggaaaataccattctctgaagtagtttgttcacctatccatgctgcatcaagagtatcagataagtctgttgcttgaaactggctctcggtgtgtgctggtttaaccacctgcgaagactctacaaaattatctttaccaccttcactagggtcgaactccatcctacaatctgggggtctgtctgagcctacatcttcaggaatagcaaatttgccactagtatcagcaaatgatttaccttggttaagacacgtttcgtagtctgcatcctggagaagagagtcattactaattgcaacatgggtcggtatcgactttactttttcatcactgagcttctctaaggagacgttacgacccataacttttggggctgaattcttcggagcttccaaatagttatttcttaccatattggccgcccctgctaggcattcatcccaagcatatgaatcgaaaattatcagccttcgaagtttatttatcagaaggatatcaatagtaggttgtccatccttaaccacatttaacatttgctgcaatgaatcctgaaaaccagcgacagccttaatcggtattgcatacagagaaaactgaaaaatcatcctacagtgaagaaaggactctaggtacagaggctatgtaaaagactcgttcctataaaggccagcagattatgagacaagcttctacaattatttataagaaaaagttttgactctgtctatattttacacacatgattcgtgagaagtatgaacgtggtgggggtgtgtatgaatgtaggtatgtgtgaatgtgtgtgtagtgtgcaggtgggtgggttctgtctgcgtgagttagagtgagtgtgagtgatgtaatgcgccaaatgcaactctatttcttcttaattctaatggtgtgtaagttacatgacaggctaccttatattcctttttacgttgctcaagaagtcctgcaagttcttcaagagaaagcttgatcttgttgggagtgctgcccttggaacctgcgcccatagttttcgctgaaatttgactaagagcctcctgaacctcattaaaaaggacttccgcttttttaatcacctatagtatacagaccatgacaattaagtaaaataagactcatggctttgttaaatatgtataaatattcgattaaacatgtggagaacttgggaccttttctggttccttttggagcttttttccaacacaaatattgttaaggagtttcaggtaaaactgtatattatgcaaggaaccacattaggcttatgatgaagccacactgtgaagttagcagacaagcttgtacttaaagatgtgatttctgatctttctgctgtaagtcttgatgtgtggcttatgttgattataattatatacgtttgtcttgcatattctatgacttactaagtttttctttgagtttaggttgccaacagtgaacaaagggacgagataccatatgacaaatatcatgtaacgccatttcaacagttcatcagcagtgtcggctatatgcat

SEQ ID NO: 160896 - DNA, 523 bp, Arabidopsis thaliana landsberg
tttcctttttagggactaagtggttttttttgtgttcaaaaagattgggaaggtgtgaagaatctcatttcagcattgccatcatcggtgaagagagttgttttggtttcatcagtaggtgtgaccaagtctaatgagctaccctggaggtgagactagagtatctccgctaatttactttagtctgattgtctctacgtgtagtttatttgctgaatgtatgttttgtttgacagcatcatgaacctttttggagttcttaagtacaagaagatgggggaagattttcttcgtgactctggtcttccattcaccattatcaggtttcgaacaaaagagttacccactttttttgctcttaatactccaaaacgcaggcaacatatggtttactgatttactgtaatgtgatgttttcttaccagacctggtagattgactgatggaccatacacatcttatgatctgaatactttgctcaaagctacagctggtgaaaggcgtgcagttgttattggtcaag

SEQ ID NO: 160897 - DNA, 1815 bp, Arabidopsis thaliana landsberg
atggaagagctgaatgtgtcaaccaccattggcatggaaggtattccactaagctctagggaagcagctattgcaaggatgccttccatgattgagaaacaagctacagcagctgtcgacgaatcagctgttattattttcgttgtcgatggccaggttctgtgcttatcttctatctccttaacttttctgtctttgcctttcttcctgttaggcttttcgattcctgccataaaaacaaagtccaacaacaaaaaataatttggttgatgtgttattttcttagacttatactatgaataggtgggagttggttatcgacgaaatattcaatagatttcatgtttagtgaaagatattaccaaatactcaagaaagctgtgacttatatctggaacatatcaagttggttttgtgaattcttttactgtaaagtacaatggagtgtttcctggttatcatgccatgtcattgatatatggtattgattttggtactcgatatgcaggcagggccatcaggtgctgatgtggaaattgcagactggttgcggaagtactactcacataagtatatcattctcgcggtgaacaagtgtgaatcgccacgtaaaggactcatgcaggcttcggaatttggtctctagggtaaattgactttcatcttacttcagaatcatgtttgcgcacaaagtaggcatgttttggggaaatgtggtttaaggataataacgtgctgaaaataagagagcttctctttagaagatagcttttcatttagtgttttaactttctcacaaatatagaattcatggacgaacgtcatttggtgcttttatatgatttgaatatttgttactctcttattcaacacagtcttgtcctaatttatgaatctagttctgttattttgatgagtttatggacctggcgaaatttgtaagcatcagaatgactttttcccattatagtgtctattttgatgttcgcctttcttaaaaaatgcgagtgagtagtttatcctacaaatttatgagattttgctggaggttggtagctgtggtttagccggagagaaaatgttttacatgcaatgctaaacattttagttactttgcttctgtgcatttgttttgtgttttcattgatttcatggtggaatttccaggttcacacctatccctatctctgcattgtcgggaaactggacacaggagagctgcttgatcttgtttgttctggcctaattaaactcgaggtttgtaatggcctttctttctttcagaaacaaatttgtgcaggaatatgagatattggcaaatagtcctttatgaagagagttctgtatcgaagtattagtgtttctggaaaaaaaattcaaggtctgaatctacattatatacaccctcaaaatttcatctcttaattatcaaataccttaaggcatttttgaatatgttcaatgggcacccattgtttattcagctgcaataactggccatagcgttgacaagtgagcctccttcaaatgattcaaaaactattttcaaccttacagtccggttttacttagtctgtttgataatatataattcaaatgtagtattgtggttgctgctgctacggttcaaaaggagagatcaagaagacttagtacggctatattgaaccaagtgataagagaagcagttgcatttaaatcccctccaaggacccgtggaggcaagcgaggtcgcgtttactattgcacccaggtaataaaaacaactcccaatgttttctagtagcagtaaagggaaatgcattagaaggtttt

SEQ ID NO: 160898 - DNA, 1029 bp, Arabidopsis thaliana landsberg
cctacaattttggtatttggtccagacaaaagtagtccatatccttacgagggtgctagatctgcttcagcgatagaattttttgcttctgaacttgtggaatccagtgctggccctgttgaagtgactgaactaactggaccggtatttttcacatcctttgtttcgtctttaacattatttcttaaatactactagactcgaatccaagacattgacacttgttccattgtggttgtataggatgtcatggaaaagaagtgtggttctgctgctatttgctttatctctttcttacctgacattcttgactccaaagctgaaggaaggaataagtacctcgagatgttattatcagttgcagagaagtttaagaagcagccttacaggtatactaagaaagattataacctctgtgctgtggcattgtcttgttctcagttagtattaacggttacaatcagcagagagaggtttagggttctaatagaagtgttaggacttgctgtgagcacatatgtacaagcctcgttatttttcatgcacatctcatgatattatcatttcttaaggcataatgagaatcttatgtaaaaatttcatattgtctgcagttttatgtgggtggcggctgtaactcaaatggatttggagaagcgagttaatgtaggaggatacggttatccagcaatggtagccatgaatgtgaagaaaggagtatatgctcctcttaaaagcgcctttgagcttcaacacctcttgtaagtttggttcatctagggatcacaatggtttaggtgattttcgctcttataacacggtaatcattgttcgtgttatttcatcagagaatttgtgaaagatgctggaaccggtggaaaaggaaatgtgccaatgaatggaacaccagagatcgtgaagacaatggagtgggatggtaaagatggagagttgattgaggaagatgaattctcacttgatgagctcatgggaggtgatgatgctgttggttctaaggatgagttgtga

SEQ ID NO: 160899 - DNA, 1301 bp, Arabidopsis thaliana landsberg
gttgatgcatgagttacatatggcttccatattgtgtttctacagataaatcttttggcggctagaaatgaaagagaaagttttcagatagccatgcgtcctaaagtttcttgggctgcttccagcccttccgggattgttcaggttcagtgcagtgacttatgctcttctgctggagataggtgagctgttaaaccttgatcatgtttatcctcttctttggagaacatgtaaatgatatctttggtatcaaatgtaatattttcatattttgacatggttcctgtatcatggcagattggttgttggccagtcactaaagttgcggcgagtggtgcctgtcttaggcgttcctgatgctttggtgccccttgatttgcctgtttctcaacttagcttatttccagggtacgaccactcactagtccaatttcttaatctggtatgtggtgacattgctgtcttatttcctgagactgacatagccggaatgcttcctgttgtagagaaacaagtgtcatttgggtctcaatagacgttcctactgggcagcctcctggtcaatatgaaggagagatcattattactgctatgaaaactgatggagggtgagtctctctctgtataccatttctttgatctactttaggattcgtacaggtccacttatgccagtgtgaaactgattattttgttcatcatggatttgacatacttataaccaattatgtgtttggtaacagcggttcttctcacttggcaaagcatgagaaggatcagctctgtgtggaacttaatacctgtcttgatattatggaaccaatagagggaaaacccatggatgaagtggtaatatttactttccttgtactttattgcctcacctttgataaatattttacgcgtcaatgatctgcagcttatcttttaggtagaaagaattaaatgtgcaagttcgtcattaagaagaattctcttctctccatcattttcggagttcatttctacgaatggatcaactgatatgatggaagaagatgttgtttcaaacctttcactgcgtatcaagctaagattgacagtttgggaatttattattccagtgactccatcactccctgctgttattggtgtctctgacactgttattgaggatcgttttgctgttgaacatggaagtgaagattggtacaagaaattggatctccattttaaatggcttcttcagtatcggatcagtccgtacttttgcaaatggggtgaaagcatgcgtgtcttgacatacacctcaccatggcctg

SEQ ID NO: 160900 - DNA, 3237 bp, Arabidopsis thaliana landsberg
atgcatctgaagaattttactgttgcagaacggcggtacatcggaaaagaaaccgggggttatttaacttcttcctccgatttggatccgaaacctaagattaaacatcatcgtcctcttcaggtacctgagattctgactccagacattggtgctggtgctggattcagtgtgtataataatcaagttcaagctcagagtcgtcatcatctgacggttgaaatcccagattcatcgtctcacaatcttacatctaagagacctgtggtggttcaatcttctaatccgttcaacgttgacgatttccgaagacaacaacgcgcaagcttgggtccgatttcatcttattgtccgtcgtatcttttatcgtggttttcttcatctcttccatcgatcccatcggccactaatcagaagcttctccgtcatgttcttagagtccgtttgatatgtttccatcttcgtttcttacttcttctctctgttcctcctctctacatcttcttcttgttgattagtttcagattcttccttctctttgtcttctcgattatcgctttttctttcgtcctttcgatctctctcaaattcgctcttcctcacttaccatcgattcgtttgattatcgctcggttactttctctcaagcttacccctaccagatcatcctcttcatctcaggagaacactaaacatgttatttggtcaattgggtctaagcctgtgactgagaagaagaccaactctggctcatgggttcagaagtacagctctggtgatgtatacgagggagagtttcatagggggaagtgttcaggaagtggagtttattactattctatgaagggtaaatacgaaggggattggattgatgggaagtatgatggatatggagttgaaacttgggctaaagggagtaggtaccgaggtcaatacaggcaagggatgagacatggaactggtatctacagattttatacaggggatgtatatgctggtgagtggtctaatggacagagccatggctgtggtgtgtatacctctgaggatggtagtcgttttgttggagagtttaaatggggtgtcaaacatggccttggtcattatcatttcaggtgagaattcatcagttttaacttttgcagaaatggtttagcttttcagtgtatgggtgatcttttagtcccatgctattgacgttaagtgtgaccggtttgaaaaattgaagtatatgtggtttctggctttcagtctcgactttcttgttaagttatgatgctgtgtttaggtccatgtctatgttactcgtgggatgttcttaaagtttatggctttcagtcttgagttcttgatagattgttatactgcttaataccctctactggtagcgtccgtcaccctttgaagaggatatcaaatttttaagcctaattgttactggcattggtaattgcatgagactaccctttgaaagattctggatttcagttcaaattgcatatgaaccaatagttttttgttggctatcttccttacgtttcagacaattataagtctagggggaatcaaggttcaggcttatttgttggacttgagcatggatctaaaaaaaattgcatcaatcactgtcttctcttcttaagtgatatctatctgacttgaagccacatctctcttgtagaaatggtgatacatatgctggggagtattttgcagacaggatgcatggttttggagtgtatcaatttggaaacgggcatcggtatgaaggagcctggcatgaggggagaaggcaaggacttggtatgtacacgttcaggaatggtgagacacaggcaggccattgggaagacggagttcttaactgtcctaccgagcagaccactcgccctgattcatcgttttccatcagtcattccaaggttgtcgacactgtccaggtaccttataatttatcttactgctgctcatatatattaagttagagattagatctttaagaaattatcttactgctgccaatgattgagtacccacatgagatttgatcctgctccctctctctctttgatcaacagcaagcaaggaaagcagccaagaaagcacgcgaagttgtgaaagttgaagagagagtgaacagagcagtgatggtcgcaaaccgagcagcaaatgctgctagagttgctgctacaaaggctgtccaaacccaaacatttcattgtagtagtggtgacgatcccttgtgagttcctgcggcaaagattttgacataatcgcagtcatgaccttacctcgaacttctacgaagacagaagagtgaaagagagatgtttagagaacagcgtcagaattcgcaatctccgttgagattttcttgaaggtgaaccacttggaaccaatgtcgagatctcataagtaataagtaagagatctggctatggagcaagtattacaggtttactttttcttttctcccacttgttttatgagcaggctggtttaaaactgtacataggttgttgaagagtaagcaatgtgtgttaacaaaagatctttgtaacaagcgtaacccatgtaagagaagtaacaaaacattgttttacttttacaacgtgttgaaaataacaccttttttttactagatttctatggatagaaattagaaaatgacatgagaattccagattcaaatcaacttgacaaaaccaacaagggaaagagtaaagatatctggtctgtgacaaggtccaagtagagacgaatttcagatcatctaggtaactgtgcttatggttcttcaaaccctttcagcaaatcctagcagccagcctttgtgtttgattaaagtgggctgggctaaaatattggccgaggcccatcaagtgattctctcccgctcaagtcttttaatccttgaggagaaaatggactggaaaattcacggaactttaacagaaagatgcaaaaatcgttctcgttgatccaaacagtggcaatctccggcgtattctccgccgtctcatgctggtgagcgattgttcccgtctttcaagctcttcttcttcaattctcgtcttcttctctttccatgtctcatctttagggtttaagctgccttactcaatttccaggtatggattcatgttcggtagagaatcagcgagaaaagagctcggaggtttgatcgaagagctccgtcgtggaggctccaattctaattccactccccattcctga

SEQ ID NO: 160901 - DNA, 1340 bp, Arabidopsis thaliana landsberg
  unsure (1)..(1340): unsure at all n locations
atgcttttgaagtttgaagcttcttcagagttgagactagttgacccttcagtttctctcactgttcttcgaaagataagactgtcacatctcccggatatgacaatgaccagcgaatcttccggcaagaaatgcggagagggtgaccgcaaagtcgccggtaaaagccagcgaaaggtgggtcttgtttatgacgagaccatgtgcaaacacgacacacctaacggtaaggttgacgtagagtgtcccgatcgtatcagagttatctgggagaagcttcagctcgccggagtcactcaaaggttcatactttcctcttctcgtgcgcctttgttgtnnnnnnnnnnnnnnnnnnncctagaaaaggctgaaattttaggctaaatgggtgttttgatgattatctccgctgagaaaaaaaatctcgttttgtttttccttatttgacttgacgattgactttctcaatctgaattgtgtaattcatagattggaaagattctgctgattttatcctatataggtgtttcctagcttggttagctgtttctttatcctatataggtgtttcctagcttggttaactgtttcgttatcctatataggtgtttcataaattgttaacaatgttggtctttccttttttgcagatgtgtggttcttggtggtagtaaagctgaagataagcatctcaaattggttcacacaaagaaacatgttaatttagtgaagagtattagcacaaaaaagaaagattctcggagaaacaagattgcttcacagttggattcgatttatctgaatggaggttcatctgaagctgcatatcttgcagctggatctgttgtaaaggtaatattagattcatacaaattgtctctctcacacaggaggatagcaaactgttagaatgatttgtttgacgattagtaacaaaacaaattagcaacttggtaggtgacagagaaagttgcagaaggagagttagattgtggctttgctattgtcaggcccccaggacaccatgccgagtcagatgaagccatgggtttttgtttattcaacaatgttgccgttgctgctagttttttactaaacgaaagagtaatgacttcttttgacttttgtgatgcttttagtatctcttacttgctctcaaatttctttggtcacattcctttggtgcgtacgtttgttctcatgttatgcggcattaatcgaatgcagcctgatctagatgtcaagaaaattctgattgtcgattgggatatccatcacggaaatggtacacagaagatgttctggaaagattctcgcgtactaatattctctgttcatag

SEQ ID NO: 160902 - DNA, 3038 bp, Arabidopsis thaliana landsberg
atgagcaagggtaaagaaaaggtctatgatcgagagaaccaccgcagggataaggagaaagtgagagacctaaaaagaagtagagaagagaacactcagaaggagatctctagagatagcgaaaatgagaaggaaaaagacaaggataggtcaagagtgaagaagggagcgagtaagaaaagacgtgaagatgatgacgagactcataaggctgcagaaaaatatgaacattgtgaaaacaaaggttttaatgaaggtggcggtatgtttttgtttttagttctttcacccctaattttaactcttcaaaggaagtaatcacgtattctttcataccatagaatgcttttttcaatctgcctttctaatgtgatgtgttctgattaataatgtatgaattgctctaatgacgtaaagatattcttggaaggcatgtactcagcttcacttgataataatgcccagatctgtattctatctattgccatgccagactcagtgtgctagccacctgctggtttaaagaatattaagaacaattgctacctcaatgatgtattgcaatgtcttacatacacgaatctctttgttagtgggtgttcaaatcaacaatgagttaaacatgccgatgccgggttttgcgcgttatcttcagtgaagaagcatatcatgactgctcgtaaagccactggcaaaacgatatcaccaaatgatttggttaaaatatgcaaggtatgcttctcatatcttgtctgctttcccttttgttctctccaagtttgcctttttactaaatccgattaacgagggttttcttaattgcttaattaggcatattaccacatcacataaacgcagcagcacaagaagatgctcatgaattccttctttgtttgctaacaaggattgacgagtgtctcccctctgatgagatttccaagatctttcaaggcacccttagcaacttgtacacatgtatggactgtgaatctatgaaacaatctactgacacatttcgttgcataagcctagatatattgaagacagattcattgaaagcggcgcttgcaagttacacaaattctaaagattttgagaaatatgcgtgtaagcaatgtaataaacatgttagggctaatgtgaaggtatctgttgcaaaagttccttctgttctgatgctacctatgaagcggtttgaggcttatacaaataagaaaataaacaagaaagtggattttgcctgtcagcttgacatgaaacctttttctagtagtttacacagttttctgtttttttagatttggacaatcttgttgatacctttagagtttcgtgatttcttttgtaacagtacaatatttctgttcaacaaaaaggtgatttgaagtacactctatccggtgtgatagttcatgatgatgaattgatcagttcgggtcactaatactactatgttcgcatttcaagtggatggtattgtctaaatgacagtaaggtaagctaaggtctacgttgtctgagttacaaattattttacgttattgtctgtttttgttgtaggtttccaaagttagtaaggaggatgtgttggatgccaaaacatattttctattttatgctgttgatacggaagagacgagtgatgggggcgaaacgtctcagataagagcacatgatgctgctgaaagagaaataggtaatgaagttagtctttgaatgtagagtttctagattaatctgcaagtgccatgcttattttgatcacatgcttcacattttttgttctgcaggttttacttggtgtaggtaataaagataagagcagagatagacatagagatagagaaaatgagagggatactgagaaggaaaaagacaaggataggtcaagagtgaagaagagagcgagtaagaaaagtcgtgaagatgatgacgagactcataaagctgcagaaagatatgaacattctgacaacagaggtatgaatgaaggtggcgataatgttgatgctgcatcaagtgggaaagaagcatcagcgttggaccttcagaatcgcattttgaagtaagtgattctcatatgttatatgaaatctagaattataggtagtacaggaattaaaagtttgtgttttcttccttaggatgagagaggaaagaaagaagaaagctgaagatgcttctgatgctctatcatgggttgcaaggagccgtaagattgaggaaaaacgaaatgctgagaagcaaagagcacagcagctctcgagaatttttgaggagcaggtattacctccattccttgaacatcttatatccttttatttcttcataacttccttttatctgacattttaataaatatatcttatctcatatttgttcaggacaatcttaatcaaggtgaaaatgaagatggcgaggatggcggtatgttttcgtttctagttcttttacccctaactttaactcttcaaaggaagtaatcatgtattctgtcataccatagaatttctttttctatcttcctttctaaatgtgatgctctctgattgataatttatcttgacatattctggttaacagagcatctatctggtgttaaagttctacatggtttggagaaagtggtggaaggtggagcagttatcttgacactaaaagaccaaagtgtccttaccgatggagacgttaacaatggttagtatctttttgtgctatcttttatttatgctatcagcattgttgatgttaggctctgtcataatgagattttcaactattcttgcagagattgacatgctagaaaatgtggaaattggagaacagaagcgccggaatgaagcttatgaagcagccaagaagaaaaagggaatatacgatgataagtaagtttaagtattgttcaaaggcatttagatgagcatatctgtgttgcttaagactgaaacatggcattatatttattttataggtttaatgatgatcccggggcagaaaagaagatgcttcctcagtacgatgaggctgctactgatgag

SEQ ID NO: 160903 - DNA, 468 bp, Arabidopsis thaliana landsberg
gcacttgcttgtaggttgtgcttccatctaaggagtctgtcactgaattgcaaccaagaatggatgatatattgaaatgcccctgtgatggcataattgtgacagctgctggttctacaggatctgcctatgatttttacagtcggtactttgctcctaagttcggagttgatgaggtaaaagagtagctgcaacttacattatagtctttgctcttaggattgaacaaaccaccaaagaatatgatttcttctgcctaaaatgtgtcgcctttttcaggaccctgtttgtggaagtgcacattgtgcattggcacattactggagcctcaagatgaataagtgtgatttcttagcctaccaagtaatctctcttatctctttaaatttaaagtatcgtttaatgcttcctagtgaatgattttgagtttttggaaatgttgcttaggcttcgagtaggagtggaacc

SEQ ID NO: 160904 - DNA, 1431 bp, Arabidopsis thaliana landsberg
atggagaaaatggaagagaagaaaaggatagtgttagttccggttccagcacaaggacatgtaactccaatgatgcagcttggcacagccctaaacatgaagggcttctctattactgttgttcagactaagttcaattactttagcccttcagataaattcactcatgattttcagtttgtcaccattccagaaagcttaccagagtctgatttcaagaatctcggaccaatacagtttctcgttaagctcacaaagagtgtaaggtgagcttcaaggactgtataaggcagttgttgctgcaacaaggcaatgatatagcatgtatcatctacgacgagtatatgtacttctgtggagctgcagctaaggagttcaaccttcctagtgtaatattcagcacacaaagtgctactaatcaagtttcccgttgcgttttaagcaaactcagtgccgagaagttcttggtggacatggaaggtgcctaaaaccagcttaataacctatcttgaaaccattcgtttcactaataagtcattttgttttggctttttagatcctgaagtgcaggaaacgttgatggaaaatttgcatccattaagatacaaagacctaccaacttcaggagttgggccactagatcgattatttgagctgtataggaatacagttgacaaacggacagcttcctcggtgataatcaacacagcgagctgtctagagagctcatctctgtctcgtctgcagcaacagctacaaattccagtttatcctataggccctcttcacatggtggcctcagctcctacaagtctgcttgaagagaacaagagctgcatcgaatggttgaacaaacaaaaggtaaactcggtgatatacataagcatgggaagcatagctttaatggaaatcaacgagataatggaagtcgcttcaggattggctgctagcaaccaacacttcttatgggtgatccgaccagggtcaatacctggttccgagtggatagagtccatgcctgaagagtttagtaagacggttttggaccgaggttacattgtgaaatgggctccacagaaggaagtactttctcatcctgcagtaggagggttttggagccattgtggatggaactcgacactagaaagcatcggcgaaggagttccaatgatctgcaggccattttcgggtgatcaaaaggtgaacgctagatacttggagtgtgtatggaaaattgggattcaagtggagggtgatctagacagaggagtggtcgagagagctgtgaagaggttaatggttgacgaagaaggagatgagatgaggaagagagctttcagtttaaaagagcaacttagagcctctgttaaaagtggaggctcttcacacaactcgctagaagagtttgtacacttcataaggactctatga

SEQ ID NO: 160905 - DNA, 2529 bp, Arabidopsis thaliana landsberg
gggtgcaaacgcaggcgtcaccacgtttgtctgtaacttcatgcacaagaccgtgaaagcaaaaagaacaaggcataagcaaattcatgggaataataactttagcaaagaaacagaagtgcgtggtgatcgaacgaaatagatgataccttgatgactaaagtttctagatttggagagtagttaaggagaagtggctccacttaccagcctctttctttgttacactcaaaagataaagtaacgaggttgggaaacaccgggattgatttacagcacgagtaaaatacctgggatctattgtcacaaccaaaacaaacatatacacaaaatgagactttgctagctagcatgcacttcaaatagaatcaaccaatagaagaagaagacgtagcagagactgacctcaagagaaacagcggacaagtgaagggttttaacattgcttatccctgcaaccagattcgtaacataaccaacaatatcctctgtatcaccatccacataataattaatagtcatctggaagacgctcccatgagtgtagcttctacaagggaacccaaatcaacctcataatcttctgcgggataaccagaatagtcaagatagacaagactgggtgtatcaaacagacgaaaacccttgtgaccgttagggtaacggggccaatgataagagctggtcagtcgtttgataagagaaggactagacacggtccctccatcaaacaaatattattaaaaggaaaaaaaaagagataaatgaaaattggtccataagacaaatactgaaaagacgaggggttaaattgaaataaatccctcctcttctctgttcacaaaatcctcgcgccacaaaaccctagctgaacggaagaaggttagtggtttaatctccctctggggaaagctgcttatgttgattctctaggcttttttatattctgaaagttttgattttttgtatcttgttttgtttctcaatcatcaatttgtggtagtagctcactagcaaacaatggaggggaggttgaataatatgtgaaggttgactgtgaatgagagcaaattcgttgaatctgcgttgcaatctgagctcagagtcgatggtcgtggcctttatgattaccgcaagcttactattaagtttggcaagtgagtttttctcctattcattgattatgtttacctttaaagcttcaatttttgttgatgcttttgatctctggttttgcaatgttgttactgatgattaatttaatctgtgtgagttttcgatagggaatatggcagctcacaagttcaactgggtcagactcatgtaatggcttttgtgactgctcagctagtacaaccttacaaagacagacctagtgaaggctccttctctatcttcaccgagttttctccaatggctgatccatcgtttgagccagggcatcctggtgaatctgctgttgagcttggccgtattatagaccgtgctctacggtaaacctctctttttgatttgatgctacaaacaaagttttttgtattgatggtctttgtgttgttggttgcagagaaagccgtgcagtagatacagagtcgctttgtgttctagccggaaagctggtttggtctgttcgcattgatcttcacattttggacaatggagggtaggtcttcttcatgtttatccaaggttcttgttgtgagaatgatcttttatgtgtatattgttactcactctcttacaggaacttggttgatgctgctaatgttgctgccttagccgcactcatgactttcaggagacctgattgcactgtaggaggggacaacagtcaagacgtgatcatacatccacccgaagttagtaattcatattttttttttttcagtttagttgatgaacttaataactagagagaaggaagttctcaacttcaactgttttgttctatctttggtttcttttacaggaaagggaaccacttccattgataatacatcatctcccaatagccttcacgtttggattttttaataaaggcaacattgtggtaaaaacagttgtatttttagtgagagtctagtttgctttttcttttttcttttctgagatataaagtgtgatgtgttgttatatgcaggtgatggacccaacttatgttgaagaagcagttatgtgtgggagaatgactgtgacagttaatgccaatggcgatatatgcgcaatccaaaaaccgggggaagaaggcgtgaaccagagtgtaatccttcattgcctgcgtcttgcttcttcaagagctgctgcaacaacaaagatcattagagaagaagtaaggtttctgaaatccaaagcatatttcttttgaatccaaaaatattcaacaactcatagtttgttgtgctttgttttcatggtgtaggttgaagcatataactgtgagagaagcttacagaaggtgaagcgacatcccactttggctaaatctaaagtttctgaacctactgtagctgtgaaggaggaacataggaa

SEQ ID NO: 160906 - DNA, 752 bp, Arabidopsis thaliana landsberg
caggttgttggaactctcttcacgcaccatcaaaagtgtgttcttgtagacactcaggctgttggtaataatcgcaaggtcaccgcttttattggaggtctagatctttgtgatggccgttatgacacacctgagcataggatactccacgatcttgacactgtatttaaggatgatttccacaatcctacatttccagtaagtttattattatataccggctgttatcaagcttgaatcctaattctttagttattactgatacatactctgtttttacttcctcaggctggtaccaaggccccaagacaaccttggcacgatttgcactgtaggatagatgggcctgcggcatatgatgttctcataaactttgagcagcgatggagaaaggcaacacgatggaaggagtttagcttacgtttaaaggggaaaactcactggcaagatgatgctttgatccggatagggcgtatatcatggattctgagtccagtgtttaaatttctgaaggatggtacttcgataattccagaggacgatccatgtgtttgggtttctaaagaagatgatccagagaactggcatgttcaggtccttgttgattccttccaaactatacttatttcatgttaacaaatgttgttgatttgatctaaccacgcggtttctttgacttctagatattccgttctatcgactcaggatccgtgaaaggatttccaaaatatgaagatgaggctgaggcccag

SEQ ID NO: 160907 - DNA, 2852 bp, Arabidopsis thaliana landsberg
atgtcagacttaggcgagtcgccgagttcttcaccaccagcaccaccagctgataccgctcctccaccagagactccatccgaaaactcagctcttccacctattgattcctctcctcctagtccaccagctgattcatcatcaacaccgccgctgtcagaaccatcaactcctcctccagattcacagcttcctcctttaccttcgattcttcctccgctaacagattctccacctccaccttccgattcttctccaccggttgattcaaccccttctccgccgccaccgacgtcaaacgaatctccttctcctccagaggattccgaaacaccaccagctccaccaaatgaatccaatgacaacaaccctcctccgtctcaagatcttcaatcgcctcctccatcgtcgccgtcgccgaatgtaggacccacaaacccggaatcaccaccgttacaatctcctccagctccaccagcatcagatcctacaaattcaccgccagcttcaccattagaccctaccaatcctcccccaatacaaccatcaggaccagccacttctcctccggctaatcccaacgctccgccgagcccattccccacagtaccacccaaaactccttctagtggacctgtggtgtctccatctctcacatcccctagcaaaggaactcctactccaaaccaaggcaatggagatggcggtggcggtggtggcggctatcaagggaagactatggttggtatggctgtagccggtttcgcaatcatggcgcttataggcgttgtgttcttagtgagaagacagaaaaagagaaacattgatagctataatcactcacagtacttgccacatcccaatttctctgttaaatcaggtttaaaaatctcacctttatctctctctgatcatcttctatgtgcttgaatcatctctctgactatctttgcttttgatgtagatggattcttatacggtcaagatccaggtaaaggatactcctctggtcctaatggttcaatgtataacaattcacagcaacaacaatcctctatgggaaacagttatggtacagctggtggtggttatcctcatcatcaaatgcaatcaagtggcacacctgactctgctatactcggaagtggccagactcatttcagttacgaagagcttgctgagataacacaaggctttgctcgcaaaaacattcttggagaaggcggatttggatgtgtctataaaggtacattgcaggatggtaaagttgttgcggttaagcagcttaaagctggaagtggacaaggtgaccgtgaattcaaagcagaggttgagatcatcagccgcgttcatcatcgccatttggtctctctggttggttactgcatttcagaccagcatagattgcttatctatgagtatgtttctaatcaaaccttggagcatcatttgcatggtgagtgacttgttaccattttcgttatagataagacttttttttagctttacgtgttagactgactcgctttacgctttaggaaagggtttgccagttttagagtggtctaagagagtccggatcgctataggatcagccaaagggttggcatatcttcacgaagactgtaagtaatgccttcacattttcttagttgtgtgctttggttatgcacttcatagtttaaacagaagccagaatcatatccttgttttattttacaggtcatccgaaaatcattcacagagatataaagtcagcaaatattcttctagatgatgaatatgaagctcaggcaataatgaaatcctccttttcgttaaatccatcttatgactgtaaagtttttagttaatgagactgagttctgttttttggatgtttaggttgctgattttggacttgctagactcaatgatacaacacaaactcatgtttcaactcgggttatggggaaccttcgggtaagcaaacattcatcacaaactctactccaaaactggaccttattgatccaatgcctgatgaaaagtttgttatatatggctttaggcaacaaattggatcaaacctgaatctttattgatcctatggctgcatgacatgttttgttatcaggtacctagcgccggaatatgcacaaagtggaaaattgactgatagatccgatgtattctcgtttggggttgttctcttagagcttataactggacgcaaacctgttgaccagactcagcctttgggagaagagagtttggttgaatgggtaaaaatactaatctgtcttgacattcttcaatatatggttggacttggccctagtatacttatatagtacttataaatgaactcacaggctcgtcctctgcttctcaaagccattgagaccggagatttaagcgaactgattgatacacggcttgaaaagcgttatgtggagcatgaagtcttcagaatgatcgagacagccgctgcatgtgttagacattctggtccaaaacgcccacgcatggttcaggtaattctgactaaccaaaagtccaaagctcccatatatagtaacaagtgatttctcacatctgaaaacttatctactcttcgaaataaggttgtgagagcattggactgcgacggagactcgggagatattagcaacggaatcaaaattgggcaaagcacaacttatgactcagggcaatacaatgaagacattatgaaattcaggaaaatggcgtttggtggtgataacagcgtagagtcaggattgtacagtggaaactactctgccaaaagctcttcagatttctcagggaatgaatctgagactcggcctttcaacaaccgacggttctga

SEQ ID NO: 160908 - DNA, 277 bp, Arabidopsis thaliana landsberg
atggtgatcaatgtgggtaagtcttaacaatacaggggtcttgttgataaattcaagggataaatatcgtctgtttccctgagcttgggcaacaagtccaacttctctccttaagaattaagaaagagaccagaaacgaaaacctcatcaatcaaagctcaaaatcgccttcaatggatgctaagatcggacaattctttgactcggtcggtacttccttcagcggcagcgataagatcccatggtgcgacggagatgtcatcgctgtaagttttct

SEQ ID NO: 160909 - DNA, 912 bp, Arabidopsis thaliana landsberg
atatctctccagcctcttgtacaatgcttggatgtcgacaacttgattaagctgtttacatctgtactagttgaaaggaggattttgattcgatccaacaagtatgtttctctatgtagagacattatgagtttaagatacattttctaaacagttactatttcatactatctctatttaatcaccacactaattttgcctcatcgtgaatctcaataggtattcgcttttgactctggtgtctgaatccatatgtcatttgatttatccttttcgatggctggtatgtcatagaacactgatgagatctcagtttatcacttaaacaaatatgaactcatttgtaagcatgctaacccatgcatttctactgactaaaatatttcttctaatctttattatttgttttgttgtatgtttctgaagcaagtctacattccattactattttttagtggagtagactacattgatgcaccaacaccatatatgatgggtctccactctgatgtcgatacatccaatcttgctatggatggcgtgagtctaaatttacgtcatacttatcctctttaaaatttgggcaaccttatattggtctaaaaacattgccatttctaggttgtagtggtggatcttgacataaaccaaattactacttctgaagagatacctcagataccagagcctgagttcagcactttgcgaaacgatatcttgaaactactgcaccctaatgttgtagcgattgatcagttgaagggctttggtcattccgttgagcagtgccctataagccttagcaaaccttggggagaggatcatgacctttaactcaggtgactctaggaaaccttgtcttgtgattgcctacaatttattatctttttccatgggaactgcttgggtctc

SEQ ID NO: 160910 - DNA, 181 bp, Arabidopsis thaliana landsberg
tcgtatctggcattcttctttttcagcatcatcatcttctgcccgaggactcgtttggcttacaccagccatactaaattgcgcaacgaatatctcttcaccctactctctgagtgggtatgggtaaggaactctcgcagatcctccgaacacacagacaaatagatccgtttcgggaaag

SEQ ID NO: 160911 - DNA, 1295 bp, Arabidopsis thaliana landsberg
tggtttagttctctattgatcgtagcatttatgtcgctcgttcgtactgcgacgatcgctcttcttctaatcgcgtttctgcaaaacgctaacgctgtgaaaaatctgcaaagtattgttgcgtatcacggtgcggttgcgacagacgatggacggtgttctgcaatagggacgaatgttcttcgtcaaggaggaaacgcgattgatgcgtcggtggctgctgctctttgtttgggcgttgtcagtcccgcatctagcggtataggcggtggagcgtttacaatgattaagctagctaatggcacggaagttgcttatgattccagagaaaccgctcctctaagcgccactgaggtaagtaacacgttttatagtaataacgtctttctttttactcttataaaaatgagcattttggataacgtttttgagttaagaacagtgttttttgaatcaaagatattttttggctgtttctcttgatgtaggatatgtatggtgataatcctgagcgaaagaagaaaggatccttgtcagtaggcgttcccggggaagtcgcgggtctatacacggcttggacacaacacgggaagttaccgtggaagcagttagtagaacctgctgagaaacttgcagctgaaggattcaagatttcaaaatatctctatatgcagatgaatgtgactagaagcgatatcttagcggacaaaggtctctctgacctatttgtttcaaatggagagctcaagaaaccaggggcgatttgccgtaacccgaaattggctgatacactaagccaaatcgctgaatacggtccaaaagcgttttacaatggcacggttgggtttaacctagtgagtgatatacaaaaagccggaggaataataactttgaaagatttgcagaattacaacgttaaggttaaagaaccattatctacggagattcttggataccgattactcggcatgcctcctccttcatctggtggccctgcaatgatgcttgtaagtaaagtatttttgtgaaaatttcacatttcatcaaacctaggtttatcttttggagtttctcttgtgttgcagattttgaacattcttgctcaatatggtattccatcgggtgtttccggccccctcggtgttcatcgactagttgaggctctcaaacatgcattcgcggtaagaatgaacctcggggatccagatttcgtccctgatgttaccgaggttgtttcagatatgttatttctaaagtttgcacatgacttgaagagcaagatacatgatgagaag

SEQ ID NO: 160912 - DNA, 697 bp, Arabidopsis thaliana landsberg
atgaacatcgatgatgtaagtttcttttttttttctaatgttatagaattgtatgattgagaattggatgttttttcctgaatttagaattggtcggacgaagagtgttgatattttcttcaactttgtactgctgaggaaaaagggaatagaagaaagacgagattaaatataactggaaaagagtccatcatgagatagtttgaagaaaaatttgggaagagatattcatgggataaacaattcaagaacaagtatgatgtgcgtagaagaacatacacaaaggttaaaaacttgcttcataacagaactgaaattacatatgattctgtgtaaagaataaatataatttttcttttcattacgtttacctaagtatttaagaaagcaagtaaacatacttttaatacctaaaggtcgctgaaaattctaaaaattgtaacgtgaattctcaaaactgtaaaaactgattctttttattgtacctatatgttaacgttaattctcataactctaaattcttatttttccatcaaaatcatgacgtcaatcaaactgttaaaaggcgagatacaaatataaatattgtactaatattgttaatctgaaatatctactattcaaacatatttgtttgaagtatatcatattacatgatacattttttggtgatgaatcaaattgatgaataaacatt

SEQ ID NO: 160913 - DNA, 2677 bp, Arabidopsis thaliana landsberg
atggggctgcttcacggctccaacagattatcttcaccggaacatgttcgtagaagagtctccgggaattcttctgaggacggttcgcctcgaatttgccggcagcagtcgttcggtcgcgacataggccatgcagctgccgagacgtatctcattactcgacttagcttcaaccttcttggatatctcgggtaaatttcattcctctcatggcatcgtttatttgtttttagccgagacgtatctcatgtcctgtttctagagctcacaattagtcttctcgatgaattattcttaccacagttttatgataactaaatgagttttccggtaattaataatcttaggacatgtgatgatgtttcaatttttttgtcggaatctctgtaaggaaagttttgttttattgttgtaagtttttgttcagggtaggttaccggtggatcacaagattacttgctcttgcttgttatgcaatgctccttatgcctggtttccttcaaggttaccccatcttctttgctctgtcttattaacaagctgttttttgtacactaacagagcttttgctatttccttgtgtagttgcatatctttattttttctcatctcaagtcaggaggagtatagtttatggaggtcatccaaggaataggtatctcagtctctgcaatcttgccttcttcaatgattgattggtatttagtacattttattcgattattctggcaggctggatttgtacataccgccaacgagtgatggcctgaagccggttgtagttttcgttactggtggagcttggattatcgggtaagcaattcgtgggcctcgtatcgtgtttaactttgataataatacactagcgtcctttgtggatacatcttctttcacaagataaaagtcgcacactcaatagtttcatacttgcctatccttttagttacaaagcttggggttctctcttgggactacagctagcagaaagggacataattgtggcatgtctagattacaggtaagcaaagtactcaatttcttaccagtgttacttgtcctggattctatcaaatctatatcagcttggagctatttgggaatttatctttattaatcatatgcctgtatccaatgcattgaccaagcaatcccctgtctttggttcagaaactttcctcaggggacaattagtgatatggtaagtgatgcagctcaaggaatctcatttgtctgcaataacatctctgcatttggaggtgatcctaacaggttggagctcatcaacttggtttttgtttctatcttccatgggatcttgtgattgaaccagtgtcttcttgcgtgtgtagaatctatctgatggggcaatcggctggtgcacatatctcttcttgtgctctctttgaacaagctattaaagaatcaagaggggagagcatctcatggagtgtatctcagattaaagcttactttggtttatctggagggtaatttactaaacttggtgacactatgaagcttaaaacgtttttcaaagggtttcttatccagtaattcagaatctactcaccatttgtaaacttgaacaggtacaatctctttaatctggttgaacacttccacaaccgaggcttgtatcgttcaattttcctaaggtaaaccatctgatcaatctaacttggcatcttccaaataacccaaaaccttggatagaatcaattgtatctaaaaaagcaacaactttcatcagattgagagaatacgcaaaaaataaataataagaggagctagcaacatgtatactatttcattttttttttagtttctaagccaatcagaaggctgtatttcatacccactcgcactttgtgcgcgttgagcgagtgagagcacttctgtgggtgtacccctttccaaatcatgactttttgaatcgacgcattcctctctgaaaaacacatcgcgtgacttttttgttttttcttcttctcaaaccaatgtaaaccgaaccaaaatcatttttaatttcaataccataaaccgaacctaaatcaattgtaatttcaataccatgtaaaccgtgacttatgactctcctttttcactaatttgcagcataatggaaggagaagagtcctttaaacaattctcccctgaagtaagattgaaagacctgaatgtaagaaaagcggcagccctcttacctcatattatactctttcatggatccgcagattattcaattccacctgaagcaaggttagctcacccttactacatatatgaaatcaagcattcaacagtttgttatttggtttagtcctcttcctaaaacagaaaagtgttctttcttttgcagcaaaacttttacagatgctcttcaagctgctgaagtgaaagctgagctagttatgtacaagggtaaaactcataccgacctatttcttcaggtaagcaaacaaccattaaagatcattttctacatacatagctcaatgttgtctaaacacattacaaactgcattgcaaggatcctctgagaggcggtaaagatgagctatttgatcatatagtctctatgatacacgccgatgacagtgacgcattgagaaacgatgctgttgcgccaccgaggaaacggcttgttccagagttcttgctgaaactggctggcagg

SEQ ID NO: 160914 - DNA, 1311 bp, Arabidopsis thaliana landsberg
cccatgagacggtcaatccggattctcaagacaggatgtcttgaaggggccggcgtcgttccagctcaagagatcgccgagtgcgatcaaaatcaatctattcaggtcgtcgaacctgaagttcaaaagtgttaccggcgaccgctccgtcgtcgtttatgccgccgcgccagcgagcgaagaggtcaacgcgggcctaactatccttgatcaagacaaggatgaaaccgttgcggagctcgggatttccaggaggtcccgtgaggagaaagggaaaggagtggctacccaatccaagaagaggtcagcttctgaagccggtttagatgaggtgagactctcaactccgaccagtttacgttcaagtattctggcgagaaattccttgtgagagatcaggaggccgccagtcatctttggcgtaatttgatgctccccgggacgaaagattttcctaatcccgacgacctggttctgaaagaaggatatcagaagttcgccaggtcatcacttgaggtacacgctagttccatgttttcttgtggctcaatatctttgtatttcggctttaaccgtctctttttccagaccgccgccctggccaatgatctgatcgcgacttatgatcgcaaattgaagctgaagctcgccgacagagaggccttcgataacttgaagaagtgcgcagaccaggccaaagccatctatgccaaagacatgaaggaaatggtcggagatgctgccgagattcataaggcggagatgagctcgttgaacgacgaggtcaagaggctcaatggtcgagaagctgatcttcagaaagagattagcgatcttcaagtcgcgttggttgctgcgaaggagcatggggagcgggagtgcaacagactgcggaatggtcgagctgctaaggtcgcccgtactacaaagaaagcccaagctcgtcttgatagagtaaaggcttatctcaaggagcaagaggacctcgtcgggccaaaggtggatgctgagaatcaggccaaaggtgctgaggagatagtaggtattctgatgcagagaggcgcgaagattgcggcatccgaactcagcagccttaaggagttaaccaaaagggcgtccgacgaagtcaatgccttgcacgtcatcgagctcggggatgatgacctgaacatgtccccggatcagctcggtttttcgaggcaagcctcccaaattgctcctgtggcggaccagcacgactcaaatgtcgacctcgttagcggaagcgatattcgacgtgtaagcgttgaagaaacaaaccagacgacttga

SEQ ID NO: 160915 - DNA, 1465 bp, Arabidopsis thaliana landsberg
tgaattggtgacagtgtatgctcgtcacttagagaggaagcacgatatgattcttgggatgctctttgaggaaggatcatacaaaaagctttacagctataaacaccttataaatggatttgcagctcatgtttctcctgagcaggtgaaaaatcgatttcagatcatttctaaatagttcttaactttcatgttcccttacactatttcactatatttggtaggcagaaacacttcgtcgcgcccctggtgtgagatctgtagacaaagattggaaagtgaggagactcaccacacatacaccagagtttttgggacttccaaccgatgtttggccaacaggaggcggttttgatagagcaggagaagatattgttatcgggtttgttgactcggggatttatccgcatcacccgagtttcgcgtctcatcacagattaccttatggccctcttcctcattacaaagggaaatgtgaagaagatcctcataccaagaagagtttctgcaacaggaagatcgttggagcccaacattttgctgaagctgctaaagcggctggggcatttaacccagatatcgactatgcatcgccaatggatggtgatgggcatggaaggtttgtctttaaagttgtctccaggtgttagggggagataatgctgttgtactaagcaaatctgattatgctggattttcagtcatacagcagctatagcagctgggaataacggtattccgttgaggatgcatggttatgaatttggaaaagcgagtgggatggctcctcgtgcaaggtaggcagatgtgcaaaatggcagatttattgacagtttgtattcttcacgttcagagactaaaaggctaaataatttctttcaggattgctgtttacaaggctctttaccggctttttggaggctttgttgctgatgttgttgctgcaattgatcaggtaagagtaagaacttaacataagttagaaaagactgatcataaagtaccatggaaatatctctctgcttagatgaaatgatttatcctgctgcatatgctttattcgttcagcaacacaagctccggttatctattttagatttcaacgagtcaagtaatcttataactgctactttccatggggattatctatgttgatattaaaagagattttcatgacaggctgttcatgatggagttgatatcctgagcctctcagttggtccaaatagtcctcccacaactaccaagacaacgttcttgaatccatttgatgctacccttcttggggctgtaaaagctggtgttttcgttgctcaagctgcaggaaacggagggccctttccgaaaactttggtatcatatagtccctggataactactgtcgccgctgcaattgatgatcgaagatacaaaaatcatctgacccttgggaatggaaaaatgcttgcagggatgggcttatctc

SEQ ID NO: 160916 - DNA, 455 bp, Arabidopsis thaliana landsberg
gaaaagtatgcgaatgtaaaatgggacgagctgggattcgcactgattccaacagattatatgtatgtggcgaaatgcaaacaaggagagagcttttcaacaggagagattgttccttatggggatatttctataagcccttgtgctgggattctcaattatggccaggttttgttctctcttcactttttccccactcacttataaatttttgttcaatactggtgtttggtttttgaacgttttgtcatattggatttggatcggtttataatctagatcgtatactcttaagcaaaagcttgtaagagagtttgagagaaaatcatttgatattggcttgggggtttgtagggactatttgaaggtctcaaggataacaggacagaagacggtcggatcacactcttccgacctgaccaaaacgctattcgtatgcaaacaggtgcagatag

SEQ ID NO: 160917 - DNA, 3753 bp, Arabidopsis thaliana landsberg
atcctcgctatatagctacatctgagatcaactggaacagtatgtcacttgttgttgagcattacttatctggcagaagcgagtatcaaggaattggctttctaaatctcaacgataacgagattaatcgatggcaggtggtcataaaatctcactgtcagcatatagctttgcatctagaccatgctgcaagtaacataacttggaaatctttatacccggaatggattgacgaggaagaaaaattcaaagtccccacttgtccttctcttccttggattcaagttcctgacaagtctcgaatcgatcttatcattgccaagctcccatgtaacaagtcaggaaaatggtcaagagatgtggctagattgcacttacaacttgcagcagctcgagtggcggcatcttctgaagggcttcatgatgttcatgtgattttggtatcagattgctttccaataccgaatctttttacgggtcaagaacttgttgcccgtcaaggaaacatatggctgtataagcctaaacttcaccagttaagacaaaagttacaacttcctgttggttcctgtgaactttctgttcctcttcaagctaaaggtcagtgactcagtagtaagtttcttcgtcttttgtatcagctaaatttgacatctctattctctcctcctaagctgattatgattcaattgcagataatttctactcggcaaatgccaagaaagaagcgtacgcgacgatcttgcactcagatgatgcttttgtctgtggagccattgcagtagcacagagcattcgaatgtcaggctctactcgcaatttggtaatactagtcgatgattcgatcagtgaataccatagaagtggcttggaatcagttggttggaagattcacacatttcaaagaatcagaaacccgaaagctgaagcaaatgcatataaccaatggaactacagcaaattccgtctttggcaattgacagaatacaacaagatcatcttcattgatgcagacatgcttatcctcagaaacatggatttcctcttcgagtaccctgaaatctccacaactggaaacgacggtacgctcttcaactccggtctaatggtgattgaaccatcaaattcaacattccagttactaatggatcacatcaacgatatcaattcctacaatggaggagaccaaggttaccttaacgagatattcacatggtggcatcggattccaaaacacatgaatttcttgaagcatttctgggaaggagacacacctaagcacaggaaatctaagacgagactatttggagctgatcctccgatactctacgttcttcattacctaggttacaacaaaccatgggtatgcttcagagactacgattgcaattggaatgtcgttggataccatcaattcgcgagcgatgaagcacacaaaacttggtggagagtgcacgacgcgatgcctaagaaattgcagaggttttgtctactgagttcgaaacaaaaggcgcaacttgagtgggatcggagacaagctgagaaagcgaattacagagacggacattggaggattaagatcaaagataagagacttacgacttgttttgaagatttctgtttctgggagagtatgctttggcattggggtgagactcagaccaactccaccgtcgctgctgattcttcctccaccgcgtaaaaccgtactactgtgtgtgattttcgttttctggttaaaatttattcaaacattagagtaggggttaaaataacaaatacctgataagtaaaggttcgttttgcaaaacacggacttctaaaaatctcattttcctaatacgcaccgtttttgtgccttggtccaaaatcaaattaagttctccttcccaaatccctaaaatgtctcgtcttttgttgtttaccaggcgattatgaaattctcgaaaccgaccctggtcttacggagacgatgataccttcctcaagtcccatggagtccagacatcgactctcgttctcaaagttagtcttcgtcttcttcttcttattcttcattagtttctctagtttcatgaacactacgtactattcttagttaacttagtagcttcacacacatggttgacttttctggaaatcagatcttcgattttgtttttgattcagaaatgtgtttcacaagcgatctatgtttatctatctgttggattgacatagataatgactcattcgtttgttttgttgtgtgtagtgagaagacaagtaggaggagatttcaaagaattgagaagggtgtcaagttcaacactctgaaacttgtgttgatttgtataatgcttggagctttgttcacgatctaccgttttcgttatccaccgctacaaattcctgaaattccaactagttttggtcttactactgatcctcgctatgtagctacagctgagatcaactggaaccatatgtcaaatcttgttgagaagcacgtatttggtagaagcgagtatcaaggaattggtcttataaatcttaacgataacgagattgatcgattcaaggaggtaacgaaatctgactgtgatcatgtagctttgcatctagattatgctgcaaagaacataacatgggaatctttatacccggaatggattgatgaagttgaagaattcgaagtccctacttgtccttctctgcctttgattcaaattcctggcaagcctcggattgatcttgtaattgccaagcttccgtgtgataaatcaggaaaatggtctagagatgtggctcgcttgcatttacaacttgcagcagctcgagtggcggcttcttctaaaggacttcataatgttcatgtgattttggtatctgattgctttccaataccgaatctttttacgggtcaagaacttgttgcccgtcaaggaaacatatggctgtataagcctaatcttcaccagctaagacaaaagttacagcttcctgttggttcctgtgaactttctgttcctcttcaagctaaaggttagtagcaagtttcttcgttttcagtctcagctagttctcccctcctaagctgattatgtttatttcaactgcagataatttctactccgcaggtgcaaagaaagaagcttacgcgactatcttgcattctgcccaattttatgtctgtggagccattgcagctgcacagagcattcgaatgtcaggctctactcgtgatctggtcatacttgttgatgaaacgataagcgaataccataaaagtggcttggtagctgctggatggaagattcaaatgtttcaaagaatcaggaacccgaatgctgtaccaaatgcctacaacgaatggaactacagcaagtttcgtctttggcaactgactgaatacagtaagatcatcttcatcgatgcagacatgcttatcctgagaaacattgatttcctcttcgagttccctgagatatcagcaactggaaacaatgctacgctcttcaactctggtctaatggtggttgagccatctaattcaacattccagttactaatggataacattaatgaagttgtgtcttacaacggaggagaccaaggttaccttaacgagatattcacatggtggcatcggattccaaaacacatgaatttcttgaagcatttctgggaaggagacgaacctgagattaaaaaaatgaagacgagtctatttggagctgatcctccgatcctatacgttcttcattaccatag

SEQ ID NO: 160918 - DNA, 569 bp, Arabidopsis thaliana landsberg
acggctacgtttctttatctgccgtactaaggctggcctttcgcaatatttggccagacgatatggaaaataagtgtgtttatatatgacatagacatgtttttttaaacaggtgcaattcaataatcttgtgattaataggagaaaagaagaagaaggtaggagaagatcaagattctaaaaggaaagccactgatatgcctaaacgaataaggctacgatcagctctacttgttaacttaagacccaacactggaatccaggtaagttcgttgacctaattttcacttcatttatgttttgacgacgatcatataatatattgattggtataaaatttcaataattggttgaaacaggatctagctgatatgatggctaaaggatctacgtgtagatggggaaattggatcggctacattgtctttccgttttctatcggattacgcgacgatccgttacaacatctccgaagagccaaaaggatcatcgatcgcaagaaaaattcgttagaagctgccctaacgttcgtcgccggtaaattcattctcaaaacatttggagttcag

SEQ ID NO: 160919 - DNA, 334 bp, Arabidopsis thaliana landsberg
ggagaagaagatgaagaaaccaattcctaaaattagggtttttggacagcgatcgattgcttcttccttcctgaatcgctgctcgattccgtaagcgttcaatctctatctctctcgatttctaaactcatctctcgcttatttcctaattcgccagtaacgttttaaaattgagtaattgaattcgtgtgcggttgttttatagtgtcgatgattcttcggaaattccgccggagaaagtggagaatcgtagcaagctgaacaaatcagtgctgtttaagcccaacaacactgaggtaacgattttctttggaatggtgacaagtgatgctaa

SEQ ID NO: 160920 - DNA, 1952 bp, Arabidopsis thaliana landsberg
  unsure (1)..(1952): unsure at all n locations
taacaattttgattcaattgttatctttgagactaacctattgacatttgggttttgagttgtaaatcttctacaggaaaatcatgagtaattacagtggtaggtcttccattgatcctgactacaacatggaagagacagagtcgtcatcttcgaggccagagagagaacagagagaatatgatagcttcagaagaaaggctgagatagctctagggaagagagcaatgacagagaggtatgagctaatagatgaggatctggaagacaagtacatgcctgagcatactcggagagccaccaaacttctgcacaaacctgatgtattgcctgctgaggaatatattagcctcttcaaattcaatgagttgtgtagcacaaggtaaccatgctcgaccacgcttgcacaacttggattattggagaatgttcagcatctgtaccagagttgtcatctgcacactctgatggcttatgcgtatgtagcatatgaagaagagacaattcaattcctctccacactgcaagtggagctctaccaaggtatgacctttgatgagttggattatgaaggattgggattcttgagattctctgtgtatggtcatgagtataggttatcaatcaagcgcttggaaggattgtttggtttccccagtggaacgagtactaagcccaagtatgacggagaagagnnnnnnnnnnnnnnnnnnnnnnnnnnnagctttacacgctgaattcttccaggccaaagagcaatcagatacgtagccctctcatcaggtacttccagcgttctatagccaatgtactctactcccgagagatcatagggactgttactaattctgatatggagatgatcgctatggctctcaaaggcactctccgccaaactaagaacaacatgtctctccaaggtgaaatcaatgacacacctctctctgtacttcttctgatccacctgtgtggatacaagagctgggctgtcagcaataaccacaagagagcacgaggcgctctgtgcataagtggtgttgtgacaccgattctgatcgcttgtggagtcccaatcacatctgatggactcgagccacgggcaatggatatcgagtatctacgtcactgcaaattcctggagttcgcaatggttggcaacttgcaccggttcaggtttgagtactctacagacaagagagctagcatccttctccctagccctgaggttactcggataatagaggggaataacattgattttcggccttagattggaagcctctactatgagaacacttcgccattggatgaggatgatcttatagaagaagctgctgatgatgggatggacgaagacagagcagtggagtttgacactagcatgtatcactttggtgaacatgtgcctccagcaagggagagcaagagcttgagtgaagctcataggaacaacagtaaactgcagaagtggtgcaagaagcaggacaagctgctcgccaagtgtttcaagactatcaagtttctgacagataagctgagttgttcctcctccacttttgctatcccacagggacaacctcctctagagatgccatcgaggagatttgatgagcctgagcacaggcctgagcttagtgagcagagagtctcacatgtcccggctaggcattcgtcattcgagtcccgggagcacaagagaagaaggaaggctacactcactcgatctagcagcagatcacgcctaattcactcgaggagatcactcgaccgcggtgctggccgcagcagaagaagagaggtcgagtatccttagagcggtgatgaccgtgacagagctaatgaggtcgagtacccacctgctggagctgatacggaacaaggcggttcgtatatggcctgggagcaatcacaggcagccattgacgaccaacttcgttcattcttcgactgag

SEQ ID NO: 160921 - DNA, 2850 bp, Arabidopsis thaliana landsberg
  unsure (1)..(2850): unsure at all n locations
aaccgccgcgtctcctcttctccgactcgatcggttttgcctcaaaggtaatttatgtttctccaatctaagttcttctctcaaatccgacttattcttcttctccgatcttactctttttcccagatctaactcttcttcttgttcttctctaatctgttacactcatcgccgcctctcttcttctccgatctaattacggcgcagagctctcttcgccgcctctcttcttcttcgatctgtgctccagaaccgccgcggctcttcttctctgactcgatctattttgcctcaaaggtaacctctgtttctccgatctaagttcttctctcaaatctgacctattcttcttctccgatcttacttcttttttcccagatctaacacttgatttgttttttgtgcaagatgccgtcggataatacttatgtccggtttagacaacaacagcgtgacccgttgcatgtcaattctccgcttagtggtgggaatatctcaggggttcaaggttcaggttcaggttcaggttcaaccgttccaccatcgcctccaacgccaacgactcagccttttgtcaatcattctgatgttcaagctgaccgtctnnnnnnnnnnnnnnnnnnnnnnnnnnnnnnnnnnnntggtcgtgctggcttgacaaggctagacccaaagcgtcctccgggtactctatggtaaggttaagcttatagtctctggaattaggtcttgtaagttggttagttttgccttagaagtttgattctgccttagaagtctctggatttaggttggttgtacttagcattgtagtttcttagaagtataaagacatagagatccttatgtgttttgttgctgttgttgtaggtttgacaatgactctacagttgcagcaacaatccgcagcatatttgaaagagatttcaaagaacctcatgccaattggtcacagacatcaaagactacaatcgatcgatggtatgaaacgtttgcggtaagttctgtgttcttttgatgtttatgcttgttttgttgtttggtttcatagtctgatgtttgctttgtctgttttgtagcaagtatataactgggaccgttcaattaacaaaagagtaagggttgagtttgaagcaaagctaaagtctaggatgtttgatcaagtgtcaaggtggaaaggaaattggaaggagaagggtgatgaagccaagccaaaatggattgatcctgatgtgtggaaaggtctagtacagttttggcaagatccaaagtcagagaaaaagagtaacaacagtagaaatgctagatatcatgatccggatggctcgtgcaagaaaacgggtaagataagtattcttctctccttaccattacttaaactacaatgttatgaatctaacttgtttatctctttgtgtttcagtgtgagaagactagagaaacaactcctgatttccttgagctgctagatgagacacacagaaaagcggatggaactttcatcgatgggaagtcagaggagatttacaagaaagtgacatctaggatagaagaggaagagtctcatatgtgctcaatggacaatccggagagcactggatcaggtggattgtctgttcattccaagaacaagatttttactgaggtaaatcttctgtgctttttcttggcagcttgttgtgttgtgtacttatctgaattctgttgtgtacttgtctgaattatgttgtgtacttggcagcttgttgtgttctgtacttgtctgaattctgttgtgtgcttgtctgaattatgttgtgtacttggcagcttgttgtgttgtgtacttgactgaattctgttgtgtacttgtctgaagtgtacttggcagcttgttgtgttgtgtacttgtctgaattctgttgtgtacttgtcagaattatgttgtgtacttggcagctgaattctgttatgttgtgtacttgtgtacttgtttgaattctttagtgtacttgtctgaagtgtttgtgttgtgtacttgtctgaaatgtttgtgttgtgtctccagtgcttgatatcaagttctcgtaatctggacagcttattcattatactgtgtgtcagaattctatgtgttgtgtacatgtctaattatgttgtgtccatgtgtgacttatgttgtgtacttggcagttgaattctgttctgttgtgtacttctgtacttctctgaattatgttgtgtacttgtctgaagtgtctgtgttgtgtacttgtctgaaatgtttgtgttgtgtctctagtgtttgatataaagttctcgtaatcttggcagcttattcattatactttgtgtctgaattcttttgaactttgtttctcatggtttttttgttgtgtccttgtgagtgtttgtgatctttgcaggttgctccgcgaaagaaaggaaggatttatggggttggatctctgcagtttgaagcatcctcagcccatagtggtccaatgcttcctagtgatgatccggtcatactttctcagaagctggctgccgctgaagcatgcattcaatctcaggctgagaagatcaatagcttcgacatcctgtttgactatcttgctgaaaaagatcctgctttggctgcaattcttcgacgtggttcctcgacacagacaggacaggccaacccaaatgaaccacctgtgtctactgctccagaaccggaggtggccaatgaggagacagcagctgctgccctagctaaccttgcaacaggatcctctcctccatcaactgtattttgaaaacattgtcttgctttttccttgttatctctctttagaacaagttcttagagtttcaaacaatcta

SEQ ID NO: 160922 - DNA, 1946 bp, Arabidopsis thaliana landsberg
  unsure (1)..(1946): unsure at all n locations
taacgattatggtttcattgttatctttgagactaacctattgatatttgggttttgagttctaaatcttttgcaggagaatcatgagtaactacagtggcagttcttcaattgatcctgactataacatggataagacagagtcgtcgtcttcaaggccaaaaagagaacagaaagaatatgataacttcaggagaaaagctgagatagctcaagggaagagagcaatgacagagaggtatgagcttatagacgaagatctggaagacgagtacatgcctgagcatactcgcagagctaccaaacttctgcacaagcccgacatattgcctgctgaggaatatgttaggcttttcaagctgaatgagttctgtagcatgaggtatccttgctcgacctcacttgcacaactcggattgttggaagatgttcagcacctgtaccaaagttatcatctggacactctgatggcttatccgtatgtagcatatgaagatgagacaatacaattcctctccatgctgcaagtagagctctaccaaggtatgacctctgatgagttggattgtgaaggattgggattcttgcgattctctgtatatggtcatgagtataggttatcaatcaagcgcttggaaggattgtttggcttccccagtggaacgggatctaagcccaagtatgacagagaagagttgaaagagcaatgtggatcaccattggcagctctgtaccgctgaattcttccaggtcaaagagcaatcagatacgcagccctatcatcaggtacttccagcgttctatagccaatgtactctactcccgagagatcacagggactgttactaactctgatatggagatgattgcaatggccctcaagggaactcttcgccaaactaagaatggtatgtctctccaatgtgaagtcaatgacacacctctctctgtactttccatctatgtggatacaagagctgggctgtcaacaataaccacaagagagcacgaggcgctctgtgcataggtggtgttgtgacaccgattctgatagcttgtggagtcccaatcatttctgctggactcgagccgcgagcaatggatatcgagcacctacgtcactacgaattcctggagtttgcaatggttgacgacttccacaggttcaggtttgagcactctacagacaggagagctagcatattgatttttggcctgaggttacacggataataaagggagataatattgattttcggcctgaggttggacgcctctactatgagaacgctccgccattggatgaggatgatcttctagaagaagctgcttcggatgggttggatgaagatagagcagtggagttcgacactagcatgtatcactttggtgaacatgtacctccagcgagggagagcaagagcttgactgaagctcataagaacaacagtaaactgcagaagtaatgcaagaagcaggacaagctactcgccaagtgtttcaagactatcaagcttctgacagataagctgagttgttcctcctccaccactgctattccacaggaacagcctcctctggagatgccatcgaggagatttgatgagcctgagcacaggcatgagnnnnnnnnnnnnnnnnnntcacatgtcccggctaggcattcatcattcgaatcccgagagcacaagagaagaaggaaggctacactcactcgatctagcagcagatcacgcctcattcactcgagaaggtcactcgaccgcggtgctggccgcagtagaaggagagaggtcgagtaccctcagagcagtgctggccgccataaagctgatgaggtcgagtacccacatgttggagctgatatggaacaaggcggttcgtctatggcctgggagcaattacaggcagccattgacgaccaactccgtttattcttcgactga

SEQ ID NO: 160923 - DNA, 1439 bp, Arabidopsis thaliana landsberg
tctctacaggaaaagggaagttagtagtgcatcaagatgaaagctcttattcttgttggaggttttggcactcgcttgagaccattgactctcagtctcccaaagccacttgtcgatttcgctaataaacctatgattctacatcaggtactatgttctttaattaattgattttgtaattgtggttcttcttgctatagtgtcatggtcttatttttgtattttgttgtttatgagctatatgctcttttaagtgatgggaaatgttgttgcagatagaggcactaaaggcaattggagtggatgaagtcgtcttggccattaactacgagccagaggtaaaaagacttcaagtctttaaaactttcctttggaaagctatatttgatttttttaatagaagatcttaaaatattgttcaatgttgaataatcattcagcaactgctagtgatgtccaaattctcaaacgacgttgaggcaactctcgggatcaagatcacctgctcacaagagactgagcctttaggtacagctggtcctttggctttagccagggacaaactggttgatggctctggccaaccattctttgtccttaacagcgatgttattagcgactacccgcttgaagagatgattgcttttcacaatgctcatggaggagaggcctctataatggtgacaaaggtaaattatttttgatgaaacctttaagcatttgtgttcatgttttttttactcattatgatataattggtttaaaaggtagatgagccttcgaaatatggagttgttgttatggaagaagccacagggagagtggaaagattcgtcgaaaaaccgaaactatttgttggtaacaagatcaatgctgggatttatcttctaaatccttcagttcttgatcggattgagctaagaccaacatcaatagagaaagagatcttccctcaaatcgcagaagcggaaaagctctacgcaatgctacttcccggattctggatggacattggtcaaccacgagactacattactggtctaagactttacttagactctctgaggaagaaatctccttcaaagttagccactggtccacacattttgggaaatgttcttgtggatgaaaccgcagagattggtgaaggatgtttgattggccctaacgttgctataggtcctggctgtgttgttgagtccggggttagactatcgcactgcacggtaatgcgtggggtacacgtgaagagatatgcgtgtatctcgagtagtatcattgggtggcactcgacggtcggacaatgggctcgggtcgagaacatgtccatacttgggaaaaatgtttacgtgtgcgatgagatatattgtaatggaggggttgtgttgcataacaaagagatcaaatcagacatcttgaaaccagatatagtgatgtga

SEQ ID NO: 160924 - DNA, 980 bp, Arabidopsis thaliana landsberg
aatcaagtgttagaattttgacattaaaccgacccaagcagcttaatgctctgtgcttcaacatggtattgaatctttcctttgttgtcaatttcttccggcctttggtgcactagttatataatggcttgaatcaatcttctctagatctctcggttgctgcaactattccgtgcatatgaggaagaccctagtgttaaacttgtcatcctaaagggtcaaggaagagccttttgtgccggtggcgacgttccacctgttgttcaaaacatggtacaaggtatatcaatatatcacccttccatgaccatcttttttttttcctttttgcttattttctgcttttacacactctttatctattttatgtggactaggtaaatggagacttggtgccgatttcttcagagatcaatacacgctcaattatgttatggccacgtatagcaaacctcaggtctcagaacacatactgtgcttttagaatatacttaaagtgtataagcttataatgtttttttttcaaattataggtttcaattttgaatggtattgtcatgggagccggtgctggtgtctccatccatggtcgatttcgcattgcaactgagaacacggtacgtattctttttttaaaacatgtccatgtatggatgactaatataaagatctctctgaagtatgctcatgtcacttccatatcttgagtttctccaaggtttttgccatgccggagacatctctggggctctttccagatgtaggcgcctcctatttcctgtcacggctccctggattttttggtaacaacattaagtcatttgtttttgcatgtccacaaaagttcgagccaatctcggtatctcatccttcatgtcttcttcttcatcccaggagagtatgttggccttacaggagctaggttagatggcgctgaattgcttgcgtgtggtcttgcaactcattttgttccttcaacg

SEQ ID NO: 160925 - DNA, 381 bp, Arabidopsis thaliana landsberg
acagtagcgatggtggtgggattgacggtaacaatggtgatgatgataacgattatagtggtgataacggtaaaaatgacggtggtagtggcggcaatacgattgtagtggcgacaatacggttatagcagtgagctagtgatagggataatgatgacttggtagtaaaaatattactgtaataatataggtgatagttatattataaattttattatgtataatattttttttgttagaatagaatagaaagtacatatagaaaatagaagtaagagacattaagagagagagagagggagagagagagtgagagagagggagagagagagagtaagagagagagggagagagggagggagagagagagggagagaggga

SEQ ID NO: 160926 - DNA, 1258 bp, Arabidopsis thaliana landsberg
acgtcgttgttgagcgtttcggtgacggagaaatgcttgaagcttctggagattttagcatctacaaaggaagggagatcggaaatttgcggcggagatggcgagtgtttgaagacggtggtcaagaagctgatgaaagtgtcaacggcggcgacggagcacgccgtgacggtgctgtggagtgtttcttatctattcaaagaagataaagctttggaagctgttacaagtgttaacggagttacgaagatactgttacttttacagagtaattgctcgcttaccgttaggcatatgctaacggatcttcttaaggtgttcaaggtgaactcaagatcttgcctttcggtatacgaaaccaaaacgacacatattatgccgttttgattatcccccctccgtattaacttctttagggattattacttgttggtaaaaaaaattcaagttgtaaggaaagagattttttggaaggtgaatggaattgttatcacggccaatgccattagaactttgagaataaattgcaatgttctttagtactagtatcattgcaatgttgatactctaaaccagaattttatgtttggacttggcaaaatcgtattaaaagtaaagctatcaatatgctctatcaagggagatgttgtctttgtatctaaaacaaactgaatcttgattgattgagcagtcaaaaacaaaattggatttaaaagattacaagaagtggatttggcatttggaggaacgttaggataaggaaggaggtctttggtgagttgcaatttcttgtcaacatcaaccttagtaccaatttccactttcattacttgaagaaattcactttccgacagaacagcctcacttgttcgacttctctaagattccctctacacccgtataactccaacaccttcaacgtatttccatcaatgctatacccacaagtacttacacactgaaaaccctgaaacaacggatagaaaagaaaagaacacacagtaagtgaaactccgagattaaatttataattgagaaagagaaaaagagatcatattatacatacaaaccttgaggatcaaagtttctagattgggagagctttttatcagagtccaaagaactttccaaccttttttcgtcttagactcaaacgatagtttaacaaggtttttaaacaagggaaattcattactacgccaataatcgaagcaatgacgcatcatctacaacacacaagcaaactggtcatgaatga

SEQ ID NO: 160927 - DNA, 1637 bp, Arabidopsis thaliana landsberg
caaagcttacataatttccccaccaccatacgtctacatttctccaccaccagcatactactttccttcaccaaaggttaactacaagtctccaccgccaccatacgtctacagctctccaccaccaccatactacagtccatctccaaagggtgactacaagtctccaccacccccatacgtctacagttccccacccccaccatactactctccttctccaaaggttgactacaagtctccaccaccaccatacgtctacagctccccaccaccaccatactacagtccaactccaaaggttgactacaagtccccaccacccccatacgtctacagctccccacccccaccatactacagtccatctccaaaggttgactacaagtctccaccacccccatacgtctacagctccccacccccaccatactactctccttcaccaaaggttaactacaagtctccaccaccaccatacgtctacggctctccaccaccaccatactacagtccatctccaaaggttgactacaagtccccaccacccccatacgtctacagttccccacccccaccatactactctccttctccaaaggttgactacaagtctccaccaccaccatacgtctacagctccccaccaccaccatactacagtccaactccaaaggttgactacaagtccccaccacccccatacgtctacagctccccacccccaccatactactctccttctccaaaggttgactacaagtccccaccaccaccatatgtctacagttctccacccccaccgtactactctccatctccaaaggttgactacaagtccccaccaccaccgtacgtctacaactccccacccccaccatactactctccttcgccaaaggttgactacaaatctcccccaccaccgtacgtctacagttccccacccccaccatactactctccttcgccaaaggttgaatacaagtctcccccaccaccgtacgtctacaattctccacctccaccatactactctccttctcctaaggtagagtacaagtccccaccaccaccatatgtctacagctctccacccccacctgtactactcaccatctccaaaagtttactacaagtccccaccaccaccatacgtctacagctccccacccccaccatactactctccatctccaaaggttgactacaagtctccaccaccaccatacgtctacagctcaccaccaccaccattctacagtccatctccaaaggttgactacaagtccccaccacccccatacgtctacagctccccacccccaccatactactctccttctccaaaggttgactacaagcctccaccaccaccatacgtctacagctccccaccaccaccatactacagtccatctccaaaggttgactacaagtctccaccacccccatacgtctacagcttcccaccctcaccatactacagtccatctccaaaggttgactacaagcctccaccacccgcatacgtctacagctctccacccccaccatactactctccttcaccaaaggttaactataagtctcccccaccaccatatgtctactacatgccatactatcgaatttga

SEQ ID NO: 160928 - DNA, 1214 bp, Arabidopsis thaliana landsberg
ctacttctcgtagaaccgtaaccatgacgggttcacccaacgcatcaacacattaatctcagtcacccaagtctccgttccactcgactcacccatccggttccccgaccacttgctcatgaatatctccaaaactgccagaccgttggtccgacaaacaatactcttcccataaggactttttccgaccgttccgattgtacggcttgctaaatcatcgagtaaaattcctcggcctagtcctagtcctggccaggggtattacaatatctatctaatgaagcaagtactccgatgtctaatctccaaaaagaagaagtctgggagagaaagaatacaaaagaatgattgcgtggttgatttatcatggtatagtacaggaatgagtctaaaaggttcttgaatattagcttgattgatgagacccaacgatgaaagcctgttggatatagttgtggaacttaggtatggaatttagaatgttatgtaggcctgcggagaattaaatggtggttaggatttgattagacctgctaggcatatggatttggttagaatgatcaaggcaataggctagagaacgttgggagttcctgcgttttcaaacctcttccacgggtttggcttttatgttttgcttgagggcaagcataagctaagtctagggaattgatatacctcgattttcactgcttttagttgtgatataggtatagtttttacagtctttctgttatttctagagtcttctatagattttttatggtctttacatatttgggatacatttggagactatggatcattttggagcaaaatagacaacttatgctgtagaagcaatctacacaccaaaaccgcgtagatatcgatcgacaccacccctggtgtggagcgacaccaatatctgacgggaattcaatctcgccacttattgaagttttgaagatttccaaattcgccgcaaaatgtttccttattttcaaagatgttcttgcatgtttttaggaacttatatgtagatttttaaggtcattgtttagacctaaccctgaataacttttgataacttttatttaccctttattttactttgttcttgagagccaaaaccttgtggagcttcttctagagaagatctttctaaactctattctcttattgtttcttacattgatatctactttaatcatgttttgttctttgataatcat

SEQ ID NO: 160929 - DNA, 244 bp, Arabidopsis thaliana landsberg
cccaggaattgctagcagagagaaagacaaaaagaaaaacagggatcacctgagagatcgatcaaatggtttcagcagacgatggagatggaaaacgcaaggggatgaagaagaagaagaagaagaagaagatcgatttcgccttgtatcaaacgaagatacctcagagcaaagaaacaaacgtatacttcctttccaaaaatctcaatggccattttcggtaaaataccctgccaaaagttaa

SEQ ID NO: 160930 - DNA, 583 bp, Arabidopsis thaliana landsberg
attttcatctacattttcaaagaaaaatcataatctgttcgaatatgagccaatacagtcaaaaccaatatgcaggtttgtttgttttttgagtccctacaaattaagcatcatgatcatgtatcatcgttcatcaatctcgtcatacatcatatttctagagttttatggtaacaaaactaatgtcaaatatgtataattaggagcttatcctacgccgccagtgtctaccggtccatacgtggcaccgccaccgctcggttacccaacgaacgacacgactcatgctacggtggctcctgtcgagacaaagtctaaaggtgaagctgctgatggattcttgaaaggctggttagtctctcttttttcttttctttttttccaatcctttggaaaattttaggacaatttgttattgtggctcaacgtaaccgggaccgcacgtttgataagttattgtttttttttttgttaaatgcagtcttgcgaccatgttggcctgttgcgtcctcgacgcatgcattttctgagttcggaggaagcagtcgattgtttattaaatttgacacttcatgcaaatatt

SEQ ID NO: 160931 - DNA, 641 bp, Arabidopsis thaliana landsberg
  unsure (1)..(641): unsure at all n locations
gtacacctctgttgtatgcgaactcgatcaaaaggcaatcagaacctccttttcaacgacaatatcgaccgcatagctcgtgaaatcagagaaatgagaaacacagtcaaccttgtacctcaacaaccactcaaaatggctgaagaacagaatcaacaaaatggccctaccaacattggtgttgggaaaataagtctcaaccttggaaagcatatcaagttgcagtttggcatcaacaaaactccacaagggtcaacagaggatggaaaaacctctgaaaatgatagagtgatctcaggagaaggatatgagactgaaagagtgaaagaacttaaaagaggtctgataagcaagatgaaactatagagaagctagcccacaatgttgaggaacttaaaagtnnnnnnnnnnnnnnnnnnaagtaagctcaacctaaaggcaggattgacactatcccgagaaagaagttcacttcaagatggtctgaaaagatagattaccctccagaagagaaagaagcatattttgaagagaggggaattgagtattcttctgcagacctctccagggaggacgttgagtatgatgatgatatcagagaggactatgcagaccctctctatcattcattttcttcttga

SEQ ID NO: 160932 - DNA, 282 bp, Arabidopsis thaliana landsberg
  unsure (1)..(282): unsure at all n locations
ctctatcgatctaccagattctttnnnnnnnnnnnnnnnnnnnnnnnnnnnnnnnnnnntggaaggatttaatcggataaaagagaagagactgaatcaccacgggagaagagatcggtaaatcggaaaatcggagatgatggggatttctttcgccgccaaactccgtttccgatctcgatttcgaacttcttcaatcgattcttattgcttcgctcgtgaggctttctccgattgtatctcctccgtccatttcttcttcttataacctttatctttgta

SEQ ID NO: 160933 - DNA, 486 bp, Arabidopsis thaliana landsberg
caacaggttttgagacgtaattgagattttcatgggtcgaaatagtacattgatgcagccgatgactaaggaagtcccctggtatctggtatgtctgttggactttgattggagtgtattactttctaaagtcatttacaaaatatgatattggttgcctataggacgacgggacaggtcatgtgaatgtagatgtatctcaaggtgaattaggcttggcgttgacggttggtagtgatgtatttgaaaaggcagagccggtatcgcttgttcaaggagcgttgggttatcttaaaggctttaaggtcttttcttttcctttcctaccacttttcattgatttgcttttgttttgacaatgcttatacattgtggcaccattgttgtctatagatacttggagtaagacacgttgagcgtgttgtcccaattggtacaccgcttacagttgttggtgaggtatgtcttttatctgttagcggtcca

SEQ ID NO: 160934 - DNA, 253 bp, Arabidopsis thaliana landsberg
gcaatgcgtcttttcgtgggtggaccagtgtggactgcttataatcgcccacatgaccatcttcctgcaaggtacaatgatgccttgttctcccatattgtctcgacaaagcttactagatctgtagttatatatctaagcaaagaggcgacaaaagtgtttatgtatattcaaacggctattttataggaaagcgtatatgaaaaaattcttgaaggtgattggggaccgtaacatagacgcttcagcgtaa

SEQ ID NO: 160935 - DNA, 700 bp, Arabidopsis thaliana landsberg
gttccatttctaaatacatgttagcgatgttaactttcaggtttgatgccattgtttcagcagatgcctttgagaatttgaaaccagctccagatattttcctggctgctgcaaagatcttaggtgtgcctaccagcgaggtaatagtcaaaacttcatgtaatatcgtatcgagatgaggctttattgaaagattttcacaaacccacaccttttatgaaatcatagatgaaatagaaaaatatcgatggctatccatttgtagtcactaggaagtctcatgaatagagaacaaagcatgccttagagaactctatatttgaatatacttgttattgtgccaacaatataattagcggtatatatgcgcattcttgaagctgaaaatcaagtaaagtatacgtttacttcatctgctagacttacagatcttatttacttgtttttcagtaaagctacttcagaagtggtttcttttgtacaattttgtagtgtgttgttattgaagatgcgcttgctggagtccaagccgcacaagctgcgaacatgaggtacattacttgtgtgacagaatgtgcatgttaattttttttatttcgaatacagacaatttgatttgatacaaagaacttcaagatgtcactgcaaagtctgtagaattttaagattagtgttttatgtcaaatttatccgtgtgcgc

SEQ ID NO: 160936 - DNA, 1348 bp, Arabidopsis thaliana landsberg
tttgagaaatctctgtgtctctctcccttttggtacaggagttatgaacatgaatttttcgttttgttcaacatcttctgagttatcatatccaagtgagaatgttctgagattttctgttgcaagtcggctgttttctcctaaatggaagaaaagtttcattagtttaccttgtcgtagtaaaactacgaggaaggttttggcgtcaagccgttatgtgccagggaaattggaagatttgtcggttgttaagaagagtttaccgagaagagaacctgtggagaagcttggttttgtgaggactctgctgattgataattatgatagttatacattcaatatatatcaggctctgagtactattaatggaggtaacttcttagcatctatctttctcttttgtttgtctctatatatgcattctatgtcttattcaaactctttatttgtatgatgtgtagtgctttctgtcgttattcggaatgatgagtggacgtgggaagaagcttaccattacttatatgaagatgttgcttttgataatattgttatatcgcctggacctggttcgccgatgtgtccagctgatataggtatcagcaagttaatctagtttttgttgaaagtttgtatgatttctcattcttcacttttgctctgcaggaatatgtcttcgtcttttgcttgaatgccgtgatatcccaattctaggcgtctgccttggccaccaggtaatattatcttcataaagatggctgcacttcatttgtttagtgcttcgtcttagttctctgtaaaaaacaacatgttttggcaggcactaggttatgtccatggagctcatgtggtgcatgccccggaaccagtccatggacggttgaggtattgaaaaatgtgattagtatgcaggaatttttctaatgctctctctggggcttataataatcaccttcttttttgaatttttgtcaactgaaacaagtctttaagttgtttatatttggtcatatctcctccatttctcatttctaagtgtctgctagatactgtactcaccatttccatctacttcttgtagtgggattgaacatgatgggaacatatcgctttctgatattccatccgggagaaactctgattttaaggcaggtcatctacttttttatatttaacattcattgatcttctcagatacagagaacaagattttgttgcgccattctgcaggttgttagataccattcactgatcatagataaggaatcactaccaaaggaacttgtgccactcgcgtggacgatttatgatgacactggctctatctctgagaagaattcctgtgttcctg

SEQ ID NO: 160937 - DNA, 1173 bp, Arabidopsis thaliana landsberg
attgtttcgggaggcggctaggaccacgtcttcttggtaggatagatgattcagaggtgagtgattgcttcttttcaggtgtttgaattatgatctaaaactctctgtatcagtatgtttaagtccggatttcttttcttttcacacgttctgttgcagcagagactagttagagatttttacaaaattctaaatgaagtaagcactcaagaaattccagatggtttaaagcttccagagtcttttagtcaactggtttcggatatgaagaataaccactatgatgcaaaaacatttgctcttgtgctgcgagccatggtacgctttgtctaatctgaaattatttctgatcctacatattatatacttgcatcaaaaggacatttgtttttgtttagttagaaaatattttgcatctatctgtggctcttgcaattgtcaagttggtttcttttcttttttatttgcatttggaagagatctttgttaattcttgttgctctctaaagtgagccatatcaatgggaagattatcatatgtgatatatctctatcttgtcttcaacagatggagaagtttgaacgtgatatgagggaatcgaaatttgcagaacttatgaacaagcactttgcagcaagttccattcccaaaggcattcattgtctctctctaagactgacagatgaatattcctccaatgctcatgctcgaagacagcttccttcaccagagtttctccctgttctttcagataatgcttaccaccactttattttgtccacggacaatattttggctgcctcagttgtggtctcatccgctgttcagtcatcttcaaaacccgagaaaattgtctttcacatcattacagacaagaaaacctatgcgggtatgcattcatggtttgcgcttaattctgttgcaccagcaattgttgaggttaaaggtgttcatcagtttgactggttgacgagagagaatgttccggttttggaagctgtggaaagccataatggtgtcagggactattatcatgggaatcatgtcgctggggcaaacctcaccgaaacaactcctcgaacatttgcttcaaaattgcagtctagaagtccaaaatacatatctttgctcaaccaatctagaatatatataccagaggtaaatctttatcc

SEQ ID NO: 160938 - DNA, 2670 bp, Arabidopsis thaliana landsberg
  unsure (1)..(2670): unsure at all n locations
cgcgtggtggctgttaaatgatgggtaaaatctagtttgatggaggttgtgtttggcactatgcttgttagtttcttgcatcaagttccccgttttacagcttttggcatcttttctgcaggggaaatctgtgaaacatgaagctcccggagagatgatatgtaattttttgtgatagacaaggcaaagcttttcttacctctccaatgggtaagagttggagcttattcagttatgtttctggatcctatgtctgtgaagctccgactatatctgcttgaccaatattcttttgagggaaaagtttacatctactgggggagttcatggacttgcgacctacttaaacgctgaaggatgctttccgagtaatggtaaaaggggatggtgcattcagtatgtagtagacataggatttatgaatcaagatagtagtactcaagttttgtggatcaaaatttaaaactaatgcttctgaaacagtgaaacagatggtctattatgtgttgatgataaacggctattctcgtagacaatagagaagcttgatccacatgaaaggttgttggtggccaaagtcgatttgtgtgaccgcacctttatcaaacaatgaacataaagaagtgtcagaatgttaagagtaatttctggaaaagggatggaacattctattcactccaaatgttagagtagcattgcacaactctaatgtctttgacacaatcagcaaaactgcatataattcaccagagtatcggaaaaataaccacaagattatatgacacttcaccatttcacggggactcgcattgtaaacaacgtagagttaaagacaattgtattcaattcaatatgaatatatccaatgttctcaaatgctactcggaaattcggaatcattgtaagttttgttaactgtattttctctagataatacaacatacaagaatataaaagaaggaacaaaatagaaattgatttgaaaaaatatttatactatatccacaattctttctttttaggtagttaactactaaaactataaccgaattgccatgcaaagcaaagtatgcgagaaccacaactaccactcccaagtttctcatcttctggattttacgtttcataattgatactctgtttcttagctcgataaaccagagaatacgaagatcgatctctctattcctctcgattctccgttctttctattccgtaagtcatcatcatcacgtctcacacgatttcaatgtttttcgtatttctattcttctcgatttgaatgcataactggttattctatagaagatattgttttggtttctttggtatcagattgaaagcgaagatgacgatgaggcttttggatctgttcataacctcatcgataccagttgcgaagattctgttgataacaggaattggattttacttggctcttgatcaagttaacattctcaatcacgatgcaagaaaacaactcaacaatgtcagtgttttccgtcacatgcatagccattcaccaattttggttaatttattctcttatgagttttggtttctacagatagttttctatgtgtttagtccttctcttgttgcaagcagtttatctgagactattacatacgaaagcatggtgaaaatgtaagtgtttttgattcaaagaactgattcttcttgaaaatgaaatgttgattttgttggggtcattttcaggtggttcatgccacttaatgttttgctaacattcatcattggttcgtttttgggttggattgttatcaaaatcactaaacctccttcgcatctccgtggcatcatcgttggttgttgtgctgctggtaactttaatatcatcttacaaaagctgttttcattttcttagattcagtgatgagattgtgtaatccaacagggaatttggggaatatgccactcattatcatcccagctatatgtaatgaaaagggaagtccttttggagatcctgagtcttgtgagaaatttggacttggttatattgcactctctatggcggtatgtcaccatttcttaactacttcttatgcttctctactaaagtttttttttaatgccaatacaagtcaaaaacgttttgtgatgtatatcagattggagccatttacatatggacttatgtatacaatcttatgcggatgctagcaaatcctgctggagaaaccgcaataaacagtacctcgtctacaatgccggggatttgtcccaaagtcgaagttgcggagcaggtattagtctaaacttttccttcttatattcttgttagccaacttactgattttgagagaatgtatatgtgacaaggttgggacttggggcaaggtcaaacaaagagtgtgctctgtagcagagaaaatcaatctacgaacaatatttgctccttcaactattgcagcggtttgtttcaatgttcccttgaactaaacgactgctatctagcttctgtatgttcttactagttaagcaactaatcctctttctcttcagcttatcgcgcttgcggttgggttaaatcctttactacggaagctactagtcggtaacacagctccacttcgagtgattgaggactcagtatctctattggggtattctacaacatattananatctcacttgtcagtgata

SEQ ID NO: 160939 - DNA, 1348 bp, Arabidopsis thaliana landsberg
gcggcgggtgttcttcattgccgacagctatgaatatattgatgtttgaggcgatgatgacactgaggggcgggggacattgatgttatcagtctctcctttgcctctcctcctcgttgcttctctccctggaggtaatttatacttgtcagctccaatctttcaaacaaaaattgaatccttaagtaaccattagtgagaaacaatgcaattagttatttcattaactatgtcaatgatctgtggctttgtgacacttgttgaagtcaaaatatttctctgcctgtaaatgaattggatcaagtctgttgtgacaagaaccctgttttgtaagtttacatgagtatgctaattcatgtctctattggcagccgaaactgtaagatctgtgtttggacccgttgtggagattgtaaaatccttgaatctacctgattggcttgttcattggggacatccagggaacatggtatgattgattacttactagcttccttctccataccaatttcatgcttctttaacttttgcctcatctgcaagattccacaagctgtgtactaaagccagttcctttagaacttgttcttgttttgttatgaatattcatctgtatttgtgtgtgatgggttggatttgtcatatgttttctctcaggcagtggtactttttgctatgggtggctatggaacatacctaggcttccggattcgttattctgatgacattgtaagactatttacccaaataatctgactatagtagtacaagaagcgttgttgtttaaactgatttcttcatttgccttgaaattttcaggaggagaaggcaaaggcaaaagacctgcacccaaagcttctagccggaatgtttttctttttcgcccttggagcaactggtggtgttatatcccttcttacttccgacaaacccatcttcgaaaggtatatttttctgacctagtaaactctcatttactgattccaaacttgtacaaacaacacttatgctatctagaagatctcttttaacttagtaatgagatatcaattgggcgactgatatggttgcgaatttgtgcaatgtagtccgcacgctgttacaggacttataggtcttggcctattgacggttcaaacaatcttaccatctttgttcaaggtaaagtacttgcacgatcttgcaatgtgaagccttgatgatttattaagttataggatcaagaaactcgttgaatgtgcaggagaaacccgaactgaggaacgtgcacgggatccttgggagcgggataatggcgcttttcctcgtccatgctgctttcggccttcagctcggtctcagtttctaa

SEQ ID NO: 160940 - DNA, 623 bp, Arabidopsis thaliana landsberg
ttccagaaagcatatgtgaaagcattaggaaaaggcttctctggtgcaccttttaataccttcacaatccagtataagggtggaacaaatggaggctacaatctttgcaagtttttttttagactttcatcacactctggaattgaatagggtgcttttatcaaatgcgattagttgttgcattgtacactttgtaaaaatttcctttgcagtgtctttttcatttccttttaagaaaaggtttttgcaagtatagtgtataaatagacagtagcgatataattttgagacgcttgaattgttttctttagacatctgaaatgtctgtcgattcacaggagaagacaaagaaatgcaacggagaatggaagtttgccctattggagttggctgattctcattatgctgcaatctgtattgaagatgatcaagctagtggaggtgcagttacagttgacataggtcctatgagggtaattgttcatttagtggtttcttcatcacaactttgtccttcttgcaggagctcctatgagggtaattgttcggaaaaccatcccgtttgttgaagatgaacttatttctgagaacaaaaatctttagtgcagtgtagcctttaagtt

SEQ ID NO: 160941 - DNA, 870 bp, Arabidopsis thaliana landsberg
  unsure (1)..(870): unsure at all n locations
tgcgtacagccaccgagtttcgatctggctacaaacttggtgttttgctttcgaaaccctttgtcttcagttattttggaatctctgcttcactttgtatttggaggtcagattctgtgaggccataggaaaagtattgtggtttctttttcacttattatggctgcattatacattcaggaaaacggaaacatgagagctgcacttagtacctcagatgttatcgaggtgagctatacttaactattttgagatccagctataccaaaagagtgctgatattgatgttttctctgaaacgtttgtgttttttcctgaacaatcacagctcccaacccaggaccagcttaaaacagtgttcgacaaagttaaagactattttggggatgcaaaagagtcattcggaaagctatcagcgctgaatcccgggactgacgaaaaaactgaagaaacctcggatgagaaagccaagtaagtataaacaggtaccgaatgtgtcttcttttcattttcactagaatttttgtgtttttccccaaaatgatatacaaccgttttacagggcctgaggctgaacaattgacacttggttggttgattttgatgtctcaaccgtctcggtatgggnnnnnnnnnnnnnnnnnnnnnnnnnnnnnnnnnnnnnnnnnnnnntgcacattttctctatacatctctcacagaaacagcttctgttaaatctcttgtaacatataacttattgtgtattgtagatttgttgaaagaaagagtcgttggttacaacttgcaagttcaaattttcttagacaaacaatagtagtcgaaaaatggaaacatcccaatttatatttcgaagaagaccttaactaa

SEQ ID NO: 160942 - DNA, 813 bp, Arabidopsis thaliana landsberg
ccctggcattgcattacacgtgtaacaccggcgactacttcttcagtcccggccttgaagaattgttcgagcagtttcagctggcactactcgcgaggcccaccacccgcaccgagatcagcaatagacgcattgccaactatcaagatcgcgcagaggcatcttaggtcatcggactcgaattgtcccgtgtgcaaagacgaattcgaactgaaatcagaagcgaaacagcatgccgtgtcaccacatctatcattctgactgcattgtcccgtggctggttcagcacaactcttgcccggtctgtcgccaagagctaccatcagctagcggaccttcaagcagtcaaaacagaaccacccctaccagaaactacagaagcagtagtagtagtagtagtagtaacagtcgtgagaacgggaatgaaagaaggaatcctttctcttccttctggccattccgttcgtcaggttcaagctcaagctccactcaaaaccgtggaggcacaagaaactcggatacaagcgatgagaaccataactaccatcaacagcaacatcaacaatcatatatgggttacagtggctggccttttgattactaaaggttaatctaactcttgactctttttaagccttctgtttcactttggttctgtgtattttgtttgtgttttgtcatgtctctctttcccttactttgttcattgtttattgtagatcttctgtttctctggtttatcaactttatgtttttattttgaattgtgtatctcacacatgttagcttgttattgaatttgcattgaataaa

SEQ ID NO: 160943 - DNA, 345 bp, Arabidopsis thaliana landsberg
aacaatttgaagaaattttgtttctcaaacaaatgaagcaattgaaggtaataaattttgcgagggatatatttgcagtttgaagtgaaactaatagttggtgttaattttcatgaatatgaccactttgtttcaaaaaagaatcctatagacaaggatctgttacatatttttgatcttgtgaacaaagggtataaaatgagcaagaaagattggagtcaaggatggattgaagtggaacaagtacatgaaggtagaattgatcatgttatgaaacctgcaattgaaacacttgtgtattacagctgaaaaaagaaatcaatggcctttggtgagaaaataggt

SEQ ID NO: 160944 - DNA, 1562 bp, Arabidopsis thaliana landsberg
  unsure (1)..(1562): unsure at all n locations
gaagctaaagattgtctctttttgtttaggcaaagtatcagtttttgtttttgagagaattgaaaaagcagatcctttaacaatttcccgattcattgtttctatttgccgttaatagcaacaaaagcaatcacgtcaatagtttttactgtataaagtttttgcaaattttggtaagtcatgtatgcattttgtatcctagtgtgttaaaaagttacatcctttagaggtatgcatttaccaatgactttcacgaaaccaaaaggattcagctttttacttgggtctgataaaaaatatttctgtatttggggttatgcaggatggtgtttttcccgctgtgggcttttcatgcagttgttgcaaggggcagattctctcttcctgctcctgttgctccacgtaaccgtcatgtatgtcccttttcactttcttacctcttttagcaaaatatcactcaatgtcgttcctatgatttgtactgatgtgtttatgatcccgtttggtttacagtgggctccttgccatgctgttgtcgcgacaccgttacttgtagcatttgaattacttctctgtatatacctcgagagttcttatggtaaatatcctgtaacctacagattttgcacttcataggttttttgggtgatagttttttactatttggcatgcgaacacactgatttcttcaatactaaatataaacattggctatgattctcaaagtttcttcttgctactgtttgtatttcggataatacggatggttaagttggaggacatctaaaagtagttcttgtgttacaattttcttgattctgtatgaaggtttttctttttgcactttctcccatttcatctgattgtggactgttctatcttaaatgcagctcgttggccaccagctgtcagtttgaagattgctttcttaccattgttggcttttgaattaacaatactggtagacaatttgaggtattgatctatgtgtctcgngaacacacaccaaatgtaaatcatataaatctaaagatcctaatgactgcaagctttatcttcagaatgtgtcgggcactgatgcctggagatgaagagagcgtgaatgatgaagcagtatgggaagctcttcctgtaagtcatactacatttttcaccaacggtcttagctgctgttgaaagtaattggttcagcagcttaagactaggactcttttttctttacttacttaagttgcagttagtttctacctgtgagttatcagtcatatacaaatgataaaccattctctgttttctaataacacgactttgaactctgattctcaagtcatgaattgagacaagttctccttttggtcaatttctgtaactttagcttacacaaagtcaggcttaaaaatcatttctgatctttgttagtgggtgggaagctacttcaaataaaatttacagatgtttttttctttctgcagcatttctgggttgcgatctccatggtgttctttctcgctgctacagtctttaccctccttaagctgtctggtaataatttgccgctgtaa

SEQ ID NO: 160945 - DNA, 1519 bp, Arabidopsis thaliana landsberg
  unsure (1)..(1519): unsure at all n locations
cactgatccagctaaaccagaactaccacttttacatgaatggcacttcagatcaggacttgaccgctacatatggatcattggaatgatatatgcctatttccatcccactgtaactcttgaacctacagccttctcgttttttcatatcttctcatgaaccctaccattaaaatattttttgacattttcatttcaggtagagagatggatggagaaattggaggagtgtgatgccaagagaaagatgtcaataaagacaagcataattgcaatttcctcatttgtgagtttgggttctctctggcttatggttcatcttatgtatttgatattattctgatgcccaagttgttccctatattgttcaggttggttacctttggtatgaatacatatacaagctggacaaggttacgtacaacaaatatcatccctacacatcttggattccaataacgtcagtaccaacaactttgtcttttcttcattttcatggttcatgctaaatcttgagataatatgctttcttgatttatgacctttggttttaaatctggaacagtgtctacatctgtctgcgaaattgcacccaacagctacggagtttttccctgacactctttgcgtaagattctcaatctcttaattccttattgttaccttcttgttcacagtgcacacagctttttgaccatgatctctctctaggtggctgggcaagataactctcgagacctacatttcacagtttcacatctggttaaggttagtgggatctacaaatcgaagcatatgttattataaagaaacttcacaatgtggttagtgaagcctttatggttaacatatgttagtataacaataattctcaatgtggtgcagatcgagtgtgccaaatgggcagccaaagttgctattatcaatcatcccagaatacccaatgctcaacttcatgctcaccacggccatctacgtcttggtaaaaaagcatcggtaaaaccattctatgcttttatcgttttattacttcttacactgtttttttccttcttcattcaggtatctgttcggcttttcgagctaaccaatacattaaaatcagttttcatacccacgaaagacgacaaacggctgctccacaacgtgattgctatggctgcgatatncatttgtttatatattatcggtcttattcttctcttgatcccacattaacttttgtactagtccctgatcccttattgtccagttgcaccattatcaaaaaggatgacgactctgaacaaatgtttccattacagaagagacgtcacaaacctgagaaacacaaagttaaagttagttgcacagagaaaaaagcttttactactatatcaaacgtgcaaacacatataatactactatatacagttaaaaagattgattctatagagaaggacatgcggtactagaaaagtttgcagtttaaggaaaccttaccagatgcgactgttatatatagtacattatctgttta

SEQ ID NO: 160946 - DNA, 774 bp, Arabidopsis thaliana landsberg
tggtcaatcgccggagaaatgtgttttttgtttctccaatgagtttcttttgttaacaaatctgttagacctctagatttcaaccgaatgacattttctgagattgagaaacactgtcaatcgaggactggagtgaacattctccgatgagtgattcagaagaagccgaagaagaagaagaacctagtcaagtcattttaagcagcgtcgttcagaagaagaataagaagaatctgcgtttcggtgaagaagtacagacaccagtcggtttggtgttgttagctcaatctgctccaatggtgagatcgaaatctcaaggaactactcggcgcgtcactcccacgccacctcttgttgacgtggagaaaccgttaccaaacggagatctctacatgggaacgttttccggcgggtttcccaacggatccggtaagtatttgtggaaggatgggtgtatgtacgaaggcgagtggaaacgtggtaaagcgagtggtaaaggcaagttttcgtggccgagtggtgcgacttatgaaggagagttcaaatctgggagaatggaaggatctgggacttttgttggtgttgatggtgatacttatcgtggctcttgggttgctgatcggaaacaaggtcatggtcagaagagatatgccaacggagattactatgaaggtacatggcggcggaatcttcaggatgggagaggaaagatatgtttggatgaatgggaatcagtatacaggagagtggagaaatggtgtgatatgtggtact

SEQ ID NO: 160947 - DNA, 416 bp, Arabidopsis thaliana landsberg
tcagggtgatattcaatcgagtagtataaatggaaacagagaccaattaccttccgagaagcaatgccgctagacaaaagtgaagaaagcctagctttaatcaatgataatttcagggcagagaccttaaggtctagcatggatcacctaaataatgaggtaatactggtttaagggttaaaattttttagttaaaataataggaaatgttaatatcagtgacgtagtttggattggatgataattctgaattacactatctacatgttggttagtagaaagattcgtcattggatcttttatttgtcttctgtacagctagaacggatgaagatgataataattcagacaccaaatttccaggtttagaacaagagctgatacagttgcgtgaggttatagataacttaatgtaa

SEQ ID NO: 160948 - DNA, 2587 bp, Arabidopsis thaliana landsberg
tcaagcatcgagctcagcatcttcatccatctcctctttatactcctcttcatcagctgtagcatcttgatattgctgatactcagccacaagatcgttcatgttactctctgcttcattaaactccatctcgtccattccttcttctgtgtaccaatgcaagaaagcttatctcaacatcaggctgatataaccaatatcttacttcttttacatttgtgaaatggaaccaacccatttttctggaaaaagtgctaaccaaacatttgattaaccgtatcactactactttcatttctatcttctgtttcattatgctgactatttaagctccgttgtcaaatctctaagttagacataaaagacaaagactaatcaattgtcatcacaccagcgtcgtcgagtgagctattaatcgtggattttaagcattaaagaaacattctatagtactaatttcttaagcaaataaaataattataatcaaacactatgcttgacactggtcacgtatactggtagtgaatgattctacatcataagaggccgcatcaaaatcctaaaaataagcataatgaattaatcatttacaaattttattttactcaataagaaaatcgaaagtatgattattatctagctgccacaatcttcgaatttaatatttactcaagaagagaccgactttaatccttgactttctcattgctctatggaaaatgattaaagcagtcaataaaatcttttgacattgttggcagaagaccaataattcgaagtctaaaatgtaatcgtccacacagtgtatgagtatcctagtattttttttcttttccatataagttgaatttgtaatatatatagtgtaatgttgtttatttgtggcaacgtacaaaattgggaatcctataagtgcgacgacaagtgacaagacgaggctatgaacagctaatgtatgaagagagccaaaagagcaacaacctggcacagccgttgttttttttgaatatattgacgattcgttggcctccgagatctaaggcatctctcacaatcaacggtccagattccatctagaagatatattacaccgaccttgttttctctatctaattctcacacacacaccaacgcaaacctccaaaacagggccggggcgattcattcacaatctcggcgattctctcttccgtctcgagtcgctgagatccatcaggttcgtttctattcgaatctattctcttgaatccgtatttgtttcctttcctccctagatagatttcatttttctggaaacattgagatttccattgatttgatgtttagtggtttagatcggataatttttgttgttgactctcaaaaaacgaatcataactatcttaaaactttgtttacgcattgttattgaaggctaaataaaaaatgctcaattgttgctagaaaggaaggtgtctcgaaaacatgtgaatttatttcttgagcctcagtgtttctccctgcaacaatagtgaatgattcaattgaaaagactttttggttaagccatttttctctttaatagattatgtgtttcaactcaattaggaactgtgtgtttttttgtttccttgatgtaacttgtgagttgatttatttgggtagttaacttgtatatatatttggtggtgggtcctggaggaaaatgagtcagagggagctctgttcatacattctatgtttttaaatgattagtatttttctttcatctaatacttgctttttgtgctaggaatttcgatttttgggactaatttatcgagtatatataattggataagtgagtttggtattaatattaagagcaattaggttggttatcttgccaaacagtagacccctgtcgttttcttagtcatttaagaagtaatgcttaagattcaggcctctaatctggttatgatagtgaagaggatctgtaaatttacctatacgacctgttgaaaaggacctctggtgtttgttactatgcgtttctgatcaatatagacatagttggatcatattcttctcttgatcgtctgtttcattttttttcaaaatcagtaaaaggtctgcaaaatggttgctcagggattcactgtggatcttaaaaagccccttgtatttcaggtaattactgtttcccagggttttaaatagtttatgtcaacattttccttgagaccatagtcacccaagattgtcttcgtttctttcttagagctaatcaaagtaacgctctctctttaacccctcctgccattgctttggatgttttacaggttggtcatgttgctgtttactatgaggaatgggcccaccaacctatggcgaccaaggaaggccctcggtatcttgagagcgactcttgggcggtatatattttatatgcatcttttgtgattcttcacgctcattctcaatactaagcggtgtcaatgagactctgaccttcactctgtgacgtattggcaatgaaccagttcttgacacttacagtttggcgaggagactctgtcattggattgcctgacaaggaatcactccttaggctgtcaggatgcat

SEQ ID NO: 160949 - DNA, 863 bp, Arabidopsis thaliana landsberg
gagccgcaagacttatgccagtaattgatagcataatagctggagctgatcaggtttggtcttcagattcttaatggtgttgcaatggcttttggttcaacataccttctatgccttacttgtataacttcatctgaatttctgttttgtagtttaagtggccacctttcttgttgggatgtaccattctggtgatccttttagtaatgaagcatgtggtatgagccttgttcttcagtgtgtcagtaggatacttcttatgttcccttacttttattatgctaaggcatcattttctgcggcagggaaaagcaaagaaggaacttcagttcatacgagcagcaggaccgctcacaggtcttgctcttggtacaatcattgcaaaagtgttccatccaccttccatcacactggtcagattgctaaagaatgaaattcttatatttttccctattgaagctacattttttgtgagtgttttccgtaattgattgcaaagtttttaggatttctcaggtgggagatatacctcagggacttccaaagttttctttcccaaaaagttttgatcatgccaaattactgcttccaacatcggctctcattactggtgttgccatcttggtgagacatcattgtcattaactttttcctggacttacgtgagttgcagctgaacctaatcatgagaatctgtaaatggatggatatggctgagacatggagtaatttgacttcctgagaagcagaagtggagtttcttgattagtttcagctgcagtatgcgcatgtttttgtgttttctgatatgctagttcgacttatccaggaatctgtaggtattgcgaaagcactagccgcga

SEQ ID NO: 160950 - DNA, 458 bp, Arabidopsis thaliana landsberg
  unsure (1)..(458): unsure at all n locations
atgctcgagcttttaaccggaagaaaaccattcgacaggtacttttacaatccatatccctcgccttcctaaaaaaacttaagagtgatgcaaatgtgtnnnnnnnnnnnnnnnnnnnnnnnnnnngttgtgtgtgacagcacaaggtcaagatcggaacaatcattggtaagatgggcaacacctcagcttcacgacattgatgctttgggcaaaatggttgatccagctctcaaagggctatacccggttaaatccctctcccgatttgcagatgttatcgccctttgcgtccaggtaatcatctatatattataatgtgatgatctgaacaaatgaaatctgaatgtatattgttcttttaatctggtacagcccgagccagagtttagaccacccatgtctgaagtggtgcaagcattggtttgattggggcanagagctaacatgagcaagag

SEQ ID NO: 160951 - DNA, 678 bp, Arabidopsis thaliana landsberg
  unsure (1)..(678): unsure at all n locations
acagagacagcagaagcacgtcaaacaaattcaagagcaggcacaaaacgaaaaaatgattctgttgataacgagaagtcgaaactagcaaaaagtagttttgacatgtctacaagtggtgctttacaaccttgtagcaaagaaaaggaaatggaggcccaaactaaggaattgtgggacctgaaggatgatctgaaaaaatatgtaacatcagctgagttgcgggaaatgcttgaagtaaatgaacaaagtacaagaggatctgaacttgatctgcgtgataaatggtaaattactttgcgaatctgtctggaagttaattgcttgtcttttgttctatttctgttactgttgtgtggatcttcttaaaggtaatttggattagagaaaccgatgcataatcatatgcctaacctctctatttgtttctatttagtgctgatggcatgatgtttggcccactcgctctctgcccaatgtagggtggggctctctccttcttcgcagagctgcaccgatcccatggatacatctcagaatggnnnnnnnnnnnnnnnnnnnnnnnnnnnnnnnnnngcatcaaagggaagtggaaaatccctgacgaaacagaaaaccaattccttaaaaagaaaaaccagtctttttgtagagttgatattggaatggattaggtta

SEQ ID NO: 160952 - DNA, 728 bp, Arabidopsis thaliana landsberg
tgagacacccgagccacaaccatccattacgcggtcacaaagcccaagttgaagatgagatcatctgctctggttgcgacctagacctactcggtgcatatttcaagtgcacaaagtcagagtgtgattacttcttgcacaagtcatgtttcgatctcccacgtgagatccgtcacaagtctcaccctgatcaccctttgatcctcctctattccccacagaataataattcaacgtatacttgtgacgcatgcggtgagtatggatcggggttcacttacaattgttctatctgccagtacgatgttcatgttggatgtgtgtctgtgcctgagaccatgaagcatgatgagcacgttcacccgctcgctttgatctacaaggctccatgcccaaaggatcatatatttacctgtgatgtttgcgatgaaactatgccgcataatctgtggttgtactactgccagaaatgtgactacggtgctcatttacattcatgcgttgctgaagaagaggaaaagtcaaagaaaggaggaagaggaagaggaggagaaggaggaagtggtggaaatggagtgaacagaggaaggagctccgcgaattcagagctagctgcaatgttaaaggcacaaagagagatggagcagatgcaaattgctcttcacttggagatgcaaagagctaagattgataagaaatcaagaaagcatatgcttaaaatgatctaa

SEQ ID NO: 160953 - DNA, 6178 bp, Arabidopsis thaliana landsberg
  unsure (1)..(6178): unsure at all n locations
atgaaacttgtttccttggatcatggagatgagaccactcttgttctcaaagtagttgttctgaactggtgtggcactatcccttgtctttgggatgattccttgggtatcaccactaccaatgtttcttggtttatcaacattaggtgggtctggaacatcaactggtctgttttgttgatccatagcagctgttctttgttgatcacatgctgcctttgctttggtttcttgtaactcacgagctattctgtcaattctgtctttgaataatagtaggtgtgtnnnnnnnnnnnnnnnnntttgcatgcacaaagattagtacctgtaccacaaaacaagcagacgaaatgatgagttagtaacttgataaatgtaaaagaacttgatcttaaaagtttctgatatcttgaatgcaacaatacaacaatgaattggcaacatcgccaaattgataagcaggttttttatgcctacttatgtgcttcatgtgtgtgattcagttcaattcccctaatacacacacatgtcgatgcagctatagggggtgtcaatccagtccactgtaatgatggtgtaaagaaactactaagtcaagccagattataatgatggtgggtttctagtaacaatcgtaggtcaggattcaaacaagtaaaaataagaacttaagagccctattcgatcattgggtcgagtagaaccaacaagtgacaaaattaagaaacctaaatgcaatcaacaggggatataaataggggatacaaataacaggtaaagaaaagtgcaatcaacaggggatacaaataaatctaatagaagttctaaggatggattcattgataagggcaactctaggattcaccaattggctaataggcgaaaggtagatacccatgacgatagattaaaaaaccgcgtcaatccactctcgtgacaaagacccgcataactctacaacttcctaatctcaactctcgttgatgaaacatagcagaacaaggtttaagaaacaatctaccaaagtcaataagcagtctaaacatccaatcccttgggctagaatctacaaatctttggatttcgtagatcagacatccatttgaacgacctgagacctaacatctaactaaggaggctaaaactggcaagataaccaattgcagaaagaattaagcgaatccagaagggtataaatctaaacactaaccacctaactaacctagagattaccctaatctaatccatcctcaagaaccctaatcactactcatgcaacattctcaagaacacaaaccaagaaatcctaaaatcataccaaaatatagatctaaacaagctaaacaactttacttaaacaatgaaatgcaaaaacgaaatagattaagagtaattaaaatttcaagattcataaacacaaagaaaaactgaaagataaaacatagatcttttggacaaaccccaaaacgatctatttatactaaaatgttggaaaccctaaattcactagaagacaagagacttgaggcggtttgggcgagtgcttgatcttggggatcgagtaaggagggtgctgtaaagtctgcgcctttgtgtttatgctccgagtgatcaattggtcgagtagatgtttcttcctctcctatccgtatgctcagatgtctggttgagtggggaatgaggaggatacgaagacgctttgatagatcaacaaatcttgtagagttggtcacccttggtcgagtaaatgggtcgagtagaggaacgagtagaaggggcgagtagatcgatcagctgcttcttatgaggctgccttgatcgaggaagagggtcgagtgaattgctgcctcctctgtggctgtctggatcgagtgagtgggtcgagtagaatgcccagctgctttcctcctggttggatagagtagagggtcgaatagaatccttttaagctccttctgtagctgaaaacacaccaaaacatgcaatgtgtatgcaagatgatcctaaatgcctaagagtgcaaaataagctaaaatggtgcaaaatgatatgatacaatgaccaaatgcaaagctaaatgatgataaatatacacctaaaatgagtaaaatataaggttatctgcgaaggcggatcatattgcataggttcatgtcgagtggatccgcttctcctaaaaggcatgtccggtgggtttgccgtagtagaagaagaatagctgaactagagttggagagcgttaaaattcttgttgagtgctgcgagagccttgtcttgaagtttactccagctttagagaaaaccaaggcgcttgtaaatttctttatagtctttactttgccttggcgcggagtactcctcaaagtaaaactgatgtgttgcgtaagactcgtccataggttctgtctcattatctgaatgatggattggagcctcatcatcattcactccttccatcggcacaacttcatcacatgaagcatagaggttctctactagtggacaaaactcgatgttgccgccatctctaatcgaagtggaagcgggatttgggaggagtaaaatagattgtcatgctgtggggtgatcgaacctatatttatataggtcattcttctgctacgaccaaaaactcttggaattgtgatatgtctataatttgcatgatttaggcattcattcttcaccactttgtcattgtttcatccacatttcatctcattaggagtcgttttagtgtgttttacatacttaggacgattttgcattaggattgcatgtgcatggcatatttggttgttttcaggtactttggatgcttttggagttcaaacagaggaaaaacagaacatgaagtcagaatgtccaatgacgccttcagcaaaagtactctatcgcagcctcggagccctgccagggcaaatcactctatcgcaaccccggagaagcaagcagatcagtttcactcaatcgcgaagccggaggaatcaccccatcagaactactcgatcaccactcgaccaccaggaagcctatctgctcattctgcactcatccagacaagctgagaacaaagaagagaagagaagccgaagaaaccactcgatcaccaccttatgacatccactcgatcgcactcgatcacagggtcgctggaccattcaatctcgacttcactgcatctcactcgatcgcaagacggagcccctgaagcccagtttgatcaatgacatactcgatcactaggaagctcatttctgcccgtcagatgccaatgacatattcgatcgcaggatcatgacgtgaagattcgctatatatttagtttccttatttgtttcatttctcgcttatataaactgcctcttagggttttccctagagcatccgttattatccgctattatccattattatctcgcttttacattttcgcaactttgatagccgcagtgtttctcctgcgactttgtagtttcgcttccattccctggtcgtttcaagaaagttctggttgcaaaatacagagccctcctgtaaaaacacataaaggatatccctatagtggactgtctcgcgctgatacctgacgagcacaagtacgtgaaagacctgatcacagaaaggatcaatgaagtccaaggaatggtgatattaagtcatgagtgtagtgcaattatccaacagaaggtcatacctaggaaattgggagatccaggctcattcactctgccatgctcactaggccctctaacattcacaacatgcttatgcgatctacgtgcttcagtcagtctgatgcctctctcagtagccaagaaacttggttttgataaatataaaacttgcaaaatttcgctaattctagcggacagatccatcaggatacctcatggcctgttggaagacttacctgtcaagataggttctatagaagtacctaccgactttgtggtgctggatatggacgaagagccgaaagacccattaattttgggaagaccagttttagctacagcaggagccatcatcgatgtcaagaaaggaaagatcaacctcaacctcgggaaagatcttcggatgactttcgacatcaccaacatgatgaaaaagcccacaatagagggtaaagttttctggacagaagagacagaattcctaactgacgagcttttagaagaactagcagaggacgaccacttacagagcgccctgaccaaagacagtagagaaaaagacttacatgtggaaactttggataccagaagctgatggatatgagcagggaagtcgatgactcagaagactttgaggagttgagaccactcgaccgcacgaataacccactcgatcacgtcactcgatcgcaaggcgagctacatcactcgatcgcttcactcgatcacgattccatctttgatactgaatcaccacctaacgattggtctgagctcaaggcacccaaggttgacctgaaaccgcttccaaaagggctaaggtatgtttttcttggaatcaattccacctatccagtgatagtgaatgatgaaatagatactgaacaagtgaatttgcttataattgaattgaaaaagtatagaaaaaccataggttattcactagatgacatcaaggggatttcacccactttgtgcactcatagaatccatctagaaaatgaatcatattctagcattgaacctcagaggagattaaatccaaacttgaaagaagttgtaaaaaaagagatacttaaactattagatgcaggtgtaatctaccctatatctgatagcacttggtatctccagttcattgtgttcctataaaaggaggtatgacagttattaaatattctaaagatgaactactacccacaaggaccataacaggacacaggatatgtattgactataagaagcttaatgcagccactaggaaagatctcttccccttacctttcattgaccaaatgctaaaaagattagccaatcacccctattactgttttctagatggttatagcggattttttcaaatccctatccacccaaatgaccaagagaaaactacattcacgtgtccctgtgggacttttgcttataaacgaatgccttttgggctttgtaatgcgcctgccactttccagcgatacatgacttctattttctccgatttgataaaggagatggtagaggtattcatgaatgatttttctgtgtatggctcttctttctcctcctgtttgcttaatctgtgcagggtactcaagagatgcgaagagacaaacctggtgctgaactgggaaaaatgtcacttcatggtcagagaaggaatcgtcttggggcacaaaatatcagaaaatgggatagaagttgatagggcaaaagttgatgtcatggtacagttgcaaccaccaaaaactgtgaaagatatcagaatttttctcggacatgcagggttctacaggagattcatcaaggatttctctaagttggctaggccattcaccaggctgctgtgcaaagaggctgagttcacgtttgatgaagaatgtctggttgctttcagatcgatcaaagaagcactgatctctgccccaatagtccaagcacctaattcggatcacccttttgaaatcatgtgtgatgcttcggattacgctgtaggagcggttttaggacaaaagattgataagaagttgcacgtcatctactactctaacagaacgatggatgacgcaaaagtaaggtatgccattacggagaaagaactattggttgtggtctttgcgttcgaaaagtttaggagctacctggtaggctctaaagtgatagtttacactgatcatgctgctctaaggcacatctatgcaaaaaaagataccaagccaaggttgctgagatggattttgctgctccaagaattcgatatggagatagtggataaaaaggggattgaaaatggtgtagctgatcacttatcgcgaatgagaattgaagatgcaatccctattgacgacaccatgcctgaggaacagcttatggccatctgggaagtgaacaaaaaattcaaaagcaaccagttttgggatgagatgcttgcagtagaggagaaacatccgtggtacgctgattatgtcaactacttggcacgtgaagagcctccgaatctgtga

SEQ ID NO: 160954 - DNA, 3738 bp, Arabidopsis thaliana landsberg
atggtcagtcctactaacgatgcgaaagttgtgctgaaactgttcaagaccataatcctcccgagatttggagttccgagggtagtaatcagtgatggtggaaagcatttcatcaaggttttcgagaacctcctgaagaagcatggagtaaagcacaaggtcgctacaccttatcacccacagacaagcgggcatgttgagatctccaatagggagataaaaacaattatggaaaagactgttgggattacaaggaaagactggtctgcaaagctcgatgacgcagtgtgggcttacatgacagctttcaagacccccattggtacaactcctttcaaccttctctatagaaaatcatgtcacctacctgttgagctcgagtacaaagatatgtgggcggttaaactcctgaactttgacattaaaactacagaggagaagcggttgatccaactcagtgaccttgataagatccgtttagaagcttatgagagctctaaaatctacaaggagagaactaagcttttccatgacaagaagatcatcaccaaggatttccaggttggtgatcaagtgctgctatttaactcgtttgaaactctttcaaggaaagcttaagtctagatggcctggtcccttctgtgtcactgaagtccattcttatggagcagtcacattagctggtaagagtggagatttcacaataaatggtcaaaggctcaagaaatacttagcagatcaaatcctttcagaggtgacttcagttcatctccaggaacttcttgatggttaaaagagtatggtagtcaagctaatgactttaaacaagctcacttgggaggaagtcccatgattatctctgtaaataaatttttctttttttgttatttttgatttgtctaacttgtgtttgtggttctcaggaacaaaggaacaacgtggagatagagtaaaaatttcaaaacttttacattacagaagacctggagatcgagtgtatagcccgatggagtgcaaaattttgaaagttttctgttgcatctggagaccctgaattcaagtacatcagtcgactaaatgtgatgtttaaaacccaaaattgttttaaatcatcactgtactcgaccaaaaggagctatagagacttgtagggattttgccaagcttacagtagatttcctgcagttttcccagtcaacaaagtgtggaccacgcactgaagctaagatggagagagaatgtcaaactcaatttcgaccacaccttccgaaaaatcactcgaccaacctatcttcatttttttcaactactcgaccttattcaacctctcttcctcaccgtacttagccacatctgtttactcgacctccagaaagcactcgacctccgcccgccgtcgccgagttcatttccatcgctactcgaccaattcacttcaccgttcatcgtctctttgttctcgccatactcgaccgtctttgcgccgccgcagtcgagtccccacctagtttgccgtcgaagtcccaagagctactcgattacatccacaagactcgaccatcgatttgtggcttcgtccttgccaattccggctcaccgacaaagcactcgaccgtctgaactcaccagctgtaccgacttcctcaacattactcgacctccaaaggtttactcgaccaccggtttctattttgctcgattcactaaagcagaactcggagacagccctgtttactcgagtacaaggctatactcgaccaatgtggtccatttcattgccagttgataacgattatggtttcattgttatctttgagactaacctattgatatttgggttttgagttctaaatcttttgcaggagaatcatgagtaactacagtggcagttcttcaattgatcctgactataacatggataagacagagtcgtcgtcttcaaggccaaaaagagaacagaaagaatatgataacttcaggagaaaagctgagatagctcaagggaagagagcaatgacagagaggtatgagcttatagatgaggatctggaagccgagtacatgcctgagcatactcgcagagccaccaaacttcttcacgaacctgatgtattgcctactgaggagtatatcaggctcttcaaactgaatgagttctgtagcacaagatacccatgctcgaccacacttgcacaacttggatttttggaggattttcagcacttgtaccagagtcgtcatatggacagtctaatggcttatccatatgtagcatatgaaggagaaacgattcagttcctctccacactgtaagtggagctttaccaaggtatgacctccgatgatttggaatgcgaaggattgggaatcttgcgattctctatgtatggtcatgattatatgctatcaatcaaacgcttggaaggattgtttggtttcccaagtggaacgggtactaagcccaagtatgacagagaagagttgaaagacttatggatcaccattcgcagctctgtaccgctgaattcttctatatcgaagagcaatcagatacgcagtctggtcatcaggtacttccaacgttctatagccaatgtcctctgctcccaagagatcacagggattgttaccaattcggatatggagatcatcgctatggctctcaaaggcactctccgccaaactaagaacaatatgtctctccaaggtgaaatcaatgacacatctctctctatacttcttcaaatccacctatgtggatacaagagctgggctgtcagcaataaccacaagagagcacgatgcgctctttgcataggcggtgttctgacaccgattctgatcgcttgtggagtcctaatcacatttgatggacttgagccacgggcaatggatatcgagcatctgcatcactgcgaattcctagagtttgcaatggttggcgatagggaccgtttcaggtttgagcactctacagataagaaagccaacatccttctccccagtccttaggttacacgcataatagagggagataacattgatttcaggcctgagcttgagaacctctactacgagaacgctcagccaacaaatgaggatgttcatacagaagaagctactaaggatgggatggatgaagctagagaagtggagtatgacacgagcatgtatcattttagtgagcatgtacctccagcgagggggagcaagagtttgagtgaagctcacatgaacaacagcaagttgtagaagttgtgcaagaaacaagataagttactcgccaagtgtttcaagactatcaagtttctgacagataagctgagttgttcctcctccactactgctattccacagggacaacctcctctagagatgccatcgaggagatttgatgagcatgagcacagacatgagcttagcgagcagagaatctcacatgtcccggctaggcattcttcattcgagtcccgggagcacaagagaagaaggaaggctacactcactcgatctagcagcagatcacgcctcattcactcgaggagatcactcgaccgcggtgctggccgcagtagaagaagagaggtcgagtatcctcagagcggtgctggccgccacagagctgatgaggtcgagtacccacctgctggagctgatacggaacaaggcggttcgtctatggcctgggagcaatcacaggcagccattgacgagcaactacgttcattctttgactga

SEQ ID NO: 160955 - DNA, 105 bp, Arabidopsis thaliana landsberg
gaacttccttctgacaggactggaaacttcgatacgatatataatttccttagagagaactggaagattgtaagatgggtagctctaggagcaggtgttttcgag

SEQ ID NO: 160956 - DNA, 2023 bp, Arabidopsis thaliana landsberg
tgtggaccagttttttgaatgttttgatgcaatgaggagttaccaatcagcttctggaagccaaggaatgtggaattggacatcttctgttttcacagcaataaatgctgcatctagccttgcttcggggtctttgcttcttccttctggtaagaatactttcttgaattgtgtttaaatgtgtgcaatgagcatattggtatgtgttataaccaaatatatgtacggtttcttataccggtgttaatcctgatatgtaatcttaggttatgtcttgttctctctattcttttattgctaccctatacaccatcaagctttgtacttaaatcaatccattagctagtaatgccaagtagtttaagttgttatagtaacaaattatctgaacaattctcatcaatatgcagaacaacaacatgttgaaacaagttgtaaagtatcctttgctggagtttcggtggtattatttttccaagatgaagtcaattggaagggtgtttcaacgcggattcactacttgggtgccgaactcagagatatttcggtctcttttcaggtaattaccttgatgaattgtgtttccttcccctcactagtatctgtgctcgagtttcttacaatattcaataaggtcaacaggtatgccttcatgatctgaggttagaaggagaagtgaacagcatggagatcgccgattattgtcaaggtggaaatgttgttgacactgctaatgctgaatctcagacttgtttgattaaggatttacaagccaaagttcagactagtcttcctccctttgcctcttctgatatgcattctgactctgaaagattaagcgagatagtttctgatggattcctctttcgtaacaagggtttcgcagtcaagacattgttggttatagctgcagggggcagtggatttcagtttactgtcaatttccaatcatccaaagccagccatagaggatcaaactcattctcattgagtttaccccctaccacattctggctgaaccttcattcggtagaaatgttggtaaatcttttcaacgatgtatcagaatctatccccataaccagtcatgaaaggaatcaggtggcatcctcttctaaatcagaaagtttgcgaggtagtgtgtcaatctgcaatgctcgagtgattctgtggtttccttttgagagcatttcagaaaggttctgcaactcgcttggtcagcaatttatcgtcgtcgatctatcttcctctccgccatctgataaggaaagggctaaggaaagaagtccaggagaaatgcactttccatcagctactcgctctatatgcttcagtgttggtgatgctagcatctatttggtcacttctgaccttaaagattctgaaacaaattcatatcataggcaggttgaattctctgcgtataatattttacataccaacaataaaactaggcaccaactttcaacaattggcatgttttggcaagatagacctaccgttagcccttggttagtggagagagctaagatgttggctacgcaggaagaatctattcagacagataaatctggcgggaggggccttgagtttgctgctgttgctacgcccaaagatcaagacgacatctactctcgaagcaggaaagaaataattttggcttcttcgctctgcctttatgttcatttgcttccacttgctatccatttagatagttggcaatacagcaaattatgtaatctaatagaagaggcaaaaaattggctatcgcgtatggcagccaatacagctgagcaaacagaggaatctgttgtgtgtcaaacgtctctcgttgttgactgtgattctattgacatattggttaggccagaacctcgaatgggcataaaaaaacagcttcagactgagctccctggatcatggattcagttcaacctgagggttcagaaattaaatcttatgtctgtcccaaatcttggcagtgtctctggtgctgatttcttttggttagcccatggggaag

SEQ ID NO: 160957 - DNA, 167 bp, Arabidopsis thaliana landsberg
catctctctcatcatctttggccatggcaaaagacttggatgtgaacgagagtggaccaccggcggcgagagactacaaggatccgcctcccgcaccatttttcgacatggaggagcttaggaaatggccgctttatagagcggtcatagctgagtttgtagcacac

SEQ ID NO: 160958 - DNA, 286 bp, Arabidopsis thaliana landsberg
  unsure (1)..(286): unsure at all n locations
gtgatcgagtggaaaatggttgacaatagcatgaaggcgatccgatatcgttctgctgccaagtatgtggaccaagaaaacaataatccaaagaaaaggaaannnnnnnnnnnnnnnnnnnnnnnnnnnnnnnnnnnnnnnnnnnnnnntgaatattattgaccatgagttctattgaaacatttttcagagctttattaatggagactaactgccatttcttacaaactcaagaaagagaaaaaggtcagttctcgttagagctgtgttatacacatgaactcgg

SEQ ID NO: 160959 - DNA, 928 bp, Arabidopsis thaliana landsberg
aagatggcaccgtcgacctccaaggccgtcccgtcctcgcctccaagaccggtcgttggagagcttgctctttcctcctcggtatatgttttcgcaaacctcagataactattttcatctatagataacttgaaaaatataaaaacataaatctttatgtagtcttttgtgtctttatgtgtgtgtgtgtgtgtgtgcgagaagggtatgaagcgtttgagaggatggcgttttatggaatagcgtcgaacttagtgaattatttgactaaaagacttcacgaagatacgatctcttcggttagaaatgtgaataattggtccggtgcggtttggatcactcccatagccggagcttacatcgctgactcatacatcggtcgcttctggacttttactgcctcctctctcatctacgtcctggtattaattctacagtctcttttatttcttatggttaaaaatacgaattaaactcaactaaaccagacttttacaactttttgaagaaatcgaacttagaaatgaaccaaacaaaatatattaatttaaaaatagttcaaaaatctgaactggtgaaatataattatacgaaaatgatatcagtaattaataagagcagagtctacattatgtatgacctatttttttttcttaagcttattaaagttttaatggactcgtcaatttctacttttatcttctcttaaatattctatgtttcagatttttcatatcaatgaatatatatttactcaaaaaattttgggttggtcatgataaagaagtatagatgtgtgtgtttgtcgcgttttggacgtacgatcagatagggtccgtgagcatttatcccaagaagatccactgccacaaaaactatttgcatttttctccactggttataatacttgaggacaactgtgtggttt

SEQ ID NO: 160960 - DNA, 643 bp, Arabidopsis thaliana landsberg
cggcgacgacaatggcgtcagctgccaagaacactgagcaaaaccctttctccttgaaacccccaagacctccgtcttcctccaacgctgcatcttccaccgctgtggcttccacttcagttgaaccccaaattcggaaccctaaacctagcacaaacgtcttaccatcgacctcgaattcaccgattacgatgttacaagaagatgaaatcctcgcaagctctagtcacctcacacgcccagagcttctccgacgccgagcagacaacctaaagcagctggccaagtgttatagaaaccattattgggctttaatggaggatctcaaggcgcaacacagggattattggtgtaagtatggggttagtcagtttaaagacgaacaaaatcaatcgaataagagacggaggcttgatccagaaggtagtggagataagggtaatgatggtgatcagtatgcaaacagcaattccgggttctgtatgtatggatgcaaagctaaagctatggcgcttaccaaatactgtcaattgcatattctcaaggatagtaagcagaagctctacactggttgcacaaacgtcatcaacaggtttgcttcaagttgtgttcttttatattgtatagtcggtttaagatgttg

SEQ ID NO: 160961 - DNA, 586 bp, Arabidopsis thaliana landsberg
ccattacatttgtacttcacataatataaaataaactaaaaacttccaaacaaataatttaacccaaagtcacaaaatagttcataacatgaaatttgggacgaatgcataataatgaacagtcaaacatagaataaagcaataatcagagttgttcaattcaaaaaaagaaagaaagaaaaagagagaaaagatatgagaatagtttcctcactttgccatcataactttgacaaactcttcataattgatctgaccatctccatcaacatcagcttctttgatcatctcatcaacttcttcatcagttaacttctcaccaagatttgtcattacatgtcttaactcagcagccgagatgaaaccgttctggtccttatcgaaaaccctgaaagcttctttcagctcttcttcagagtcagtgtccttcatcttcctagccattaggttcagaaactcagggaagtctatggttccgttaccatcagcatctacttcgtttatcatatcttgtaactctgcttctgttggattttgacctaatgatctcatcactgttcctagctctttcgttgtgatgcaacct

SEQ ID NO: 160962 - DNA, 457 bp, Arabidopsis thaliana landsberg
ttcatttgcaggaaacgtgcagagagcgataccagtgttccagatgctcctgctagagctaaaatttttgaacaaaggtaacatattttttttgcctttgcgtattaatgtggtaattctcaaagttttggtttgtaggcaaatgttttgctaatgtcaccttcataaactagacgagttttgtgtcctgtggtttgcgtttgatatgtcttactttgaatctggaagatatgcgggatttcttgaaggctggaagaaagatccagagagtaatggtgggccaccagatggtgttgtaagtcgaaaacaccttatgatctttctctttgatgtagtgagttttggtttcatggattattttggcttgttttcagattctcggccgagttcgtgagcatttactcagagagttaggatttagggacatattcaagaaagtcaaggtttaatttttttt

SEQ ID NO: 160963 - DNA, 276 bp, Arabidopsis thaliana landsberg
ctcacactcaatggagccatcaccgtcgtccccaccatcatcaccgccggagattctcgaccttgactctatcaaagctctcaaaatcctcggtaaaggcgccacaggtaccgtcttcctcgcgcacgacgtcgtttcaacctcttcttcttcttctcccttcgcggtcaagctcgtccccaaatcctctgcttcctctctccgccgtgcacggtgggaaatcgaggtcctccgtcgtctctccgttgactctaatcaaaacccttttcttccacg

SEQ ID NO: 160964 - DNA, 315 bp, Arabidopsis thaliana landsberg
agaagacgagaaaaaaagaagaggcgagtggttaatggagaaggttagtttcactccaaacatatatgaattgactaggttatgaaatccatatattttaattgtgtgtttatgatagatcaataacatttagggttgaattttcttgtgatctattatgttattcgtcccatgcatgatccataaaacttttatttttgaatttgtctaggaaaaccatgaggacgatgggagggggtttgccacccgaactaaatcagataaaagagcagatcgaaaaggagagatttctgcatatcaaggtaagagacattt

SEQ ID NO: 160965 - DNA, 504 bp, Arabidopsis thaliana landsberg
  unsure (1)..(504): unsure at all n locations
atgcatcctcaaatacgcgacttcccttcaagatatttctaccaaggacgccttacggacagtgaaagtgtttccactgctcctgatgagatttactacaaagattctgtccttaagccttaccttttctttgatatcagccatggacgggaatcccatcgaggtggatcagtatcttatgagaacattgatgaagctcgcttctgtgttggggtgtacttacatctacagagaactctgaagtctttgggtgggggtaaagtctctgttggggtaattaccccatacaaactgcagttgaaatgcctgaaaattgagtttggaaatgctttgagccaagatgaactgcaagagatttatatcaatactgtagacgcgtttcagggtcaagaacgtgatgtcataatcatgtcatgtgtgcgtgcttctaatcacggggttggcttcgnnnnnnnnnnnnnnnnnnnnnntgttgctctcacccgtgcgaaaagggctttatgg

SEQ ID NO: 160966 - DNA, 341 bp, Arabidopsis thaliana landsberg
gtcttagactaaatgataaacctagcctcaagtcatatttaactacaaacactacaagaaaacaggcgatttgcgagggaaatttgcggtggaaaatctccctcgcaatttgctacggatttgcgagtgtattgcgagagaagaagacaacctcgctaatccctcgcaaaatttgcgacgaacaaatccctcgcaaatatgcgagacgtttgcgaggaatctgcgtggaaagcgtcattcctcgcaaactcgtcgcaaatttgcgagggatttacgggtaaccagcctccctcgcaaattgcgacgagtttgcgaggaatgaatattctgtcgcaactttg

SEQ ID NO: 160967 - DNA, 393 bp, Arabidopsis thaliana landsberg
cattgcacaaggctggagcttacactcaccttatgaacgaggaagacaaggagaatctcaaatggcttcatgtttttaagtaatttatttctctaaataaaagtctttcttaattaattaaacccgattttttttcccgatgatcagatttttaatacttatattgtatgttttattatatagcaagtatgacttatacagcaagagcaaagtacacgtcaatgtcgagaaggttaagccgtactacatgtctcttatcaagaaagtgaggatctttaccatattctgcttttgaaaaataggatatgtacttaatttttacagcattgtgatataatttttgtttgggatttttttcagtatttcccggaaaatctgaggtggtgaaaacgg

SEQ ID NO: 160968 - DNA, 867 bp, Arabidopsis thaliana landsberg
atgagagccgaccatgaagatgaatgtgcttcaaaccaatccaaaattccattcctttctagtaaaaatgcaggtaacccgagaatcatggtcgcgaaaggcgccatatagtataccgtgtttatgctacatagagagacatgaaaatgaggaggacacaaacactcagttccatgaaatatgaaaaagcaaatcaagtattggactatgagagcatggcatgtcattgaaaccaaatgtaagtttcacacattcaacacctatcatgtgaaactgaagatcaaaacctcaggaaacagaacattgacctgtcaaatttgtatccatgaagaagagattctgcaagaatggtctttgtagaggtagctaaacatccaaacaaagcagcacagaatccaaacacattaaagctaagttctgtaatagaagtaagaagaatccctccaacaataggcaccaatgacgcccaaatacgccaatcaaaatatttcctccataccaaccactgtaacacaactgcactcaaaaaaccattacacaaaaaccaatcagaacaataaaaaaaaatcactttattttgaaaaattctcaatcttaaaaaaaccctaaacctgttgttgcaggagttaaagatttgatagtctgcataaaagagacaggaatgtatctaagactaatattccccaacacaatgttgatacagaacacaaatgacattggaaaaatcctcctccacctatctgctggatcaaccacaatcaaaggtttaagctttaagactttaatcacaatgtatgctccaatcgacgaacatatgaaatgaacacatgaaactgataatgaaaacttgaaatccagtttctgcaa

SEQ ID NO: 160969 - DNA, 970 bp, Arabidopsis thaliana landsberg
cccatttaaatagttttcattgtccttgtgaaaaatgcaattctcttcatcttctattacttctttcacttggacagttttaatcacagtgggatgtcttatgctttgtgcgtctttctcctatgctcaacttacccctactttttacgacacttcatgtcctaccgtcaccaacattgtaagagataccattgtcaacgagctaagatcggaccctcgtatcgccgggagcatccttcgtcttcacttccatgactgctttgttaatgtaagatatcacttttcatatatctatagcgttatgaaattactgtacttaatctcttcatcttttaaatattgattaaatcagtgtaaaaaagattatagttgttgtcagcattagcaattgttttaggtgtactcttagttgctttcaatttaatgtcattttagcttttcttttatgtttcaaaatttggattctgaatgcaaattttaaaggaaaaagtaatttaacatcacgtcaaaattaatcaaacagacaaagaatcaattagttttggaatcacgtagtagtataatggaacttattaaatttccaccatattttggtaatataaatttttctcttactgaatttattttagtgaattaaaatgggttagaacttagaacttagaagagttaatacctccttacattgttttccttaactcagttacttgcttcagaggaacaaatggttttgatggatgaaaaaagttcaacgttaaactgttacctttggtaaagatgtaaactatggatgacattaactaataatttgttaaataatattttggacttttgaaagggttgtgatgcttcgatcttgttagacaacacgacatcatttcgaacagagaaagatgcacttggaaatgcacattcagcccgaggatttccagtgattgatagaacgaaagctgcggtggagagggcatgccca

SEQ ID NO: 160970 - DNA, 326 bp, Arabidopsis thaliana landsberg
aagcacaaccatcaatgatggcccaggatgtttgatgctaaaatgtcccgacccatcttgtcctgctgctgttggtcatgatatgatcgataagttggcttctgaagacgaaaaggagaagtattatagatattttcttaggtcttatattgaagacaacagaaaggtaagcagtctagaaaatttatatcacacagactggtattaatgtcgctggttcttttattgagatatcatattatattacttgaaacattttactctccttcctatttgctctatgattgacactattttccggaagaagaatagtgggttctgtctgt

SEQ ID NO: 160971 - DNA, 139 bp, Arabidopsis thaliana landsberg
atcaaacctgtaaataagagatcggtatccactgatgctgttattcatgtgatatggtatgctgcttacaatgtcgtgattgtatggaatagtccgattacatcgcgcccattttcctttactaccctgtaatcataga

SEQ ID NO: 160972 - DNA, 351 bp, Arabidopsis thaliana landsberg
aagcttgcaaaaaaaatcatgtagtgattcataacgaactcggtcctggtattgatctcaacattgcatgccgacaattcagcatagagcgcacaccttcaatgtttcacaccctaaagtacaaagatcctttttatatcattgagttcgaggataataatcagctacctcatggtgaaagatggtattgtctgcttagtcacggtactagaccaaagtattggtatgatattgaagtatatcgtcaaggctattatccaagttgtggtcagctacgctcatggattgctaaacaagatggaatttggtttacaagaagatatgatagcccgccaggacatgttcttaatt

SEQ ID NO: 160973 - DNA, 237 bp, Arabidopsis thaliana landsberg
  unsure (1)..(237): unsure at all n locations
ccccccccccccccctnnnttnnnncnccncccccccccccccccccctcccccttttcnttcttnnncttnnctnntccccccccccccccccccnccccccccccccccccccctcttccctgtccccccccccccccgccttcccccaccccccccccccccccccccccctcccccccccccccccccccccccccctncccccccccccccccccccccccccccccctccc

SEQ ID NO: 160974 - DNA, 405 bp, Arabidopsis thaliana landsberg
cacgaaactgcgaataactcaaccaatattaatacgaatccagttctgtaaactggagaataacgataaacgacttgggaataactcgaccaaattttgttgccttttaccacgatttgataagacgaagctggtttctcccaaaccctagcgattctgctccttctccctttctctctttttcgcctttataaaacgaaaagtggctaactaaagccctaatttcaagttttcttcttttataggcacactctagggtttccaattaacccaaccaattaaaccggataatttaaaaacaaaccctaaccgattttccggttcacgggcgttacaataccgcgggtcatatcctagttttatattaacatatcaaccgacctgacttagcatttcctatttaaa

SEQ ID NO: 160975 - DNA, 140 bp, Arabidopsis thaliana landsberg
taagaccatctctatctaaaaacaagaaaagtttctcaaaaaaaatatatattaatattttaactaaaacaaatatattaattattatttaataattgaattaatagtatgatgacatttgtccaaattggatgagaata

SEQ ID NO: 160976 - DNA, 450 bp, Arabidopsis thaliana landsberg; identical to SEQ ID NO: 56438

SEQ ID NO: 160977 - DNA, 152 bp, Arabidopsis thaliana landsberg
atcaatgtcatcaacaaagacaataatggaaactatatacctaattctctctctcttcttcttcttcttcttcatcttcctatctctcaaactcgtgttcggcccacggtcacgtaaactaaacctaccgccgagtccgagtcgaccatttc

SEQ ID NO: 160978 - DNA, 208 bp, Arabidopsis thaliana landsberg
cgtatatcataatagtctaaggacactgccacgtgaaacattatatgagtgcatatgtttggtgcagacatatgcaatagaagggttttctgttatatgtttgcataggcaacgagctagtaagtgggcttaaagaataatgcaggtcaaaggagcagcacattgtcatttatgagatgaatggtagcatgctaggtaatgtaacagt

SEQ ID NO: 160979 - DNA, 314 bp, Arabidopsis thaliana landsberg
  unsure (1)..(314): unsure at all n locations
catcgtcagctgttcttaaatttctctgtttgctgtgacggatctagatcagctgctatcgatgttgtgatcttaatcgctgtgatcacatcctccgggtttttaatcttcccttacatcaaattcatcactatcaaatctgttgaaatcttctctgagctctcttgtttagtnnnnnnnnnnnnnnnnnnnnnnnnnnnnnnaattgtctacggtttaatagctttgagtatctcgtgtactgcgttatctgcttggatgattgttatactactgtgtagtcgtcatcgatgtgggaaaccgaactgtaaagg

SEQ ID NO: 160980 - DNA, 371 bp, Arabidopsis thaliana landsberg
atatatatatatatatatatatctgaatttcatattaatcttgctacatactttcattcattgaatttaagagtggttgtctctccctcgtatgtaatctcatttccggggaaaagggcttatgtcaaggataactcatgtcccttatctctcatactaaccatggacattctcttaaagagactcgacaaggctatggtcagacctcatatatgtatgtcttgagtccttaataattatttaagcttcggatataatatgttgatggttcagaaccttcatgtcaaggaatattggtgtgtctggagggtttttataaggtcttaggaacctaagacatcgttgtgtttggacgaacgttgatgaaaaca

SEQ ID NO: 160981 - DNA, 175 bp, Arabidopsis thaliana landsberg
aggccaccctatccaactctaaaaccattgaacttacagaatctgcactttaccgtctttacaagttatccttgaccaaatgcagagatcattaataccagaaacattccaattcgcaagagtcccatgaggatctgagttgactcttgcccggaacttcaacaatgcggatcct

SEQ ID NO: 160982 - DNA, 463 bp, Arabidopsis thaliana landsberg
ttaccattcaccactcactttccacagctagattgattatcaaacgacccacaagaaaagagaaaaaagtgagaaggcctaaaacataaggaccaaaaactattgtaaaaagaagaaacagacttaggaaccggacaacaagtctaatcaattcatctgttcttgccgacaaatggttgcgcttctcttcagcaatttgtcgttcgatctcggcgatatcgtatagaactttcttaacctcctcgacgattgtgttgaccaaatcattctggcgactgtcataacagagttcaaaagatctgtcagtgaacaagcttatgtcctgaactaaccaagaacagagtcaagaaacagagtattccaagtttccaacaaagaacataagctaagggacacagtccagacctgtatcgtgacgaagacaagccagttttcttagaaacatacagtatagcatctttcc

SEQ ID NO: 160983 - DNA, 114 bp, Arabidopsis thaliana landsberg
gggggggggggggggggggggggggggggggaggggggggagggggaagggggggggggggggggggggagggggggggggggggggggggggagggggggggggggggggggg

SEQ ID NO: 160984 - DNA, 360 bp, Arabidopsis thaliana landsberg
aaacagtggagttttcatcgatttcctcacgcacaaccatctttgacagttctgtcaccaccttcttctccatccatctccttataggcctagcaccatacacctaaccaacaaaacaagaaagcaaccacaagagtcagtcaacagaacaaaccagcctgagagatcaacaatgatatgcattctgcatcatgtgaagagacttaccgggtcataactctctgccaagatatagtccaaagcagcatcagtgactgccaaagcaactcctctttcagcaagccggacagcaacgtctttcatttgaagccgagctactttcctcaactggtcatgtgaaagggggtcgaacaccacaat

SEQ ID NO: 160985 - DNA, 162 bp, Arabidopsis thaliana landsberg
cccaccacagtaataccaaaactttctcttctctctctctctaatggctctatcaagaaagcttcttgttatcttctttacatggataacagctttatccatgtcgaaaccaatcttcgtatcatccgataacatgaatttcacattcaaatccttcacaat

SEQ ID NO: 160986 - DNA, 299 bp, Arabidopsis thaliana landsberg
tgcgttctgcctcagtcatttctaattacatatcattggcaagagtttgaacagtagtatgattctcttttaagtttatagtatagttgcgaattatgatataagattcgcgagacaaagtaagataagcatagttatcttagataatgacagatttttttcaagtctttgaaaggaattaacacttaggaaccttataaattgatgtagaatgtagactgtagacatagtatagacacgtctcaatctattaatcactcccttacctaatcacggttcctcattatattgataacaat

SEQ ID NO: 160987 - DNA, 210 bp, Arabidopsis thaliana landsberg
gcggctctccgctgagccttaagctcgtgctcgcgtcgttcttcctctcgaagcttctggattttcttctgctcgatctcagaccgcttgaagaacttcttaccaccagattcctcagctagactcttacgtttcttcagaatctcttccctgagcagatccatcggaaaggtttcttcaatcgccgccgaggatttggttctgttgtct

SEQ ID NO: 160988 - DNA, 109 bp, Arabidopsis thaliana landsberg
agatgattctgatggagacctagcaacatgaagatgaatatgatatgatttgagtattggatatttttcatgtgggtgctttttttcggctgtgaaagcgtttctgctt

SEQ ID NO: 160989 - DNA, 544 bp, Arabidopsis thaliana landsberg
acctgtttcaaagtttaagctttgatttgagtttattgctctgtctctgatgatgttttgtcgccacaagcagcaaaattttctattcatcgagttgaccaactcatggtcttgcttcgattttcttcttctcagttatgtttgttgatgtatggactactaggaaacacatgagtagcttgtgatcgagaactaatgatcttagcaagttactgttctgctttatgatgcaaaatcagaaatcaactagcaggtctttgatatttgattcatatctgcagttgcagaaggcaaaaagatggagctagaacccaataaatcactatctgctggtatgaatagattctttcttgctttgattgaatttacaatttttgtttctcacaatttttttaatatctattgatttggctatgtcaaatctagatatgccatctttgctgagtagatcatctgaagcttttaatggaggcactggatatgttttcaagtgatctcagcatgtcccagcccattgcccacactttttcataaaagagtagtc

SEQ ID NO: 160990 - DNA, 358 bp, Arabidopsis thaliana landsberg
tcaacaaaaaattgcttagaaacagtaaatagctttgttggtgtttttatggttaaaatgtgtcacaaactaatgcattggcctaattatacgagttaaagatggattaggagtgtttagacaacacttatacccattttctctcaaaagaggctaaaaccaacaaaaaatttcttagaagcaattagtagctttgttagtgttactatggttaaaatgtgcgatcaaattctcaggggctcctcttggctgaagagtaatctcatatattcttcttataaaaagaaatttttttttgatttttttttattccgtaaaaaaagtaaattactcagaaaaccctaagaatattgcttaa

SEQ ID NO: 160991 - DNA, 270 bp, Arabidopsis thaliana landsberg
  unsure (1)..(270): unsure at all n locations
tctctgatcaagatggcattacagctcttccttaggttagcatcaggattaccaggaagaaagtcctctccggatgggtatagatttgggactggatcagacgatggaacatgcaggctgtatgacatnnnnnnnnnnnnnnnnnnnnnnnnnnnnnnnnnnnnnnnnnnnngtgagaacggacctgtcacctccattgcattctctgtgtcagggagacttcttttcgctggctatgcgagcaacaacactgatgagggtggaaggggg

SEQ ID NO: 160992 - DNA, 374 bp, Arabidopsis thaliana landsberg
attagcaaaccgaagacgaatagaatcaccttgtccaagacagttggatcagtagcacttgcaagctcaagcaaacgaatgagcccaacagcgaagaacctgctgtaactaaacccctccttactaccagctcttcctgcaatgtccttaagaactgcttcaatatctccttctttagaggaaaagtcaactagtgaagcagaagtctgacttcgtgcccattcctccatcttctgagcatcaattctgtacaaaaaaagttatcatctttagaaaaagacattcaacaagaagacattcattatcaaggagaagatggaagcaggaagaagcaaaccggtattgcttaggatcctcattcaaggcttcaatgt

SEQ ID NO: 160993 - DNA, 104 bp, Arabidopsis thaliana landsberg
actattaattataaatgtattagagaatgatacaatttgcaaaacttttatagataagaaatagttcttaaaacataaaattactactttaaaaaacaaatcac

SEQ ID NO: 160994 - DNA, 120 bp, Arabidopsis thaliana landsberg
cccctcttccggggagtttttaaattttttgattttttaggataaaggagattcctttacctcgattttttgcttttcatttttattaaatctccgatttttgatttttgggggaagaag

SEQ ID NO: 160995 - DNA, 237 bp, Arabidopsis thaliana landsberg
  unsure (1)..(237): unsure at all n locations
gctggtctcaacggagaaattttccggtgacagcttaaagttttgatttttaattcttttttcacgaagaagaatttcatttttgtgaaaccgttagaagaagaagaagaaaaagattataagcttatggttccatcggagatagaatctnnnnnnnnnnnnnnnnnnnnnnntttcgccaatctgagaggtctgcgatggcgcgtgaatctcggtgttcttccgtttcagtcttct

SEQ ID NO: 160996 - DNA, 180 bp, Arabidopsis thaliana landsberg
aatagacttcaatctccttaataaaattcacgcagccatgtagtgagcacaaagcgaactattctttcgccttttactaaagaataccgtgtgctctccacgctaagtggcatacgcctatttttggagggatctgccttcgggtagacccaacaatttactagtcttaactttttttgt

SEQ ID NO: 160997 - DNA, 542 bp, Arabidopsis thaliana landsberg
ctgtgagcagcaacaagaacaccaagggagaagtaaagcaagatgagacgaatggagaggaagcgagtattgatggtttcagggtttggttttggtgaagggaaaatgaagaagagagggatgaggattggaaaagcagcgttttggatcagagcttgcatccatgttcctttgtattgtagatcttggttattatcttctcgacggtcttgaacatagaagaagttcaagagaagtatgacaagagaatctccaagcaggactaagaaaagacatattagaacagagatccaccatttcttttgatttagctgcaacagttgtctttggctcaagacttggtctggttcaggattctgaacatgttctgattcttctgttggttaaagaaaatttggaattctcagtttttattttttatttttaagaagacaataagaatagaaacaatttttacagaagttaagacagtgaagttaccatgtgttgttgtatgtttggaagcttcggtcatctccatgagttttctctggtggatctct

SEQ ID NO: 160998 - DNA, 473 bp, Arabidopsis thaliana landsberg
ctactgatcctacgcatttacctttgtgaaaggcctattaaaagaaacaaaacaaatgctactcataaatccatcaaaacataagtatcatgagggtaaagcaacgataatcgaaagctgagtgtcaaaataccaggaagcatagctgcggccagaggtagacgaagtaccggtaagtaaagatggagtaaggttcactaagttcttggtcaacaagagacataatcaatggcagatgatgctcaccagcataactcgtgtactcaatctcaccctcatcgaattcttctttatcttccatctctttctccattgcaagaagtgatcaagatcccgaattgtatacttacaaagagaaatatgaacttctgatcagttgtttatacattgatgatcttgttcctataggaagctgatgaaacacataatgcaaagttagagaatataaatcattttctgtgattcgaagttga

SEQ ID NO: 160999 - DNA, 200 bp, Arabidopsis thaliana landsberg
tcgcccttaaagtaaacccaattactcttgcaaaatgtttttcaacatgcgggtattagaccatctccatcagtaaaaataagaaaagtttctcaaaaaaaaaaaaaaaaaaaaatattttaatcaaaacagatatattaattattatttaatagttgaactaataatatgataacacatgtccaaattggatgagaata

SEQ ID NO: 161000 - DNA, 353 bp, Arabidopsis thaliana landsberg
aaaaataatggcttaaatgaaagagacacatacataaagactcttgaacaaggaaggtctagaataagcaagaaagttataaaattaagaagaagaaaaagaaagaaacagaaaaaggtatctcagagccagtgaagagggtttattactgatagtacatgagctgctgatgggccgcagctacattctgatagccaccatcatacatagctgcagttcctccagcaacattgactccaagacctgcttgcctcagagaatgttgagcctgaggatgcatcttggctagagccagttgcctctcgtaggctaagaggtccattgcagacagagaagggactgatgccggggct

SEQ ID NO: 161001 - DNA, 344 bp, Arabidopsis thaliana landsberg
aatgcatttatagaaagattttaaaacgcatgcagttttgtatgactattatttaatcataatcttttttttttgtcaaccattgattaatgatatcaatattcgtttgaagttatatcatagttaccaaattctgtaagtgtctttttcaaatggcaaaccatatacaaaataccaatcccgtaggtaatgattattgatattaaattttatgtgggtgtattagttggatacaatgtggaattaatgggtgtgaatgtggggtgctaactatatggcctctttataggtggggaataaagtgtgtgcaagctctttttccaaaagcaatagggaaaagaaaa

SEQ ID NO: 161002 - DNA, 358 bp, Arabidopsis thaliana landsberg
atcacaatgcctaacttctttgaattccaaaccctttactagactaacacttttttgtatcccccttaagaactgtaaacaatttttttttccttttctttttattttcattctctttctcattcccattcaatcgatacacaatcccaatcccaaatacaagtctccacctagtcctagataacccaaaaagcgtgggctaggactacatgaaagactgctcttgtcggctcatagctaacacgttataccaagctcaatcgaaaaagacctcacagtcacacacaaatgatctttggcataaaataaggctaggctaaggggggaaactgctctaaaaatgagagacatctacttg

SEQ ID NO: 161003 - DNA, 97 bp, Arabidopsis thaliana landsberg
tacgctttgtagacatcaccaaacgatcctcttccgattagctcaaactggctaaatctggttccagctgcctcttgtaaaccagcaacatcatcca

SEQ ID NO: 161004 - DNA, 79 bp, Arabidopsis thaliana landsberg
attaataatgggttaagttgcaaattactcacttttctaaacttaattagaaaagtagtcactttactattcataatct

SEQ ID NO: 161005 - DNA, 128 bp, Arabidopsis thaliana landsberg
gggggggggggaggggggggggggggggggggggggggggggaagggggggggggcaggcggggggggggggggggtgggggggggggggggggggggaggggggggaggggggggggggggggaggg

SEQ ID NO: 161006 - DNA, 271 bp, Arabidopsis thaliana landsberg
tcaccgcggacttctcgtatggcgtcactagattctctagtgagcttctttttatctaccctttttgtcacaatcgtgagctcacaaacgcagtgccggaatctcgagtcgattatcagtttcggtgattcgattaccgacacaggaaacttggttggtctctcggatcgtaaccatcttcctgtgaccgcgtttctgccgtatggagaaaccttcttccaccacccaactggccgttcctgcaacggccgtatcatcatcgactttatcg

SEQ ID NO: 161007 - DNA, 170 bp, Arabidopsis thaliana landsberg
  unsure (1)..(170): unsure at all n locations
ctgttattcgtgagccaatggaatcggaggagaaagacaaatacttcgcaactccttattcccgagtcatggcgaaaaaatgcttcttttnnnnnnnnnnnnnnnnnaacggttcaaacctactactacttggaccccgtcgagaacaattcaactggaaacatcagttt

SEQ ID NO: 161008 - DNA, 120 bp, Arabidopsis thaliana landsberg
gggggggggggggggaggggggaggggaggaagagggggggagggagggggggagagggggggggggggaggggaggggggggagggaggggagaggggaggggggggggagggggaggg

SEQ ID NO: 161009 - DNA, 1441 bp, Arabidopsis thaliana landsberg
atcatttattgagcatgtcaatcacctgtaaactgaggaaacgaaactacacaattaccccatcctcgagaattctttatctgattgaatttattgcttaatctactattgtttactgcatcttgccatatgttgcttagtcactacaatcctttcttggtactcgacctgatactcgaccaccctgttgtctgacaacagactgtgcactcgaatatctttgtttcatttactatctgttactcgaccagtcactcgaccttattcagtgcttgatatgtttataatttgcatgttttcagtgtccattcatcatcgttttgagtccagtttcgtatcattcatcactgttttatatcatttctcatcattcttgcatactttgcatgattaggatagctttgcatacatattgcatttctgagttgttttcaggtgatttggagctgtttgcgagcaaattggaagaaacgagccagaaccagaagacatactcgaccaccaggtcgtgtgcatccagcaccatactcgaccaccaagtcgagtgactttggagccattcttcccatctactggaccccctggccgagtatcctcagctcaggctactcgatgacgccactcgaccccctggtcgagtatcactttgccataccacctgaccacactcggccattcactctaccaagttactcgaccccctggtcgagtatcatcactcaccaccatcaccatcactcgaccggacactcgatcacatcttcacagtttactcaaatccgcactcaaccagacaagctgagcacaaggaagagaagaggagaagacaaagtgtttggaagcggcctggacctccatcagatcacgaagcccatctcggcccattatcactctatgggccgggcgattaggttattggcccatctagtatcattttatttcgttttgtgtaaatagatgtcttagggttttgtcctgagacatctagtcgacattgagtttttgcttcagttttattttctgttttactctactgcgctgcttttgcttgtgcaacctgtaattcgagatttttccaagttattcagattccgcaattgatttcatctgtcatcttgtttctctactccttatctctttacttatgcaatattatcatttacctgcgttttatgtctttgagcatgttgtctgagtagtgacttagaattcttagggatgggatagagtagttgtggaatccgtagtctgtagaatggttaagttttagaattgattgaatcccttcaggactagttgtgtttactgcttatttctttctaatcaactggaattcgatcccaagcattctcgcacccagaaggtgttcgatggaatgcttgatccactagttcctgagatatttgtctctatcccaagggattggccgtttagagcgttt

SEQ ID NO: 161010 - DNA, 219 bp, Arabidopsis thaliana landsberg
aaacactgaaatatgcacaaactcagactcactgttcaagcatccagtagcaacgtctctggaaattctcgttggcttccccatgtgcatagtaacaatgtagcacatctatgcttcctacctatataatgttactctcaaaaatttagatacactacgttatcaactagtttattacaaatccggaagtagaaccaattaacaggttccatattggaa

SEQ ID NO: 161011 - DNA, 364 bp, Arabidopsis thaliana landsberg
aaccaacatattaattatcaatcagccactaatgaatgattaccaaactcaaactaactacttcagtttggtttactctcactgaaccggactcaaattttagagctcaaatgcagatcatttcctttacataaccatcaaattcaatctctgcacaaaggttaacaatctttgtaccaaaccaatctcttaattagaacaatcaaccatatatgttttacattacacaaaaacatatgagtgtaataactcagaagattcacaatccaatccccaaaaattaaataaattaaaaacataaactcaattaatagcatcgcaccttcttcggatctctcctcttctaccagtctttataccataa

SEQ ID NO: 161012 - DNA, 3270 bp, Arabidopsis thaliana landsberg
  unsure (1)..(3270): unsure at all n locations
atgctcgttccatgtgactctaaagaatttcttatccatttgatttctctgtttacttacctgcttcattcacttcctattgaattttagtattttcttgttttcaaccattctactcgatcacaccagtctactaacagtgagactgcgtgatacagtaaacttgtccatttctgcattttcacactctgtcatcctgttgtactcgatcacagggtcccttctggcagttgaccctgcgatagagtatatcagtcatttctgtgactttttactgttttctcgaccagcaactcgacctatcttcccagcaggatcaccaactgctccaaaaccagttgctgtcaaaaacaaagaaaaggtctttgtccctcctccctacaaaccgcagcttccatttcctacccgtcacaagaaagcgttgacagataaatatagagctatgtttgccaagaatattaaggaggttgagttgcggatacctcttgttgacgctctagcgctaatcccagactctcacaagtttctgaaagacttgatcgtggagcgaattcaagaagtgcaagggatggtggtattgagtcatgaatgcagtgctatcatacagaagaagatcattcctaagaagcttagtgatcctggttcattcactctaccatgctctttagatccgttggctttcaatagatgcctatgcgatttaggagcatcagtcagtctcatgccgctctctgtcgccaaaagattggggttcacttaatacaaatcctgcaatatatccctcatcctagctgacagatcagtaaggatccctcatggtttgctcgaaaaccttccaatcaggatcggagctgtggagataccaactgactttgtagtcctggagatggatgaagagcgcaaggagacctttcttagcaactgcaggagctatgattgatgtcaagaaagggaagattgatctaaaccttggcaaagactttcggatgacctttgatgtcaaagacgcgatgaagaagcctaccatagaagggcaactcttttggatcgaagaaatggatcagttagctgatgagttactggaagagctgccaaaagaagatcatcttaacagtgctttaactaaaagtgatgaagatggatttctgcatttggaaacattaggataccagaagctgttagactcccataaagcgatggaagaatcagaaccctttgaggaattgaatggaccagcaacggaggtaatggtaatgagcgaagaagggtcaacacgagttcaacctgcactctcgaggacatactcgaccagccactcgaccttgtctgccaacgaatctgaggagccgatcattccaacttcagatgactggtcttaactaaaagcaccgaaggttgatctcaaaccacttcctaaaggtctaaggggaatcatgagcaattacagtggcagttcttctgttgatcctgactacaacatggatgagacagagtcgtcatcttcaaggccagaaagagaacagagagaatatgatagcttcagaagaaaggctaatatacctcgagggaggagagcgatgacagagaggtatgagcttatagatgaggatcaggatgacgagtacatgcctgagcatactcgcagagccaccaaactgctaaacaaacccgatgtattacctgctgaggaatatattaggctcttcaagctgaacgagttctgtagcacgaggtatccttgctcaaccacactttcacaactcggattgttggaagatgttcagcacctgtaccagagttgtcatctggacactctaatggcttatccgtatgtagcatatgaagatgagacaattcaattcctctccacgctgcaagtggagctctaccaaggtatgacctctgatgagttggattgtgaaggattgggattcttacgattctctgtatatggtcatgagtataggttatcaatcaagcgattggaaggattgtttggcttccccagtggaatgggaactaagcccaagtatgacagagaagagnnnnnnnnnnnnnnnnnnnnnnnnnncagctctgtaccgctgaattcttccaggtcaaagagcaatcggatacgcagccctgtcatcaggtacttccagcgttctatagccaatgtgctttactcccgagagatcacatggactgttactaattctgatatggagatgatcgcaatggctctcaagggaactcttcgccaaactaagaatggcatgtctctccaaggtgaaatcaatgacacacctctctctgtacttcttctgatccatctgtgtggatacaagagcaggaccgtcagcaataaccacaagagagcatgaggcgctctgtgcataggaggtgttgtgacaccgattgtgaccgcttgtggaatcccaatcacatttgatggacttgagccccgggcaatggatatcgagcacctacatcactgcaaaatcatgtagttcgcaatggttggtgaaatgcatcgtttcaagtttgagcactctatagataagaaagccaacatccttctcctcaatcctgaggttacgttacacgcataatagagagagataacattgatttcaagcctgatcttgagaatctctattctgagaatactcaaccaacatatgaggatgttcatacagaagaagctactgaggatgagatcggtgagatagatgaggagaagtatgactcggacatgaactatttcagtgagcatgtagctctagctagggagagtatgagcttgggtaaagctcacataaacaacagcatgttgcagaagtggtgcaagtaacaagataagttactccttatgtgcctaaagactatcaagtttctgaaagacaagctaatctactccacttccactactgctattccgcagggacaacctcctcaggacatgccatcaaggagatttgatgagcctaaggcaagtcaccacaggcctgagcctagtgagaagagagtctcacatgtccctgctagacattcgtcgttcgatctagcagaagataatgccttatccacgcgaggagatcactcgaccgcggtgctggccgcagcagaagaagggaggtcgagtatactcatggcggtgctggccgctgatatagctcaaattaccttaagcttactccctctaataagagatcgtcgctagtacttaagggtcgaattccactgagctcttgatgttcacacgatagacttatgatgtttgcaaac

SEQ ID NO: 161013 - DNA, 290 bp, Arabidopsis thaliana landsberg
aggaccgtctctagaccctctgcccttagccgacagagcatcaactaggcactgagctctctgtcccatgccgcttgttcaagctatggtaagcccaacccacttttatcgtggatgaaatgaggaagtcattgatcgatccctatgtttaaattttgttggttgggatgagacacacatcccaacatcgccaatgtgtcaatgtcagaaaattttcatactctactgtttgcaagaattagctgttttattttatttttgtgtggtttttaacagtttaaaagtaatct

SEQ ID NO: 161014 - DNA, 130 bp, Arabidopsis thaliana landsberg
aattggtgatttgtaagctctcacgtgtttctctatgaatggttggcacacaaaaaaaatcatattaatttatctttactctaagcatcagaaacagaagcttctgccgcaaaaaattaaaaaatacagg

SEQ ID NO: 161015 - DNA, 277 bp, Arabidopsis thaliana landsberg
aagaaaaagcttgagaaatgagtacaggtacgtaagataatactataacaataattacaaccgttcttctgttgaaaagatgaaatgtggattataaacgaatggtgtttttgttggcacagagggataataacagatgtattaggcggagatattcagtttgatttctatcatcgatggtttgatgcaatattcgtggctagcgcttttctttctctgcttctgctttatgcgcacaacacatctggtcaaattgataagcacccaatagactaag

SEQ ID NO: 161016 - DNA, 491 bp, Arabidopsis thaliana landsberg; identical to SEQ ID NO: 51230

SEQ ID NO: 161017 - DNA, 166 bp, Arabidopsis thaliana landsberg
aaacacacacatatatccggatctgcatcaaaagagggagaaatgggaccttttaatggatttgacgaaatcgccggcggagggtttgcgcatccgctccaggaaatcatgcagccccaagaagacgtccgtattctccatcgccgatcacccgattatctccgac

SEQ ID NO: 161018 - DNA, 509 bp, Arabidopsis thaliana landsberg
ataaaatccaacacattcctcttattcgatatgaatggcaacaagaaccagaagacaacgaggtaatactatattctttccccattccgataatctgagaaacaatttcatagagagaaaagaaatgacgatgtctcgacttcattttttttaatgcaaaacaaatttgattatgtattttcatggaaacctaattagttattctctcttcgtttttcaggtcaactaaaatcttatccggtggatttgtgaagctacatatatgcttataatataataataataataataataacctgtgttgcattgtgttgatgtgttttggctcctaatcaaactatactggctactgttccactaccatactaaatgaacaaaaatacaggtcgttggttctgttttttttttttttgtttattattatcatggtgtttgtattgtaagtcctttgttaaaacaagttatttggtctgctttctgttgtgtttatcaagttgattaccttttcg

SEQ ID NO: 161019 - DNA, 335 bp, Arabidopsis thaliana landsberg
accaacaaatttagaaacccaacccagaaaaaaccaatccctaagacacgattcctcataaaacccatgaaggattagaagaaatcaatcagagaagaaaggatcatgcgattcaacagcttaataactaagatcagatcagaggaaaaagcaaaattgaaaaggaagagtgaaggattatgaacaaaagtcaaagctgcttaccaaaagtgaagttcacaaaaaatgatcaccggcggtcaccgtcagagagtttgctccgatcaccggcggttaaaacaatcaattcgaagtagagagacgaaagagagagaggaggaattggaatcagagag

SEQ ID NO: 161020 - DNA, 358 bp, Arabidopsis thaliana landsberg
cctcctctttagctgcctcgatcgagtagagaggtcgagtaaactgatgcctcttctctagctgcctggatcgagtgaatggatcgagtagagtcctttttagctccttctgcacctgaaaacacaccaaaacatgcaatatgtatgcaagatgatcctaaatgcctaagggtgcaaaataagctaaatgtgatgcaaaatgatatgatacaatgagtgatcaaaaagctaaatgatgataaatacacacctaaaatgagtaaaataaagtgttatcaaatcccccaaacttatatcttgcttgccctcaagcaaacaaaaaatcttaagttgaaggagatgtttgaaggtggggatt

SEQ ID NO: 161021 - DNA, 116 bp, Arabidopsis thaliana landsberg
cctttgcaaagccgcttttcaaacaacctattacattataacaccaatggagaagatacaaaagatgatctccgagaagtcggtagtaatatttagcaataactcttgttgcatgt

SEQ ID NO: 161022 - DNA, 282 bp, Arabidopsis thaliana landsberg
ggtggtcgagtggatcctccgttggctgaccagggaatttgttcccctgaatcatcgagttgttaccactcttaatctcgaagttattgttctggatagcaggtggtgcaattcctttcctctgaccatggtcccttggtgcatctccagtaccaatgttgggagggccattttgttgattttgtttgtcagccatttcgagtggttgctgtggtatttggttggctgtgtttctcctttctctgatttcgcgagttatgcggtcgatgttgtcattgaata

SEQ ID NO: 161023 - DNA, 274 bp, Arabidopsis thaliana landsberg
  unsure (1)..(274): unsure at all n locations
caggagagagtgaagaagataggggaaatgatagagagtgatggctcagacttatgttcacaaacacccaatggggttttagaagtatcggcttgttgtttcagctttnnnnnnnnnnnnnnnnnnnnnnnnnnnnnnnnnnnntcttagaaaaaaaaactgtttttttcttacattattataatcagtatgatgtctgatgagaggttgaaaaaagaggacaataaatcaaagcaaaaattttaaaataaataaaagtgtattaatttcaata

SEQ ID NO: 161024 - DNA, 223 bp, Arabidopsis thaliana landsberg
aatgaaaaaagaccaccgaatggtgactttcaatgctagcagatcaattattattttttacagaaatagtgaaaagtcattttacactaaaacattaactcgaaattaaaaatccaaccccacatttctccctctttctcacattcgccccaacatttttcttcctcctctatcaaactctcaacgaccgaccaagcgaggatcaacctcaaccctagcaaca

SEQ ID NO: 161025 - DNA, 157 bp, Arabidopsis thaliana landsberg
acctaaaaagacactaaaaagactcgagaaataacataaagactcaaaatcctatacctaaaacatagataaaatcggtgaaaatcaggttatatcaactctcccagactaagctcttgcttcccctcaagcaaaacaaaaaagccgaacccgtgga

SEQ ID NO: 161026 - DNA, 83 bp, Arabidopsis thaliana landsberg
ggaaattagaaagcgtcaaagaaaacgacgaagcctgtttggatcacactgatgtgtcaacctgttgtttcccaggcagatca

SEQ ID NO: 161027 - DNA, 80 bp, Arabidopsis thaliana landsberg
catttataagggcaactctagggttcatcaggtggctaacatgcgaaagtcaaataccctagacgatagatttaacaggc

SEQ ID NO: 161028 - DNA, 382 bp, Arabidopsis thaliana landsberg
tcgctgatcgattagcatagaacaggtcaggcctgttgaaatccccaagagtacgacgtggttccgcagctagaggaatagctacatgaatctagtgtttgtgtcgatcgacacatgtgttgtgtcgttcgataccaatcgcgtcttcattctgctcccatgggtgtcgatcgacatctttgttgtgtcgatcgacagcgaaccctgcatctcaggcagctaattgcgcattgaggcttgctgattcttattgacgtcctcaggtaggacgagtccataatcatccaatctctgaccagcctcattgtaggcttgcccatcctcatctctcaaaactccttctacatcagctcggatgactctgtcagccattgctaatctc

SEQ ID NO: 161029 - DNA, 197 bp, Arabidopsis thaliana landsberg
tgccgtctgaatctagccttgcattgcgggcaacactgagatccatctttcctctcatactcataacaagactgacacaaaggaaaaccacattcattacaagcgacaaagacattgccagtttttgtgagtccaacatcgtcaccacagatctgacatatctgatcattcagatctttcaagggttttagctgcac

SEQ ID NO: 161030 - DNA, 339 bp, Arabidopsis thaliana landsberg
ttgcaaacagaagttcagattggggattcaatgaaggaagcaaatgtgaaaaagagacagaaccaatactaaacatgtcaaaaccaataaatgttggaacaaatcgaagactttacgaaatcgcactgaatgcgaccaaatctacaaaagtgccgattcatttcctcaacataacgactatgtcagagtatagaaaagatgggcatacctcattttacggttcgataaatgggaaactcatgacgccggagcagaagttagatccgagaacttttgctgattgttatcattggtgtcttccgggattgcctgattcatggagcgagttgctctctctgt

SEQ ID NO: 161031 - DNA, 382 bp, Arabidopsis thaliana landsberg
ttgctcttcgtgctttgtatcgtgatcatcgtcggtgttggtaactgcacatttcaggtatttactcttacctcctcactttcgcaacaaattttgatttctgggtttttcatgtttttcttcttcaattgattgggttttctactgaaaattttcaactttttttctgggtttttgtctaaagtctaaaaccccttcttaaagggtttcttctcttttgttatgtcggcgatttcgatcaatagtgtctctgaaagttttcagctttttgatgatcggagattataagacgtaaaattgggttagttttctttttacctagtaaacctaattcttgtgttggttttgatcttcttaaatgagttttaaatcatgtttattt

SEQ ID NO: 161032 - DNA, 259 bp, Arabidopsis thaliana landsberg
tcatccggcaagtggagaaatgggaaagctcttactggcaaaaggttctgtaaagtgatatagtctaaatttgatgatgtaagtttagttggggatttttatagtacctttttttatctattggataacgttagattgattataattttgagcaattaaaattctttcttataaacaaatgagatatgtacccctttctaccaatttacttatctttctctaacatgtcagaaaaatgcaaagttcattcaatataaat

SEQ ID NO: 161033 - DNA, 422 bp, Arabidopsis thaliana landsberg
gttgaagatgaatgtgtgttcttacgtgaaggaggatagtttccagaggattgaaaccagatttcgatttcttcagtctcggaataaagctcaggtctagagaaatcatagaacctcggtgcatcgaattcgaaatcaatatcgaattcgaaatcatcgccagaaaaactcattatcctcgatgatgattcgggaaccattatcaatcctcgatgataactccgatctcagacgacgggaatcaagtaggagcgtttcacatcaatcgaatcgaaaatgtccttctccttctctccctcctcctcctcctcctcctcctcctcgagaatcggagaatctctggaaaaaatcgccagaggataagagcgaaggagagagagagagagaaattggagatgagagaagagctctaacttttcttg

SEQ ID NO: 161034 - DNA, 211 bp, Arabidopsis thaliana landsberg
aagagagattggttggaagaggaaagccaagaagtgcagaaagtgcaatggcaatcagaccatcttggtgttctttgcaacttctcgaccaccgtggagttgacagtgagtaatgtctttttagttgacggtgatctcttcttggactcatcacagcatttaacaacatctttcttgaagcacttcaccagcttagtgagcttggtgagga

SEQ ID NO: 161035 - DNA, 263 bp, Arabidopsis thaliana landsberg
tttaactcacagtacaccatatgacgatttattttttataagtagtgtattttaaaatttaatcctcttattattaaaagggaagtacaaattgaaaatttgtctaatttggtcttaattttgatttcaattttggattttgttttttgctattcaaaatcattaagggtaatttggtcttaacaatctcctaaactttatatgatctgattcaatctaaaccgttcaataaaattaatttccttcaatttaaaccgttcaac

SEQ ID NO: 161036 - DNA, 603 bp, Arabidopsis thaliana landsberg
taaatcagaactttcttaggcttttttttttcaagaatcaaaccatgtttgttcgttatcataaaacgttattaggacatatatttgaataacacgtcatgagtaggacttaatcgttattcgttaatacaaagatcatgcaaatctagtttgtaacaagtgaaaaatttgagaattgtgttttaaaatctttgattatcgacgacgaaaacaaaacccaaaaacaatggaggcgcatgtttaacactaaaatcgaaagcgcatgttagcggcaacagcgcatcttaaagacaaacattctcgtctctccttctacaactactttttattttttctatcttcttttcacacattcgtcatcatcaccatccgaattttccgggtcgggtaatttattcaaatcgacccgttccaatgacccgttaccgctcttacgacaattctcaatcttctcgtaatcaccgcgattctcgccgccggtattcacaaccaccgtcgctccaagcgcatcaacctgagcaccaacctccgccgcttttctcctaatatacgccgccgataaatcaccacctcttcctccgccgttagaaacagtaagtccag

SEQ ID NO: 161037 - DNA, 434 bp, Arabidopsis thaliana landsberg
  unsure (1)..(434): unsure at all n locations
attttctttaaatagcaaatactacattgtttttagtatatcacaacaacaaaatttgattatgtatcataaacgaccaatcacaaatcatatacaactagacaaaaataatcacatatgttacaccttacaataaatctgaaaactaagtatagtatattatattatcgtttaattaatatctagatattaattgaataattcccatttaaattttgggtgaaccggtctaacgggttgtagggttgccgtggaggctgaactagaatcaaacgtttcccatcttgttgttatgatcaccggaggacttgatgaggaggccgtcggnnnnnnnnnnnnnnnnnnnnnnnnnnnnnnnnnttcccgttccttgtattgcggctttggtttcgtttgcggttgccttgagttcttgatcttcaacaagtcgagag

SEQ ID NO: 161038 - DNA, 628 bp, Arabidopsis thaliana landsberg
cagtgtttgatgcaaaagtttgagaaagaagaagaagaaatgggattacagaaatgggtgagatcgacgagtgggaggaatggatgggattcgaaggagggataccatcaggtatttcttactagatataatcatttgctacaatggatagtagtagaatcagagagatggagagtacaatttttgggagcaagacaacagttgcatcttggaggaagcttgtcagcgccagaggaaggtcatgtcatgtactctacttgtaagcaatagagaggacacgcgaacgctgtctttgttgtagtaactccagggattattcctcctaaaatagctcctagtggatttttcaaaacaatgaaacacaaaatttgattaaatttctgattgtgtaattgctaaccaaattgaggagaggaataagtttttaaaagttgaacctgctatgatgaaagacatcacccaaatcttgtatggaaccatttctttcttggaggatttctgcttctccggggttatatatagatgaagcttctaaatttaaaaactagtgttttgaatacctccgaccgttgactctagattgggttgaagttgaacagtcaaagtcttgtttactttgacaaaacca

SEQ ID NO: 161039 - DNA, 413 bp, Arabidopsis thaliana landsberg
tattaaaaaattgttaatgatattcatagtgtatcaactatgtgcatgctctaaaaattgttagttaaccatatatagtttattttgtgattcacaaaacagcggaataacgaaattatttcgaattttttgtaaattaaataattacgtaaaaacgcattagaaagatgttgaggaataatttcatttcttcgctattaatcaagaccttactaatccataacccgtggtatacagcacggacattaatattttgtataaattaaattgtatactttgtttgaattacataaaaaatagtatagtataaaagtaatgccataatatttttcaatgttttactatttacatataatgcattagattgactttgtttaaaaatgttattgttataataaatacaacatatgtag

SEQ ID NO: 161040 - DNA, 991 bp, Arabidopsis thaliana landsberg
  unsure (1)..(991): unsure at all n locations
acgaaagaaaacttgctcaacgacgattcatcaatcatcatctccgatcttcttccaaatctctccggtgaaaaagacgatgtacgtaagagcacttccgacgacggatgtgaatcggaacacagagtggttcacatatcctggtgtttggactacttatattctcatcctcttcttctcttggctcctcgttctctccgtcttccattgttctcctggcatcgcttggaccattgttcatctcgctcatttcaccgtattattcccgatctcctccgatccaatttcgaaattgttggtttctagatttgaatttttgagtttttttgttttctaggtcacgtatcattccttccattggaagaagggaannnnnnnnnnnnnnnnnnnnnnnnnnnataatagattgacttggtgggaacagattgataatggcaagcagcttacacgtaatcgcaaatttctcaccgttgttcctgttgtcttgtaagtcccagcaccttgttcctcaaaatctcaccactcttgtctatttccaatctatattttcttagcaaattattttctttagctgcatatatccttgtgtctcatatggttaataaatatgctaatttctcaatacacatatctaaatccggtgatgtgtaacggactagttctagagaactctgtatacgcgataatgtgtataaacaagagctgcatttatctggatgaacttttaagattgagctctttagcttttgtacttgttttctgactttataacgacacatttaaaacaggtacttgattgcatcgcatacaacagattacagacatccatggctgttcctcaacacactcgctgtgatggttctcgttgttgccaagttccccaacatgcacaaggtacgcatctttggtatcaatggtgataaataagtttcctttacggcaagagaacacctgaaagaaggaaaaggggatataagcgaacatatatatg

SEQ ID NO: 161041 - DNA, 237 bp, Arabidopsis thaliana landsberg
ctctctctctctgtctctgtctctctctctctctctctattctatgtacattcgcagcgctaaaaatggaagaggcccaagtgagagaaagatggggaaaggcgaggagatatacgggagagagaataccattcctatatttagagtacagacacaaaagcttcaattgttggggacaaacggaatatgttttctgaagaaaggattggggggaggaagaatgaaaagcgtcaggat

SEQ ID NO: 161042 - DNA, 344 bp, Arabidopsis thaliana landsberg
gtactagattttaacccgcggtataccgcggaacaatttatttttttaagttaatatatataaaaatttacaaattatatctatctataaaatatttttattttatagtttacaattgttattaagtaacgtcctgccaaacccgtcccgcaaaaaaaaaacttatttattttgttaacgttgatcttatttatgatatgtttatgaatcattctctaaatattttaatcgatgtgggacgttaaactcacatatttttcgccaattgtttaatatatgttcattttttaaatttcgaatcacaaaatatgacggaaaaaaatttgagatttttttaaactcta

SEQ ID NO: 161043 - DNA, 180 bp, Arabidopsis thaliana landsberg
aattcattgcataaaagttatgtaaagtgagtttaattaggtttagagagatcttttaaagtttttctctcttttctccttgttgtaatccagtgtatttaatcaaatctcagatggagttcaaatttcgagatcatgtttgtttgttttccaacaaatctaatttacaagaagagtaga

SEQ ID NO: 161044 - DNA, 159 bp, Arabidopsis thaliana landsberg
gaccgggttagttgtcaatgatagagaatcaaacaaatatctaaaatatttctatatgacaagatttctaaaatattttacacccaaattgcaaaatacactatatgacaagatttctaatgtatcctacgaggaaagatcctagctagccagctcatt

SEQ ID NO: 161045 - DNA, 122 bp, Arabidopsis thaliana landsberg
gcattacatttcaagaggtcaaattgcttcccagtacgttgttgctgcagtcactggatatttttattctatagcatgtgcagcaaatgccaaaggagttgatgatagtttacaggtaaagc

SEQ ID NO: 161046 - DNA, 295 bp, Arabidopsis thaliana landsberg
atttggacttagaagcatcagtgtatctaagtctatttccaggtaagagattatcaggtcttagtgctgaaggtaaagagagcttataagatttgctcattggatcattcactgcccatttagcttctttgctttctttcccctctgagtaaaacctacaaagcaatacacaactcaaatctgtaatctgaaacctaactagagatttaagttaaacccagtacccaaaatcggagcttgagcttgtaacatctaaagaagagataaatctaaagcaaagtctagaatttttaat

SEQ ID NO: 161047 - DNA, 253 bp, Arabidopsis thaliana landsberg
ttttttcacttttaaaccagaactaaaaccttggtttccttgattcagaagagaaaggaataagagcagaacccaaggaaggtttctcatcagctttcatttagatcttgtcacagaccaatcatattcttcttacatgtatcaagaaagagaaagatttagacctttgaaatggcacgtaaggataaacgctcgaaaaaaagctggctaaagtatccaccggagaagtagctaatggagcgacgagagaaaa

SEQ ID NO: 161048 - DNA, 167 bp, Arabidopsis thaliana landsberg
gagaaattgtgagaggattcagaatgtccggagaatcgagttccggtggaagaagagatccgggaaggaggagaggagggaagaggagagagagaagaagaagagttgttgccatgctcagagctagggtttagagaggaatctgaagaaggagaagacgaattgtg

SEQ ID NO: 161049 - DNA, 358 bp, Arabidopsis thaliana landsberg
tttacccttttctttgaactccaaacccctttactagactaacactttcttttgtatcccccttaagaactctaaactcttactctctattttttcttttctttagattcccattctcttttccattcattccatacacaatcccaatcccaaatacaattctccacctagtcctagctaacccaaaaagcgtgggcgaggtctacatgaaagactgctcttgtcggctcattcctaacacgttataccaagctcaatcgaaaaagacttcacaatcacacacaaatgatctttggcttgaaataaggctaggctaagggtatgggaaactgctctaaaaatgagagactgctactta

SEQ ID NO: 161050 - DNA, 356 bp, Arabidopsis thaliana landsberg
cgttagataatctgttaacgactgataacagatagtttatttggcttggataacgaatgtttatggtttaaacgggtggttaacgatatcttcatgtttaaaatggccacatataaaattgtggtataaaatggccataatttgaaagttggagtattaaacgacatttttcctgttgtaatttgtcaacaccgtgaattttattgggtggggttatctttgtcttgtgttgtgttttcattggtcactaaaatttgacttttttcgtccaataatttttgaactcaattaaattataataaacttttttttttgtcatctgataatttattaaagaaaaaaataataaagtacat

SEQ ID NO: 161051 - DNA, 88 bp, Arabidopsis thaliana landsberg
ctacaagaaaacctaccatttgcaattcccatattggtcccaaaatggtcgcaaactaggcgtttacgactacttaacgacgatatta

SEQ ID NO: 161052 - DNA, 751 bp, Arabidopsis thaliana landsberg
agtcaatagctttgttagtggttctatggtaaaaatatgtcacaatccaatgcatttgactaatcataagagttaaagatcgattagaagtgtttagacaacatttatactcattttctcccaaaagatgctaaaacgaacaaacaattgcttagaagcagtccatagctttgttagtgtttctatggtcaaaatgtgtcacaatccaatgcatttgactaattataagagttaaagatggattaagagtgtttagacaactaaaacagcaatcagatcgttgtagtattttaggttgtaaatccaaatgggtgtgatgctaacaatcaagatgtgatcagaagtcactaagtcaagccaagcaataacaggttttggtgcgttctagcaatcctaagtgaacatgcagaaaacagaaaatcaagcagaaacaataaaatactcgaccggcgcagctcgttgtagagcactgggtgtggttgaatgacaggtcgagtaaaagacagataaagtaacagggatagtcggctgcacagtctcttaccagacaactgggtgatcgagtatcaggtcgagtaataggcaaaaattgcaaaaactaagcaacaggtaacaagatgcagtaaacaatagaagagtaaataagaaatcaattaaataagaaattcccgaggatgggataattgagtagtttcgtttccttagtttacaggtgattgacatgctcaataaattatccatagacaacaag

SEQ ID NO: 161053 - DNA, 149 bp, Arabidopsis thaliana landsberg
cccctgagatcctgttcttaaattgagacactgagcctgtccatggaaatctacgcatggaagattctcgaataagtgacggttgtccaagcatcctattaatataaccccatgtaactctagctccttcactgtcaaacacaaaaaga

SEQ ID NO: 161054 - DNA, 301 bp, Arabidopsis thaliana landsberg
tttgctatattctagcgaaaatataatttattaatgacttgtattttacatgccaattatacgactgaaatgttataggaatagagacatgtttggatcacaaaattaacttatgtaggagaaacaaatactatataactctaacgttcccctctctgttcaagcgttaagcctcccttgtcacatttaggacaactcttcataccaaacccttgacaatcaaaacatctggacatattcaaaatcccaaattaactctacttaaagtactcattgaacagtaaatttttagattgatatt

SEQ ID NO: 161055 - DNA, 125 bp, Arabidopsis thaliana landsberg
caccacctggtactcgaccacccagttatctggcaacaaattgtgcagccgagtatccctgttatattttctgtttgttacttgacctgtcactcgaccacacccagtactctgcaacgagctgt

SEQ ID NO: 161056 - DNA, 297 bp, Arabidopsis thaliana landsberg
gtgagatcctgttatggacctatagtcacgagccgatattcatcatcggtatgaaatatgttcgcgtttccaatgatttgctcttagtaatattatatggcatctgccacacgagtatatgtgtgaatatatggcatatatgattgatgcagataagagtttcaaagaaatgatgtaacgagaggatcttccagagagagatatatacaggcagtaacaaatgacgttctgaagtgactcttctaatcacatatatagctgatgatgtagccaaaatacgagctggatccaaatcat

SEQ ID NO: 161057 - DNA, 461 bp, Arabidopsis thaliana landsberg
aaaatgcataatagttgagaacttaaatactactttgagtactttcactaatacatattgctagaatgaagcttctttataacataaaactactttatttgttgtaatctttgtaatacaaattttatttggagctaaactctattggtcacggtaaatattcaactaccaggtgtagctttcttgccggttaagctttacaaggagaaagaggagagccagacagacagtcattacccacaaacgcactggtcgggaactttgttactggaagctttccacaaagatggttatgactcaagttcagtttttgcagtttagccaccgtcattggtaccttcccaaataccaaattccttgatagatcgaggctttctagcctctcacttaaattcagcttccccatgtcgaatcgaagtttgttccctgacgcttgaaactcatacaggttatgcgctagg

SEQ ID NO: 161058 - DNA, 185 bp, Arabidopsis thaliana landsberg
tggtgcacaactgtgccttgatttatttaacggctacattagaaattcaaacgttttgatattactatatgtttaaagaagtcacaaaaactaaacaaagacaaacaagaccaacacatcacgaggattcttgctttattagtaatgttgcgattcgagattaaggcttcatagcatagctaaaa

SEQ ID NO: 161059 - DNA, 125 bp, Arabidopsis thaliana landsberg
tttattttttgtttttttatgtgatttaattttttatttggttttttttatttagtttatttatttattttttttatgtttttatttttttattttttattgtatttttatttatttattttttt

SEQ ID NO: 161060 - DNA, 1014 bp, Arabidopsis thaliana landsberg
attgtttcgtacaagactgattcatcatcctttagggttaaaagtaatcgtgttcagacaatccaaaacctctagatctctattctagttctaccaataacctacatatgtcatgtagtaaatagttgtgttgctgtttcttgactattaatgttgaagagttaaaaggactccaaaaacaaagagattcaaatttacagttggttattgtcccaaacggatttcacattagaagaaaacgggttggatccgggtcaactgaagattacaaaagtctaaatgggtttcagtctttcagacactcatacacaaaatttactctctacttccaaaagtcaagcaccaagattcactaatgaatctaaacctaacagaaaacaaaaaaaaatccatccttcactttgctcattgttctaggcgtgtcttctgatcggtgagtgaaacacgatctccggtgaagatagccatcaactcagccacaagctgcttgtcatcatgtttgctaacatacatatataaaaacgactcactagtacttgtcaaaacagaggatattggagggagttcactttcgagcaatcctttggacatgagggctttaattacattacaccttgggatagtcctcttctccaggctgtatccaagtaccgcaggggttgaaaccactgcctttagtggccaattcatcttcttcaccagaaactcagtctttttcttcaccgtctctgcagataaaataaggcattgaggaaagcgcttggctatcattgcaaactcatctctgctaaatcctaggcctagaaatgtttcaatggagttcaacatcttcttctccgatactctcagcgagattggccactttttaaaacttgaccatacatctcccacatcaaagcctaagcttttatagagatggactttttcttcgattgttttctcgttcattttgtaaataacttgtagagcttcgacaaactttgaggtggtaggatcaaaacccatctcaacaac

SEQ ID NO: 161061 - DNA, 230 bp, Arabidopsis thaliana landsberg
ttgagcgtttattgatctgcgactgcgagatccatcttcttcttcttctccttcttcttcttccaacgaatgttcctatgatctctgtgtatgaacagaatctgtaatcagatccattgtagagagagatagccatttcaattcgaggtagccaaagatgtatatggcttacgggtggctgcaggtgatcccgcttctacctggatcgcagcgagtcgtgtaccttaagc

SEQ ID NO: 161062 - DNA, 309 bp, Arabidopsis thaliana landsberg
  unsure (1)..(309): unsure at all n locations
ggggggggaaggaggggaagtggggggggaaggggggggggggggaaaatgggggggggagaaggagggggaggggagggggggggggggggggagagaggggggggggggggggggggaagaggaaaaaagnngngaggggagggggggggggggggggggggggaagggggggggggggaatgggggattgggttggggggggncccaggtgnnnggggggagaacatagaaagagaaagtggggggggggggggggggggggatttggggaaaaaaaggggggggggggggaattgaagggggggg

SEQ ID NO: 161063 - DNA, 173 bp, Arabidopsis thaliana landsberg
tcgggcgctatccctacttgagaacaggcgcatgtcttcatttcaaacgctctatgacgcatccaatatcatgggcacagcttttctcctagctctcctcggtggtttcctctccgacgctttcttctccacttttcaaatcttcctcatctcagcttccatcgagtttttgg

SEQ ID NO: 161064 - DNA, 272 bp, Arabidopsis thaliana landsberg
gtagaaaaataaattaaaaagtcaagagaaaaataatttttttaacagaattgaatatacaaacaacaaaacataagaaaaactaaattaataaacatttttaaaagactttagtattgtattttacgtaaatatttctataaattaatatttattattttatccaataaattaatatttattaatttataggataaattaatatcactataaattaataaaattttatggtcccaacattattaattaatagagtttctactgtatttata

SEQ ID NO: 161065 - DNA, 349 bp, Arabidopsis thaliana landsberg
tcccctctgaggcaatgaataattggtcgagtagctgctcctctggttcccctttggggcaatagggtagagggtcgagtaaactccttgtaaacttattttgcacctgaaaacacaccataacatgcaatatgtatgcaagatgaccctaaatgcctaagtgtgcaaaataagctaaatgtgatgcaaaatgatatgaaacaatgagtgatcactaagctaaatgatgataaatacatgcccaaaatgagtaaattacagtgttatcaactcccccaaacttatctcttgcttgccctcaagcaaacaaaaaatcttaagttgaaggagaggtttgaaggtggggatt

SEQ ID NO: 161066 - DNA, 362 bp, Arabidopsis thaliana landsberg
tttatcactggtttgttctttgagcttcgatgaaattcaaaactgatatatacccaaaatacaaattctctgttttagaatgatgaagattccaatttctagcaaaaagaataatcaaagaataagcaaaagataagaagaagacaaaacagtaaaggacttttcctttgtttttctctaaaatatatgttttggttcttcttcacatcctaaggcaacaaaacaaaaatgtggctctcaagtgttaaatgggtaaaagaatcaaagattgaaccttttctatctacggagccataagtccatcgatcgtgtaagaaagtgatttcatccaatccgttttcagcagcattgtttgtagagta

SEQ ID NO: 161067 - DNA, 518 bp, Arabidopsis thaliana landsberg
tccgctcttcaacccaaatatggctccagcattttcagcgggaatatagagtcaacagagttaaaaggtccctttgcatcacccctgtagttcctttccagctaatgaaattacccaatctataccaggacctactacaaaggtttgcagcaacgtctctctctggtttttgcacaagttgtttcccatttgaagactttttctctaatcaaaaagccttgttttcttttcttttataggtgtataaaaaaacgttgcgtcaactgcaccaaagttatcgaagaacctgtattatgtcttctgtgtggaagtttgtgttctcccatatggagcccttgttgcaggtattgccttcacttccactagtctccaaacatcgttttggttgacactgttattgttctagaaaaccaaataatgacgttctaacatacttttacagagaaagtggttgtcctaatcatgcaattacctgtggtgctggtactggtgtatttcttctgatacgggtatcaccg

SEQ ID NO: 161068 - DNA, 145 bp, Arabidopsis thaliana landsberg
gaataagagactgatgatgatagcttaatgcgcgacaaagtccgaagctttttcatgaatgagtatatagattagaatgtactgatcagtcccctgtcgatgactgcgttgtattgtctttagagtaagatcaatgtaattgagg

SEQ ID NO: 161069 - DNA, 256 bp, Arabidopsis thaliana landsberg
cagttcctaatttacccaagaaaaaaacaaccgtgaaaagaggtaagaagaaaaacaaattcttcaaaagcccatatcatttttttttacatggagaccttgttgttatgctatctttgggtatttctgtttggcacttctccactttaaacgatgctttcaaatgcaactagtgtgtgagaagaagtgggctttaagctccacgatgagtctccaagacctcttaggagcttaagcacgtcggcttcatcagaca

SEQ ID NO: 161070 - DNA, 331 bp, Arabidopsis thaliana landsberg
acctcaattacattgatcttactctaaagacaatacaacgcagtcatcgacaggggactgatcagtacattctaatctatatactcattcatgaaaaagcttcggactttgtcgcgcattaagctatcatcatcagtctcttattcttcttcttctgcttcccccacttggtttctgaatacacttttcaagtaaggtaaaatctttgaaagcacatgtaagtccgccatgttcatactcatcatatcaaaggcaatgcatgtattgtgcatatgtgattcgtcaatcaccgggatctttgggtatctctggctaaaatgtgtcagtacgg

SEQ ID NO: 161071 - DNA, 87 bp, Arabidopsis thaliana landsberg
  unsure (1)..(87): unsure at all n locations
tttttttttttttgttttttttttttttttattttttttttttttttttctttannntttttttttttttatttttttttttttttt

SEQ ID NO: 161072 - DNA, 383 bp, Arabidopsis thaliana landsberg
acatccatgtctatgtaaggtgtcttcagtacagatttcttataattactttagtttaactgccctcacctattgaccaatgctttttgtcgacataatctggtacatactcatcacccatgagaaaatcacctgttagaaccaagacatagatgatataagaagctaatcaatgcccaattggccacaactagaaaaatttatgttcagcgggactggaaatgcttttgattagtttttttttatacctgacaaggtgtgttagccatatggccaagtctagttttcaactgatcatcactaaggtcagaactaaacatatcgtcatctcccatgtaagcgcagagggagtgatatctgcaggaagcaagcaaaagattgat

SEQ ID NO: 161073 - DNA, 448 bp, Arabidopsis thaliana landsberg
gataattaaatcagagaatagggctgggcatatgagtaacccattcgagttcgggtagaacccgttcgggtttgggattaatgggtatatgatttactacctaatagaataattctaaatattcggttcgggtcgcgtccagttgggtttaggtcagtttggatgaaaagtttcaggccctaaaaatactcaaaaaatagaaacgggtattttgtatgtagatagtgcgtctccaaacaaaaaaaaacttttaaatttattaagttttaataaatttaattatatttgaatatattttactaaattttgacaaatataacaaataattttgacaaacataacaaacataacaaagtatacaatttaatttatacaaaatattaatgctcgtgctgtacagcacgggttatgatctagttcttttttattatcaagcgcgctaatttat

SEQ ID NO: 161074 - DNA, 374 bp, Arabidopsis thaliana landsberg
gcccaaggagaatggaaacaaacggagattgaatccgtcttcaataacaccattgatttttgttaggttgcagagcctatcaaattcatcaaggtggtcgagtggatcctccattggcagaccatggaatttgttcccctgaatcatcaagatgagaccactcttaatctccaagttgttgttctggatcgcaggaggtgcaatggctttcctctgactgtggccccgtggtgcatctccagcaccaatgtttgcaggcccattctgtcgattttggttgccatccatttagagtggttgctgaggtataaggttgattgtgagcctgctttctctaaggtcacgagctacgcggtcgatgttatcgttgaaaa

SEQ ID NO: 161075 - DNA, 192 bp, Arabidopsis thaliana landsberg
aaaccctagagaagagaagtggaataagccagtgttttggatcacttccagattcatccaaagcgaagagcttttttttctcaaccctaatcagtgatttagtaacacacgcaacacacaaacgaaaaaaggtaaaatttgtaaacctatgagacttttttaggttattattatagaatttctctagagaac

SEQ ID NO: 161076 - DNA, 299 bp, Arabidopsis thaliana landsberg
aattgcttagaatcagtaaatagctttgttagtgtttctatggtcaaaatgtatcacaatctaatgcatatgactaattacaagagttagagatgacttaggagtgtttagacaacacttatacccatttcctcctaaaagaggttaaaacatacaaaaaattgcttggaagtagtaaacagctttgttagtgttattatggtcaaaatgtgtcacaatctaatgcatttgactaatcataagagttactgatggcttaggagtgtttatacaacacgtatacccattttctcccaaaa

SEQ ID NO: 161077 - DNA, 231 bp, Arabidopsis thaliana landsberg
gaccgcaagttcttccggttctctgttggaggactatccgatgttgctgagattaaggtatacacatgacaaaactatgattgaaatctgtagaaataataacatatcatcttatacattgtttaggggcatcgtcgaacgtatattggtgccatgcctggaaagatggtgcagtgtctaaagaatgtgggaacagaaaatcctcttgttctgatcgatgagattgataag

SEQ ID NO: 161078 - DNA, 416 bp, Arabidopsis thaliana landsberg
ctcaaactcttattacacaataactagtgatattccgtgatactcattatgcctagagctaagattcctcttgatgtaccgtgaaatcctatacctaaacatgcatgctaaacgagttcgataagttcaccttagtagataggccgattcttattacacccctataaaacaggctcatcaaatagtagttctagtaacatatacctatggtggggatatctattatctgtaatcaagttctagttaattactctagaactagcattaagaacaactaaagaggaagaatcttacagataacctaacaagggggcaatctactaaaccatatgaatccctagtgagaaacatttaccctaacaagcagactactcagacatgatggatgaaacaaacaacatgaatgaataataaag

SEQ ID NO: 161079 - DNA, 352 bp, Arabidopsis thaliana landsberg
tcttattgtcctgcatctttcagagatagtaagcagaagctggaaagtttattacagcaatggtcagaatgggaggcagaacaaaattccttgtccgaggtatctatgatttgaactcttctgtagtgctttatatagccaatacaataaaccttgtggtttgcaaaagtgaatcaatttcaagttgtgattgaaagaacaattgtagacgaaatttcgcaattctgcaagaaatgataaggacacttgtttgctgactatttcatgttattaactaagctagaaacttttcgtttggaatatgatcaggatcaagaacaagtactagaagctggtgatgagacatactttc

SEQ ID NO: 161080 - DNA, 366 bp, Arabidopsis thaliana landsberg
tttcaagtttctatgcaaattatatgttactttaatattttatgattatctatattatttagtctcttttatgattggttgaactttttaaaagtaaatattcttaactgaaacaacttatattgtaaaacggagggagtattaattaaaataaaaatcactaattttctaacaaaaatatcaacctgcggtttaccgcaaatcaatctgtagataatacatgtttaaaatatttattacctctaaaaaaccttaaccacaaaaatactgaattttaatattaaactaatatacaacaaatatcagaacataaaacatgaattatccaaactttacatagaaaaaaaatatatgtcaaaaatatat

SEQ ID NO: 161081 - DNA, 398 bp, Arabidopsis thaliana landsberg
cgatctagaggatcccctataaatattcaaattatgatccaatactcagttagaaaatttttttaaatctatttttgacccgttataataatttttcatgtcttgaacagtttatattcgtttttaaaaattcaaattatggcatatgcgaaaaaactctaattatttttttataacgataatattattttttcgcaaaaatagaatcatataaagatgagaggtgaactataataattaataaaaaattaatatgataatttagatatcaaatctaatttgttgattttaattggttacttttttggaaattaataatatatttcattttttaattaaatttaattaattaaattagtatttgactttttaatttttcaagagatgaatttatttac

SEQ ID NO: 161082 - DNA, 325 bp, Arabidopsis thaliana landsberg
ggaactgaaacatcgtcttattctttttttttctgttttaggatcaacttgggattgtctatgactatagtgataatgccacaagcccatttttttctgcagatgatggagagctctcggagaaccaaaatccgtttaatcatccaactccggagcctgaaagtgtttgtaatttcttctttatctgaatgcagaaacactcttgtgtttcctttgaacattttgcctgcctttttttgaaacatagatctcaacgtgtatgttagcacaggttgtttttctctttattagcaatgaattaaaaaatcagactttgggtaaaaaa

SEQ ID NO: 161083 - DNA, 103 bp, Arabidopsis thaliana landsberg
ttgctgtgtaagtctgaactcctactttccgatatagcttagctccataagcttgaccactcaaagtatctaaggcacatgacaatcctacctagcatcaaaa

SEQ ID NO: 161084 - DNA, 97 bp, Arabidopsis thaliana landsberg
attttttttttttttttttttttttttgttgtttatttttttttttttctcgtttcttttttttttcttttttagagttttttaggggttcctctag

SEQ ID NO: 161085 - DNA, 196 bp, Arabidopsis thaliana landsberg
aacttaaagatattcgtctgattgttctctctcaaattggctcatcctctccattcaattcatcccaagtaccaaagcaagctacttcgatcttcctcttaatactctcgtttctaattgtaagtctacacccattcctcttccaaagtttgtgttgctctcataatagtagataggaagagatcgataaaaccag

SEQ ID NO: 161086 - DNA, 145 bp, Arabidopsis thaliana landsberg
ttcatagatgaggtgctctaggaacgatgctaagggttagcacagccaatagatcctgtacaccgctgatatcacttgggttatggctggatttctccagtaccactgaagaccctagtccgtcaagtaataacattaacagcgc

SEQ ID NO: 161087 - DNA, 404 bp, Arabidopsis thaliana landsberg
  unsure (1)..(404): unsure at all n locations
gagacaaaaaaattgtttcttttctaacaacactctcacatgtgtttagtaatattctctctttgaacaataacactaagccaataaaaacannnnnnnnnnnnnnnnnngtagcaggaatttttctttgtgatagtgaagtttttggagttgttgctactcatgcttgtatccagacgccttcccgcttctcccaactatataaggctccggcaaagtattctcactatttatctccaaaccgcgataaactcggttaaggaaatactcaggtcctgattttgcagcggtttgtttagtcaatgagttatgatcattgcctctcaactgcaatgctttctctgcagcttgtaccaatgtcattgtctctcctgtgtcttcttctccattcttagcttgatctg

SEQ ID NO: 161088 - DNA, 359 bp, Arabidopsis thaliana landsberg
tataactagattttatcccgcggtataccgcgggtgacaatttatctttttaaagttagtataatttttttttttgcaacttgtatctatctataatatatttttattttatagtttacaattgttattaagtaacgtcctgccaaacccgtcccgccaaacccgtcccgtaaaaaaaccatttatttatattaatgttgatcttatttatgatatgtttataaatcattgtctaaatatttttgtcaatgcgggacgttgaacccacaaatgttttgctaattggttaatatatgttcattttttaaattttgaatcataaaatatgacggaaaaaattaagatttttttaaactcta

SEQ ID NO: 161089 - DNA, 442 bp, Arabidopsis thaliana landsberg
atctttatctcaagagaattgaactttgttgggttttttaatttttccttcattgtgtcgtattattactctcgtttattaaaattactatcaaacttttacaagtaattttaagggttattccaataatttaccttttaaaatctcttgtaaaatcctgtttaaaacgtcttttaaaatccttttaaaataccttgtaaatctttcgttatgccacttgcatatacttttaacgattgtaaatcaagttaaacacttttacaaacttttaaattcccttgtaaatcattctatgccactaagttatgcttctaaaacgattattaatcaagtaaaccccttttaatagcttttaaaatcccttgtaaatcattctttaccactttctaatcctttaaaaatgattgcaaagcatgtaaatcctttttaaaatcccttgtaa

SEQ ID NO: 161090 - DNA, 388 bp, Arabidopsis thaliana landsberg
ttgttgagctaactggggagacagcattggatcttaagctgcttgagaaaggccagataatcataagtactcctgagaaatgggatgctctttcccgcaggtggaaacagagaaaatatgttcaacaagttagtcttttcatcgtcgacgaactccatctaattggaggtcaacatggtccagtgttggaggtaatcgtttccagaatgagatatatttcaagtcaagtcaataataagatcaggattgttgcgctatccacttcgcttgcaaatgcaaaagatcttggggagtggattggggccagttcccacggccttttcaacttccctcccggagtccgtcctgttccactggagatccacattcagggagtggatatatccag

SEQ ID NO: 161091 - DNA, 412 bp, Arabidopsis thaliana landsberg
ataaaatattttgttttttctgtatatgatgtaattcaaatttttaaaatcgacatgtattattcaatcgatgaagaaataatatgtgtacaatgtcccacatcgcttaaaaaattggacaatggttcagagccatactataaaaataaccaaaatgatttagattaggaatgagcatgaaacttgatttatgaggtgtccaaaattaaaatagtttgtttactagggttatttattttaaagaattgaaactttaaaaagtttcaaaaaattataaattaaattttacaagaaatttaaacaatataaaatatattaatatgggacgatatactgcgagagaaatcttagatataacactcaaaattcaatgatgaagtttgggtcaatattaatcttttttaaagtttct

SEQ ID NO: 161092 - DNA, 102 bp, Arabidopsis thaliana landsberg
acaaccccaaattacacaggtttttctacactaacaaagcatcatctcctaaacgaattcccaactttacactagctcgactcttcacgttaaatgctatta

SEQ ID NO: 161093 - DNA, 85 bp, Arabidopsis thaliana landsberg
ctcgaaagagtggacaaaattggttttagatatcgcctatgatatcgaggatgttttggacacctatttcttgaaacttgaagaa

SEQ ID NO: 161094 - DNA, 391 bp, Arabidopsis thaliana landsberg
ttattaccttataagcaaaaatattaattttttaaatattattatttatatatttaaaatttataaaacattattaatatttaaacttataaaaagtttgatatattacaattttttaacatcattatataatatatagagtttaaaaaaatcttaattttttccgtcatattttataattcaatattttaaaaatgaacatatattaaccaattagcaaaaaatatgtgggttcaacgtcccgcatcgacaaaaatatttagacaatgatttataaacatatcataaataagatcaacattaatataaataaatggtttttgtacgggacgggtttggcgggatgagtttgggaggacgttacttaataacaattgcaaactataaaata

SEQ ID NO: 161095 - DNA, 273 bp, Arabidopsis thaliana landsberg
aaaaaaagaaagaattgaactgttttcattttcacctaccaaaattacataagaggctaaagttatattatctaaaaacaatcactcatctacctagagctgttatttttcttatgactaagcagtaaacgaccagacacattcttgtttaggccaaaacgtagtaaaacataaacaagaagacggtagccaaaagccatcgctagcaacacaagcatgttcctccatttggcatttgtgtctggagatatttggtaatttccttggattgct

SEQ ID NO: 161096 - DNA, 222 bp, Arabidopsis thaliana landsberg
ccttaaaaatcgacaaggtccaaacgatacgtattctacaacatcgacagacagaaaccaaacttagccgtcggtggtagccaacgacggagacattgagtttcgtgactcatcaaaatcctcaccgaccggagattgctcaactctaatctcctcaaccatcttaacaacttccagcatcgtcggcctcttctccggctgaggcacaacgcaagctaaacc

SEQ ID NO: 161097 - DNA, 342 bp, Arabidopsis thaliana landsberg
  unsure (1)..(342): unsure at all n locations
agataataggttacccaccataggtacttgttagtttagatactaggtgaacttatcaaacttgataataatgcatgctttagtatagcatttctcggcttctccggttatcttagctctaagtatagagagttttacggaacaccaacggttactctaaaatcatagtttgagttcgagaacgttgcgataacaatcctaatattagctagatctacaatttatctatctccctagataattccttagacccgactctttaatcacttgaatctacaactcatttacttgctttatngnctntacattaatataccttgtctagcttaattaaaatcatca

SEQ ID NO: 161098 - DNA, 304 bp, Arabidopsis thaliana landsberg
tccaataattaacatatatattaacccttgagaaagatcctggactttcttctatttacaactattaatcactaagaaaacttaatgttatattttgtcacatatttttcttcctttcgaaagacaaatgaatataacatgcacacataaaagataacctataatttatgatgagttcttagaagcatcagttaaagcaggggatttgcaaatagggcaagagttcttcatagacaaccatttcttgatgcacctcccatggtagtcatgaccacaccccttaacttcccctaactcttctttt

SEQ ID NO: 161099 - DNA, 98 bp, Arabidopsis thaliana landsberg
gcgtgagtctgctgttgtatctatcaaggagttgataaagagacttaatgaatgtaagctttttaaacgaattggtgaagcattacaactatttttca

SEQ ID NO: 161100 - DNA, 491 bp, Arabidopsis thaliana landsberg
cattgataagggcaactctagggtttatcaaatggctaataggcgaaagatagatacccatgacgatagattcaaaaactgggtcaatccactaccgtgacagagacccccataactctaccacttcctaatctcaggtctcgttgatgaaacatagcaaagaagggtttaagaaacaatctaccaaagccaataggcagacaagccaatcccttggtcgagtctacaaatctctggatttcgtaggtcagacatccatttgaacgtcttttggatgctggacgtctatgatcgaatctccacattagccggcgtaaaccgcataggggccaagcgaatccagaagggtataaatctaaacactaaccacctaactaacctagagattaccctaatctaatccatcctcaagaaccctaatcactactcatgcaacattctcaagaacacaaaccaagaaattactaaaatcataccaaaatatagatcta

SEQ ID NO: 161101 - DNA, 687 bp, Arabidopsis thaliana landsberg
ttgcatatgtgtcatccattagtggtatccctgtgaaccttgttttagcccatggaccggttctataataacgcatcgagcctctcataataagcacctgtgatggcacttgtggtgtaatctgacccacaaatacgccaggcgatggatcagtgtcagttttccaagaagtcaacacccgcttctcacctgtggcgagattatacatcaggcttgagaaaggtagcatagtgtcaccaaagtgctcaaagctttcccataaagttcttcccgaagcattgtctatgacaactagatttccgttgtctgtaagctctgcacgagacccattagatgcaaaaatttctccgatggaccacacaacaccatgtttgccattaaacaatagaagactaccattgctgctgatagcaagatttgccgatgtgtctgtagtaggtgtttctctatttgccacccacacaaccacccggggaatgatacccttgaaccagattcccacatacagattttgggagttattaggactgaaaaaccccaattcataaattccattagaggagctgagtgtttgttcgactgacaaaggactttctgtcgttatccctgcatagctaaaacgtaataggacggtaaacaagagcaaacaagcaaagaacacaatcctcttcttccccatgtgtctac

SEQ ID NO: 161102 - DNA, 111 bp, Arabidopsis thaliana landsberg
cccaagaaagccaaccagtagttcacataacatctcataggagtcttgacacaacaaagagaagccaaatgtttcaaatattggaattagtttgcataacaggaaaaggag

SEQ ID NO: 161103 - DNA, 450 bp, Arabidopsis thaliana landsberg
ccatccatcagaagcaatctgaaagaacattgcgtcgtggattctcgattcagcctctgctctcgaatcttcatacttcaaatccaatcttccggtgacaaaatctctccttgagatgatcggtaaaccaacttgcgtcaaaaaagctctcaactttggatgctcgagaccagataaagaaacagagccacaagattcaaaaacccaatcagagagagaatctaacgcagaatctatctgagctttagttagattccgcgtctgagaagttttaggactcttgagcttcttcacactatcttcaagcatagctaatggacccaaatcgtcttttccaccggaaagcatcaaatgcggctgctgtgtaaccggaaactgcccacagaatctcgagggatcaacgacactaagaggcgtcacattataagacccttgatgatgatgatgagg

SEQ ID NO: 161104 - DNA, 242 bp, Arabidopsis thaliana landsberg
  unsure (1)..(242): unsure at all n locations
ggagttgaactgaacctcacattcagcatatacaagtagccctaaaaaaaaactacttatcaatttggcgccattgccaattcattgttgcattgttacattcaagatattagaaacttttaagattaagttcttttacatttatcaagttactaactcatcatttcgtgtgcttgtttttgtggtataggtactaatctttgtgcatgcaaannnnnnnnnnnnnnnnngtacacctatta

SEQ ID NO: 161105 - DNA, 98 bp, Arabidopsis thaliana landsberg
  unsure (1)..(98): unsure at all n locations
ccacccttctaagaatctcatgncgaagagacgacgaagaaaacgacttaacgatcgtctttctatgctccgatccatcgtcccaaaaatcagtaagg

SEQ ID NO: 161106 - DNA, 117 bp, Arabidopsis thaliana landsberg
gaaaaagagacctttggagaaaaaaaaaaaaaagaaaaaaaaaagaaaaagaaaaaaaagaaaagaaaaaaagaaaaaaagaaaaggagaaaaaaaaaaaggacaaaaaaaaaggac

SEQ ID NO: 161107 - DNA, 374 bp, Arabidopsis thaliana landsberg
gcccaaggagaatggaaacaaacggagcttgaaaacatcttcactgacaccattgatttttgttaggttgcagagcctatcaaattcatgaaggtggtcaagtggatcctccatttgcagaccatggtatttgttcccctgaacaatcgagatgagaccactcttaatctcgaagttgttgttctggatagcaggtggtgcaattcctttcctctgacgatggtcccttggtgcatcttcagcaccaatgttggcagggtcattttgttgattctgatcgtaagccatttcgagtgcttgctgtggtattacgttggctgtgtttctccttactttgatttcccgagctatgcgatcggtgttgtcggtgtaaa

SEQ ID NO: 161108 - DNA, 179 bp, Arabidopsis thaliana landsberg
tttcatttattcagttgagacgacattatatacatgaaatagagttttacatgtcaacttaaacaatccaaggcaaatctaaggacattgattattggagtatcaaacccctctgagaagacattaaacatggactgtttgattcccctatcacatttatgccccctctctaatttacc

SEQ ID NO: 161109 - DNA, 173 bp, Arabidopsis thaliana landsberg
cccaaaggatgcaaggaacagatgtgacctttcgaaaggatgcaaagaacggatgtgacctttcagaagggtgcaaggaccggatgtgatgcttcgggaagcatccattcgcctcctatataagggaggacgcccaaggcatctcaaatcatctcacaacatccaaaacacca

SEQ ID NO: 161110 - DNA, 373 bp, Arabidopsis thaliana landsberg
gctcaaggagaatgaaaacaaccggagcttatatccttcttcactaacgccgttgatttggttaggttgcagagcctatcaaattcatccaagtggtcgagtgggtcttgcataggcagaccatgagacttgttcccctgaatcatcgagatgagaccactcttaatctcgaagttgttgttctggatagcaggaggtgcgattcctttcctctgacggtgatcccgtggtgcatctccagcaccaatgtttgtagggtcattctgttgattttgttcatcagccatttcaagtggttgttggggtacaaggttgactgtgtttctcctttctcttagttcacgagctatgcggtcgatcttatcgttgtaaa

SEQ ID NO: 161111 - DNA, 264 bp, Arabidopsis thaliana landsberg
aacagtaaagaagaccaatatacaagggttacaaacttgcattatcatacaagaagaccagtttttcaaacactaccttaaaacataacaacaagaccttaaactcatcatcatcatcatcatttgatcagatgttgttgtaagctacagagaccaagtgaggaactttaccatcatcaaaaggcaagctaacatattctctagcaaactcttcagctatctcccccccaagctcaccatgaacagctttcaatacgatataca

SEQ ID NO: 161112 - DNA, 334 bp, Arabidopsis thaliana landsberg
ttgtatgtaactcttgcaggataagtcatatatggtcgcgaacaacattctacgtcaaatgtttttaagacttccttcactgtctctggtgtagatgccaccacagtagacacgcttccaaactttagggacattagaggtccatatgtttcggataatttgaacatcgaacgatgaggttttgatcccagttggtgcaagtttccaattataggaagtcttgggggtccgggaggtagattcttctttgtctttctagtgttccttacaatgatcatagatgaaaagaagacgaatgcaacaatgatataccacaaactcattttgcttccta

SEQ ID NO: 161113 - DNA, 418 bp, Arabidopsis thaliana landsberg
ctgtcagccatgtgagtcgcttcctatacacacagcgtggtcgtcgtcgtcgttgattagtagctccggtcatgtgcgacaatgtatctattttagagcgtgggacaaagtatcgaagtgtcaatttcatgtaaccataagcccctctgccgttcgtggtttctctatatgtcgcgaatctgctgttcgtggcgctaatagaattagatttcgctcacgagaagatgtctccgctgttgagtatgcagcaatcgtggcgtagatgtagattaagctattatgcaagcagcatcctctaccgttatcagaaaatgagcagagtggtaaagcagatgttgacgcgattcggaatccgtttttgacattctttccaccggaagaagaaggggaaggaattgaaaaaaaaaatcggatgaga

SEQ ID NO: 161114 - DNA, 384 bp, Arabidopsis thaliana landsberg
atacggtcttttccataaatcaagagaagcaaggtagcagcaaaatcaaagatttaaggataaaaactgatgaaagaaaagacagtctgatacacaaaattcagttccaaaagttgataagataaaagtttcttctacctaagaagaacgacctcacttcttctcttctttctcagcctctgcggctctcttggctctagctccggcatgcctcttgttagtgcgctcaaggcgtatcttgtcaaaagccttgaaagacttcatttctgaagtcagcttgacgagttccatggtaggcttctcacgtacaataggcaagtagtctccttgaacttgggtagcattagccaactcttctggtgtagagtcaccagcctaacacac

SEQ ID NO: 161115 - DNA, 281 bp, Arabidopsis thaliana landsberg
gaccgttgatgattagaggttatgatcaacgagggttgattggatcaacgggagttgatgattggatcaacaagcgttgatgataagaggttatgatcaacgagtgttgatgattggaccaacaagcgttgatgattagaggttacgatcaacgagagttgatgattggatcaaccagcgttgatgataagaggttatgatcaacgagagttgatgattggatcaacaagcgtagatgattggatcaatgagagttgatcagatgttttttttttccctaa

SEQ ID NO: 161116 - DNA, 418 bp, Arabidopsis thaliana landsberg
ccaagacaaagatattacgcttaatactactaaagtgaagcatccaaatgcattaaaaaaagaaacataaaactctatcacccataagttttttcactacaatgaaccctgttttactacaatccattatcatcaacaagatgtaccagaaaagaaaaaaaacaagcttaccatgacttcatatgaacttctccgtgaaagcgagcctcctaaactctggtaccaaaagcggtcagagaactagactacacctactaagacaagtacattttgacatatacatcatagagctgctgtagatatccatcactgacgcctgtgcatacaagagacttacattatttcaaagtgaaactcgtatgcattcaacttttgcattaccagttagttaaccactgcctatcatcatgggttctcg

SEQ ID NO: 161117 - DNA, 145 bp, Arabidopsis thaliana landsberg
tttgcatctcagctttgcacctgtggtcatttgacgtgttttaaagactctagtatacttctcaacattgtaattaactcatctatttttagtgatcttttctctctctcactattttcaattaatgactctaaattcacagtga

SEQ ID NO: 161118 - DNA, 95 bp, Arabidopsis thaliana landsberg
attgatggtgctggtgttggacatcgtggtagaggcgcttgttgtttgactgacactatgaagctacctgaagatgtgtggggaggtgatgcata

SEQ ID NO: 161119 - DNA, 212 bp, Arabidopsis thaliana landsberg
gatatccagtcgtttacctggaactgtggaccgcaatgtacacttgacgggatgcattatgactctgcggtctatgatgccgctgatcatgtcatgctcaatgcgttgcttattgaatctcatcaatctttatgagttcttgacacgttttttttttgttttttttccttttattttgattggggttctcttgtagagttttaagagaagtg

SEQ ID NO: 161120 - DNA, 366 bp, Arabidopsis thaliana landsberg
  unsure (1)..(366): unsure at all n locations
gaaaggtggtggaagggttcctgctgcatctannnnnnnnnnnnnnnnnnnnnnncttgatgccactgttgatattccattggataatatgaatgtaataatgacattaatattttctaaactcatgaacctttctcacttggatttatctttacatgtgtgtttaattgatgcaggactcttcacagaaacagagaaagcttgctgactgggaagctgagctcaggaagaaagaaatggtttttactatttataggactttgtcaaatatatcgtcaatgtgcttcttaattttctactgtttgatgttcttttgtgtaattttcacccaggatatcaagcgaagagaggaagctantgctaaat

SEQ ID NO: 161121 - DNA, 186 bp, Arabidopsis thaliana landsberg
cgaaattagatattaagagaaagaatgaatgtgatgattattttgctttgttgttaatttcggccttccatctttgggtctggttccatttgagatgtgtaattttatttttatattttaactgtaatttttttttgtagactacttggaagaaagtaatgattaacgtgcaatggatattcatat

SEQ ID NO: 161122 - DNA, 117 bp, Arabidopsis thaliana landsberg
ttaaacgattcaaatatgcgcacttattatttcaccaaaagcaatgctcagtgtttattattcgtgtaatagtgttggatctacacatgttcttattcgatggaatctgcgaccgta

SEQ ID NO: 161123 - DNA, 434 bp, Arabidopsis thaliana landsberg
aggcatctagctgtctgatgtgatccacttcatcaagaacgataaacactttcttgtctttcaaacgttcttgtgccactcctaaatgagatatcttgatatctttctgattgaaaatctgagacaacatttgatcttgtagtttcaattgtgcgttgcgctcattcaaacaaagtcttggatagcattctctgatatccgtcatgattgcagcaaatggaaatctgctggagaaccgatcaaacatacatgcagcgatggtcgtcttaccaatcccaggcgtaccccaaatcccaatcatccttacttcatccaaatctaggcgtaacaaatgctccattttatccatatgagctctcatccctactaacccgtcgaaatctcttgatggtgtgcaactatttaacatgtttgaaacatcagtggctattttc

SEQ ID NO: 161124 - DNA, 89 bp, Arabidopsis thaliana landsberg
tattggtcgctgatttttcaaaaccgtaaaaacaaccaaagatcataatggcacaatatgtacaattaatgaccccaatacaaaacacg

SEQ ID NO: 161125 - DNA, 885 bp, Arabidopsis thaliana landsberg
ggtgttagcgattccgccgcagatagatccgcgacgaagtcaacgacgccggacggtagatcgaagatctttatacggatccgcacgaagaacaacgaagaaacagctgtatcgactgatatcgccacctccgtcgccgcctctgttcaagtgactgatgattcagctggtccggcgatcgatgctgaaggtgaacggatctccgatggtggtggtcaggaagcagacgagtttggaccgaagacttggaatctgaggccgaggagaccaccgccgacgaagaagcggtcaattggacacggcggtggggtattgaagagctgtaacggtgctttaccggagaataaatctctgggaacggtaagaacagagtcaatacgatcgaggaacggtgtagatgctaagatggcgacgacggaaagaaaggagaagaaaccgaggttatcgatatcgctctcaaagctggagatagatgaagatatctacgcgttgactggatcaaaacctagtagaagaccaaagaagagagccaagaacgtgcagaagcagctcgatgtaagattttcacgttgaatcagaatcttacctttgttttactcaaacctgacctaacaatattggcttgaattgttgtatgatcgtttttcaggttcttttccctggtttgtggatgggtaacgtttcttcagaagcatataaggtctcagaacatgcttgaaaggtattaacatttttgatgaatccgattggattacttcttcctgtttactgttgtatagtctgtgattgaggaaataatgtaattgtttctgaatcttgtagggttgaatgagaatgatgtgaagttaatcttgttgaatcggattcgactgaaatcagatagga

SEQ ID NO: 161126 - DNA, 306 bp, Arabidopsis thaliana landsberg
cacatactgtcactgtatatacatacgaatacgatcattcatctcactataaataatttttgtcaaatcacgtacgattcactctgacaaaatcaaacgcataatacacaagagtctttttttttgctaaatatctttctcttcctagctaaggatatttttcccaatacttagactatatatgtaaagtcaatagaacctgaactaaattgcactattacattaccggttctttgtgttatatatatattaaaaaaaaaaaaaaaaaaaaaaaaaaaaaaaaaaaaaaaaacccttcccgggttt

SEQ ID NO: 161127 - DNA, 461 bp, Arabidopsis thaliana landsberg
  unsure (1)..(461): unsure at all n locations
aacagaccacattgccaagaatttagagattcaatgcttttcaagagtagcaacagttatgcatttnnnnnnnnnnnnnnnnnnnnnngaagtaaacaaaagagaaacaactaaaaaaatataaaaagcacaagttcaagaatccaaatgaaaattagcaaagcagctagtcaccataggccagaattgcaatggcagttgcaacacattgcaatggtacaaatcctccccaacaatgttcctgctaactccccaacagattatttctcagacatgattcttcttagtgaccatgtcccagaagaactcagtcaacacaggctcgtaagagggcatcttagcatatccaggaaagtagttaatatcaattataaggtacctattagcatctttggcatccctaatcacgtcgaagttaaagagattgagtcccattgattccctcatggcctttgctagat

SEQ ID NO: 161128 - DNA, 261 bp, Arabidopsis thaliana landsberg
ttttgagacttcctgataaatatatgcttagatgatcaaaattcatacatgtttgtgtccatatctatgcgacactttttctgcattgtagacaccaaaaaaaccaaaaaaaagacaaattctactagtactgatggttggttcaattgaataaaaagaatgcgattgcgtgtgaccaagaacactcatacttgtcattgttcagctgtcagctttcgtctggtttgccatatatgtcaaatagattgtccatatatatgc

SEQ ID NO: 161129 - DNA, 225 bp, Arabidopsis thaliana landsberg
tagaatcaaagttttccaataaccgcatattctttaaggcagaaaaaacttgactgcaaattctctttgggtgccaaaaaacagaacaatccaaataattcccccaattttggttctaaaatagaccgattgatttatatgtaacatcaactcaaaacacatcatagaggaaaaccacagcagacattattggaagattttactcatatgcgtcatcatcatcat

SEQ ID NO: 161130 - DNA, 399 bp, Arabidopsis thaliana landsberg
aataaaagaaagtgggaactcaggagcgtttaaaagtcacaaaagcttcaatgtacccagaaaggtacaggagcccaactgatgcaatgatgtctccagtcactaaaggtcttctcgcaaggaccagaaagtcttccggttctcttattccacccagctttaaccaaaccaaggtcaatttcatttatataccaaaatcaaacccggttttatatacattttactaacattttaacaacttttttcagattcaagaactacgcaaaccggaatcgggtttatcatctgtcagttgctgaaaagtgaagacattatgaatttgttgcatgtatctaatgtatttctcggctataataaaagaaattgatttactcttgtcttgttttgctgttttgttaa

SEQ ID NO: 161131 - DNA, 449 bp, Arabidopsis thaliana landsberg
gacgtgtaagctgtcgtcttcttgacctttttggtgaactctttcttctctatagctcgctgcgtctctgtgtcttgttgcttggagcaagctctccagcgtgagttaatctaatctctgtaatgattaattaccttcttttacggtttctggaattgcatctgtgtgtgagcacttggtttgaaatatgatttaactagtgaattcgataatgctgttcaataagaatgcttagaaaagccttaactgggttttactcaccactcttcttattgaatctagaaattgaaagtgtgaatttttgcgagttctcttattcaaactccactgagaaaggtggagtttttcgtctctgttttctccctaattcttatagtttgagctaatggtgttaatcaggctcaagtatagataaaataaaattatggattcagatgcatgggaaatta

SEQ ID NO: 161132 - DNA, 92 bp, Arabidopsis thaliana landsberg
gtatgcttctgaaagcattgatcttgcctgcaagtatgcttacaggaacgccaccgcagggactactttaggaggtatacttactctctgag

SEQ ID NO: 161133 - DNA, 273 bp, Arabidopsis thaliana landsberg
ccatatttatagcaactacatggtgacttaatggacaagtgttatgccgaggattaagtacaattaaatgtgtttaatattcgtaaagtgtaattagagagatgtatatgtggccctctaattttgttttcctccaaatacacacgttggacaacgaggccaatgtttttgggctaaagcacacgactcgcgccgatttctttgttacaaaattctaatatccgttttatattaaaaagctaactataataataataaacagaagagtttgta

SEQ ID NO: 161134 - DNA, 202 bp, Arabidopsis thaliana landsberg
ccttcatcactctggtcgtcctgagacttgaacagtttcttgtttctgttatcatttacaacataaggcccacttcttgcccacacacagtttattactcatcaatttctctaatatactattactctataacaacaaaaaagtaacattgtaatttgtacacatagcgtttgatctagctagttctatatgtagaattgat

SEQ ID NO: 161135 - DNA, 456 bp, Arabidopsis thaliana landsberg
caattgcaaaaggcactactacatgaagacaaagaatgaatcaaaaagctaaaaatcacaagctaaagaggtttcatcaagacccaacatctgttcgaacaccagaaccattgagacggaaggcatgtgatcgagccagctcaaccgcgtcctgaaccctaagcctggttccttgttgacccaccacagttgctgcaatcgttgcagccatatctcccattcctttcaagtcagagacacccctcaagataccgtataagatccctgaagcatatgcatctccagcaccacatgtatcaactggcacgcatggggacggaggaatgtagatggcctctccttttactccaatatatgacccgttgattccatcggtaacagaaacaaacggaacaaagtggctcatgtatcttgtcgctgaaattggactttcctctgcggaaaagtgacaaaacg

SEQ ID NO: 161136 - DNA, 357 bp, Arabidopsis thaliana landsberg
ttatactagattttatcccgcggtacaccgcggtgacaatttatctttttaaagttagtataatttttttttttcaaattgtatctatctataatatatttttattttatagtttacaattgttattaagtaacgtcctgccaaacccgtcccgccaaacccgtcctgtaaaaaacccatttatttatattaatgttgatcttattaaacatatgtttgtaaatcattgtctaaatatttttgtcgatgcgagacgttgaacccacacattttttgctaattggttaatatatgttcatttttaaaattttgaatcataaaatatggcggaaaaaattaagatttttttaaactcta

SEQ ID NO: 161137 - DNA, 391 bp, Arabidopsis thaliana landsberg
tcattaccttataagcaaaaatattaatttcttaaatattattatttatatatttaaaatttataaaacattaataatatttaaacttataagaagtttgatatattacaattttttaacatcattatataatatatagagtttaaaaaaatcttaattttttccgccatattttatgattcaaaattttaaaaatgaacatatattaaccaattagcaaaaaatgtgtgggttcaacgtctcgcatcgacaaaaatatttagacaatgatttacaaacatatgtttaataagatcaacattaatataaataaatgggttttttacaggacgggtttggcgggacgggtttggcaggacgttacttaataacaattgtaaactataaaata

SEQ ID NO: 161138 - DNA, 138 bp, Arabidopsis thaliana landsberg
cagcacgatcaacaagcggcttcagatcgagatgtctctcccgcaccaacatcatcttctgaccttacagagaacatgggaactggtacaccagcacccctccatggcattgcaaacaagtaaaattaaataatagta

SEQ ID NO: 161139 - DNA, 184 bp, Arabidopsis thaliana landsberg
tttttacccattaagaacttgaataaatactcttggtagcagaactaatattaccctcttaaaggagataactgggacaaatacgtgacatatagttaaccgcgtggaatatcacaggaacagatttcacacggggctggaagctgagtcattaaatctacaacattttgatgaaccgttctaa

SEQ ID NO: 161140 - DNA, 387 bp, Arabidopsis thaliana landsberg
acacatggatcacttgaagattttaacggtaaccatagatgatgccatgattttggaaaggatacaaggtattgaccgattggcgagtagtattcgaggtttatgtctaacaaatatgtcagcacctcgtgtagtattaagtacgacagctctgggaggtcttcaacaacttgcaattctgagctgcaacatatctgagataaagatggattggaaaagcaaagaaagaagggaggtttcaccaatggagattcatccatctacaagtacaagttctccaggcttcaagcaactctccagtgttaatataatgaaattggtagggccaagggatttgtcatggctgttatttgctcaaaatctaaagagtctacatgtgggcttttc

SEQ ID NO: 161141 - DNA, 220 bp, Arabidopsis thaliana landsberg
ctctaaaacctatacgtaaatcatagctaaaagcagtaaaaatagggttatatcaactcctccagacttagattttgcttgacctcaagcaaaacacaaaagccgaacccgtggaagaggtttgaaaacaaagaaactcccaacattctatagtctattgccatgatcattctaaccaaatctatatgcctagcagttctaatcaaatcctaaccaacat

SEQ ID NO: 161142 - DNA, 362 bp, Arabidopsis thaliana landsberg
  unsure (1)..(362): unsure at all n locations
acaatgaggcatccaagagtaagacaacacaagatggtcagaatgagtctgataaaagaagccaaattcagaaagtctcggagnnnnnnnnnnnnnnnnnnntgaaacctccaaagaagcggtaacccactctactaatttctgtcatcactttttggcgaggttcagtcagctcagtgaaggaagttaaggggtttgaataattggtatgctcatgcaattccttttggtaattgcatacctaaaatttagagcagttgtttttttgaagaagtctcaagcaggaaagcagaccgtttcaggagctgcactcttttggaatataataaatggagtcttcatcctgtttagaagttccattt

SEQ ID NO: 161143 - DNA, 390 bp, Arabidopsis thaliana landsberg
tgaattagtttctaaaatacatcatcgttttcttcttaattaataaaacggtcaaataaaaaatcgtctccaatctttttctctctctggatttgccaataaattggggataaccagctaccaaactcattcacacaaagtcataacagtcgtttaaagtctgatcctttcttttttatttttctttagtgtgtgagaagagaaatatagttatggcggagatctcgggaaacggtggtgatgctagagacggagcttgggtggtcaatctcaaggaagaagacgaacaacaacaacaacaagctattcataaacccttgaagaaacaagactctcttctctctatcttctgccctttcttacaaaagggtttttacttttgtctttact

SEQ ID NO: 161144 - DNA, 122 bp, Arabidopsis thaliana landsberg
  unsure (1)..(122): unsure at all n locations
atgccattaaanngggnaagctagcagaaaaatgtgctatcctcatcacaattgccgatgactgtttttatgaaaaaggaaccttcaatgacttggaagggtttacttaagcagtttataag

SEQ ID NO: 161145 - DNA, 241 bp, Arabidopsis thaliana landsberg
agaccgagagtgcactcgctagatccaacgccggactcaatccatcccttaaccctgagcaagatctgtgtctctcgattcctgatttcatctaaaatcaatgggctctcgatttctgtaaacttcaattcggtggttttgccatggctggagttatgcacaagttcctattgcgtcaatgttcatgtggattcttcctgttgccatattatacggattcaaccacaatttgcttcctggt

SEQ ID NO: 161146 - DNA, 231 bp, Arabidopsis thaliana landsberg
ccatttttttttttgatatttagacaaatatatcaaaaatggtgatttactaaatcttatactaactataaaaaattcattaccatctaaattttttaatgctagattttcattttttttttcattttttttttcacaaatgtaacattatattaaacattcgatacaatacataaccaaaacaaaggcccttaaagagattacagaaggtggaggcccaaactagcctat

SEQ ID NO: 161147 - DNA, 322 bp, Arabidopsis thaliana landsberg
ggttacagaatcagattcacaggtctgatcctgttttaacggtctgattctgtccctctagcaaacttatttgttgcctcagtttcgcaatatgagcttgaacctatccagcaaagaaccaatccaaattcatcaaaacatagaccaacaaaaatagtcaaaactgagtatcaaaaatctagaaaaattgtgtaaatgttttgaagttacctgttgacgagcagctgcgagctgtaataactcatctgcttcagagaaactcatgaaccattgtcccaaactatgatctttcgtatcacctctcttctttttcccggtatct

SEQ ID NO: 161148 - DNA, 212 bp, Arabidopsis thaliana landsberg
caaaagtctaaacctaaaaatggttgcggcagacgcagcttggtcatcgacaaattttttcatccacaaatttgttaatcaacaaatttttctcggcgatttgcagcttgatcccgacgagcttcctctgctcatcaccttcctctgttcgtcgagcttcctctgttcatcaagctcctctgttcatcaagctcaaacattgacgaaatcag

SEQ ID NO: 161149 - DNA, 391 bp, Arabidopsis thaliana landsberg
gctccatcaagaaacgcaaaaagaaagcatggcaattccaaaagctcactactctttagccatcattgtcgttctttttgccgtttcgaggagccaaaaagtatgcaatccagaatgcaaggccaacgaacccttcaactgcgacaaaactcttgcattcagccgaaatggatttcccaaaaattttacttttggtgcagctacctctgcataccaggtttgcatatatcttcgccatgatagctttaggggattgatttctagctataacattttccatatactttcttccttacaatatccaacgctttgttctatcaggttgaaggtgcagcacatagagcaaaaaaaggatgggactatttcactcatagatatccaggtcataaac

SEQ ID NO: 161150 - DNA, 117 bp, Arabidopsis thaliana landsberg
ttttcaactagaggagtcttctattcctccatgagttttgtacatttagatttttacttttgagtatgtactctcggaactggaaattaaatgaatatgaaagtattgccccttttt

SEQ ID NO: 161151 - DNA, 155 bp, Arabidopsis thaliana landsberg
tggtatcaaagacaatcctagcaaaaacacgacgtgtctcatgaaagtctccaagggcaagaaacttgtagtttatcctacgctctaaacttgggacatcatctctctctgggtttccttttcttctcacatttccaaacattttctctactctc

SEQ ID NO: 161152 - DNA, 348 bp, Arabidopsis thaliana landsberg
attttaaaaaaacacagatatggggataagtatttattggctcttgagaatttaaggcgaaggaaaattagtttttgttaaaaaggctgtgatttattaattctaagcgtttataaagaaaaaattccaaaactggaattgagaatttccttgttccatcatatgaacatattgcaaggtgggatgacttatatggtatagtgtatgattctttaaataaattctctttggaacatttctcctttggatatctccatcaattagggtttgtttcttgcggttgaagtctgtgactgtcgttaccgtaaggaacaagcaaaggttgaagatttcctaatattatttata

SEQ ID NO: 161153 - DNA, 225 bp, Arabidopsis thaliana landsberg
gtactaggtgtccaaacaaaggcgatgtcccattgatcattcccaacaaacgatccatgatttgtcttccagcatctcgaagacccgaatgcatgaactcattcgttacccagagtctgatacccgatatatgagcagctgtttccgtcacccgcttgaagttagcatgcatatcctcgtagataaaccggtgcagcaacaggcacctgcaaaaagaaatcactg

SEQ ID NO: 161154 - DNA, 402 bp, Arabidopsis thaliana landsberg
atggaaagaccgctattccgggctagatttgtccactgtagctggagatctttctgctccttactacaaagacattgtggtgaactcgacacttatgaaatctgagcttcaggtccagattggtcctatgggagaagacactgggaaaaagaacgcgatcttgaacggtgtcgaggtcttgaagatgagcaactctgtgaacagtcttgatggagaatttggagtggatggtcaaagagcgagtatggggaagcaggggatggttgcaaccgcgggttttgtgatgatgtttggagccttcgtaggtcttggagcaatggtttacaagtggaagaagagaccacaagattggcagaagagaaacagtttctcttcttggttacttccaatacacgctggtga

SEQ ID NO: 161155 - DNA, 141 bp, Arabidopsis thaliana landsberg
atgatctcattgaacaaggtcctgattctataagaacaacactgatactcaaaaccgtatttgcttatcggttacataatttgtcatctgcattatatcgcacaagagagtcgcaaatgcatcacaatatataaaccggaa

SEQ ID NO: 161156 - DNA, 447 bp, Arabidopsis thaliana landsberg
tttattcaccttctttttcattaaccaataaaaacatgtcatgtcaaatcctacttaaattacataataaattaaagttataattataaatccaaaccgatatataatctcctttaattacaaaatataaaccctaattctcctttgtaaacccaaaccgccatttaaactcttttaatcgtaaaatttaaatatttttataaatccaaactgatatttaaatataaatacctatatctatcatctatggctttcatgcaaatatcaaaaatattaaatttcttcttaatctcacttaaaaaatatcaaatttattttgagtaaatcaaaattcaggtttatatagattgattgttttggacaaagaaaatcaaccttagtatatcttctcttgttgcattataaatctcgggtttctctacgtttgattgtgagtaaggtttcttg

SEQ ID NO: 161157 - DNA, 307 bp, Arabidopsis thaliana landsberg
gaaaaaaaaaaaaaaggaaaaaaaaaagaacgaaaaaaaaaaacaaaaaaaagaaaaaaaaacacaaaaatagaaacagaaagaaagaaaaaaacaaaaaaaaaaaaaaaaaaaaaaaaaaaaaaaaaaggacaggaaagagggaaaaaacaaaaaaaaaaaaaaaaagaaaaacaaaaaaaacaaaaaaaacaaaaaagcaaaaagaaaaacaacaaaaagacaaagaaaaaacaaaaacaaaaaagcaaaaaaaggaaacaaaaatacaggaaaaaaagaaaaaaaaaaagaaaaaaaagagaaa

SEQ ID NO: 161158 - DNA, 429 bp, Arabidopsis thaliana landsberg
  unsure (1)..(429): unsure at all n locations
tgataacgagatggtccaagctgaacaagtaaggaactcgttgctagaaataacccggaacacatctagaggatggcaagatgatcaaatggctacaggctctatgcaaaacgaaaagaacgaagttgattatcaacactnnnnnnnnnnnnnnnnnnnnnntggtcatcatcacccatttgatcaccagatgaatcagagcgctcatcatcatcaccaccaccaacacatcaatcattaccacaaccaataaggaccaattccccaaaactataaagatgtctgctttacaagcaaaagaaacattctgcatcaataaactttgaagatcttttcatttcaagatataaggataaaaggaatgtcagttcgaaaacagttcctgtatccaataccaggaataaaccaaaccgaaacaactttacttaa

SEQ ID NO: 161159 - DNA, 601 bp, Arabidopsis thaliana landsberg
caaaataatgccttctttctcgattgccaagtgtctctcggcttggtctttgctgaaagcataatgttttatggaaatgtagggtggtcaacactatgccttgtgggaggatccattcaagaaaccgtgctatctatttgctttggtggctggacagatagtgagcacagatgatacatttaccacacgctctggtaggcaggtttccctgaaaatctggactcctgcagaagatctaccaaagactgcccatgccatgtattccctaaaagcggccatgaagtgggatgaggatgtaagcacttgcattttttaaattgtagttgttacttgttaggttactgaatctgattatttatttatgtgtacccttttttcactaggtgttcgggcttgagtatgacctggatctcttcaacattgttgctgttccagattttaacatgtatgaccaaatggtggattctgtcacacttgtagaattaatccctttgcaaatatattctgtccatttttctttttcttactgtcgataccagacaaactgattgattttcgctcgattttcaggggagccatggaaaacaagagtttgaatgta

SEQ ID NO: 161160 - DNA, 197 bp, Arabidopsis thaliana landsberg
gagatagagagaatcagagaaaagcttacaaagtcgagaagttgatcagaagtcaaacaaagatcaaaagaggcatgtcgaaattgatcggcttataggtcaacacaggactcacaaccaaaaaataaaccaccaaacaagagatgacaaaaaagagtttctcctttgtctgattttcttcctaatgagtatctctg

SEQ ID NO: 161161 - DNA, 252 bp, Arabidopsis thaliana landsberg
gcacatgttgttgctgcgattggatctctagctactttagtctcagatgcgttttgattcttgctttttctgctgctgtgtttctctccgccgtgttttggttacctccattcctcggatttgcagatgcaggggatctagatctcgatccaaggtttaaaggtatatatcgcgttttctctctgatttgtgagttccttcatactctatatgattccgtcgaggctcacgcaaatctagcttcatgtgatt

SEQ ID NO: 161162 - DNA, 351 bp, Arabidopsis thaliana landsberg
tattgataagggcaactctagggttcatcaaatggctaataggcgaaaggtagatacccatgacgataaattcacaaactgggtcaatccactctcgtgacagagacccccacaactctaccacttcctaatctcaactgtcgttgatgaaacatagcagagcagggtttaagaaacaatctaccaaagccaataagcagacaagcccaatatcttggtcgagtctacatatctctggaaattcgtagatcagacatccatttgaacgtcatttggacgttggtatgatcgaatctccacattagccagcgaaaaccgcgtaggggccaagcgaatccagaagggttttta

SEQ ID NO: 161163 - DNA, 249 bp, Arabidopsis thaliana landsberg
tagatcagacatccatttgaacgtctttgggacgctgaacggtctatgatcaaatctccgcattagccagcgaaaaccgcataggggccaagcgaatccagaaaggtataaacctaagcactaaccacctaactaacctagagattacccttatctaatccatcttcaagaaccctaatcgctactcaagcaacattctcaagaacacaaacccataaattactgaaatcataccaaaatgtagatcta

SEQ ID NO: 161164 - DNA, 255 bp, Arabidopsis thaliana landsberg
gatttgagggctgtgggaacaatgtgtggcagccacaaggcgacttcttctcaaaagatggcaacaacaacaataatatcaagggaaactctaaaaagccacctaaatcccaaatcattgatgtcgattttgagcagaaatgattattagagggagagagagagactgataaagaagagacgagaatgaagcagaaggctctctattgttgtactaatactcgagtgaagataaaaaaaagtgtttgtatagatg

SEQ ID NO: 161165 - DNA, 287 bp, Arabidopsis thaliana landsberg
  unsure (1)..(287): unsure at all n locations
ggggggggaggggggggggggggggggaggggagggggtggggagggggggggaggacaaagggggggaggagcaagggggaggagaaggggatgcgggcgagggggaaaaatggggggggggggggggagggggggggagggcggcggggggaagggggggggggggggggagggggggggggggtagaagggggggggggggggggggggggggggggggggggggagagagnggggggggggggggggggggggggagaagggggggggggggggggnagaggg

SEQ ID NO: 161166 - DNA, 259 bp, Arabidopsis thaliana landsberg
aatatttgatcaatttctaaagaaaaccccttcctctactagtcctcctcctatatatacaaaatcttaagaaatctctctacttgtttcctctgttatcataatctcttctctctatatctcttctcttcttcttttaccctgttttttttttcattccacagagaccaggtttattaagattgtgttttattcatctggggaaacaacatttatttgtggtgaaattttgtaatatcaactgccatcaatgcactta

SEQ ID NO: 161167 - DNA, 136 bp, Arabidopsis thaliana landsberg
tcagatctacaaattcgattctcctcttcgatgtctattccgatgtagaacaacacgaatccgactaatcttgttcttcgatttgacactgcgcttcaaccagaagagaatctcgccgacgtactatatcaacact

SEQ ID NO: 161168 - DNA, 234 bp, Arabidopsis thaliana landsberg
atcaacaagtaaatcaaagaaaagacatggtggttcatatcaaccaagccaaggttttaatttatttgtcggagaacatataaaaagggacaaaaggaaaagcaaagttgcgagagagactcatataatcaaaagagacttggaaacatcttttcatctgccaacttgactaaatagagaccaatgcaggaggaggaaaagctgggtgaggtactttgaagtcgacacacattt

SEQ ID NO: 161169 - DNA, 103 bp, Arabidopsis thaliana landsberg
atatactagattttaacccgcggtacaccgcggagacaatttttttttttaagttagtatatataaaattttgcaaattatatctacctatagaatattttta

SEQ ID NO: 161170 - DNA, 73 bp, Arabidopsis thaliana landsberg
aaaaatcgttaccagaaataatcctcttttctttctaagctcacgatgcagattagcattcacgacaacgagt

SEQ ID NO: 161171 - DNA, 156 bp, Arabidopsis thaliana landsberg
  unsure (1)..(156): unsure at all n locations
agtcttttgtcaacttggtgaagaaggagtatgataatgcacgaaaagattgtcttttgatgtctaagaggatgaaggttgattggaactcaggcnnnnnnnnnnnnnnnnnnnnnnntggtgggaagatgaaaggcattgttcgctttgctgcgt

SEQ ID NO: 161172 - DNA, 113 bp, Arabidopsis thaliana landsberg
ttattatggataaatcaaaggtcatgattttaaagaaaaattgaaaattttcatttttccgcaaaaattgtaaaaatcagagacttgcatttttttgacaaaacggtaaaatt

SEQ ID NO: 161173 - DNA, 525 bp, Arabidopsis thaliana landsberg
ggcttgttttgaaacacactcgctcctttaaaaaaaagcctcgagtgcgtgatttcagtgtctttctcctttaattccaattcaaacccaaccgaaatcaattgaatttttcaaaaccatgtaaaccgaaccgaaattaaaacacaaacgacaaactagcaattgtcacttccactattgatccaactccgacgaaccagattgataattttgattcgattccacacagataacatatagtccaaaccaaacgcaattcataagagagccaaaaccctaccctaacagtatagaagtttgttccaagcttctgcttaatatgttagctaaaacccaacgagattctaagagaaaagagaagaaagaaaaattgaaaagttacctgttgaagggttttaggtcttttgaggacgggacgtctcaggttgcataagcagcagagacgggaggctactgctttcttgttcttggcctccatttttcaccggagctcatgcggagaagatttccgggattactagtcgg

SEQ ID NO: 161174 - DNA, 270 bp, Arabidopsis thaliana landsberg
atcaacttatccttctctatttcaaaatcttcaggaaacagagaacaatataggaagcacaatttgatttcaccattctttaagctatcataactgaacttcaaaatgggaagaattctttcttccatacctggaaacccgtggcctgcaggcgaattcagaacattaatcgcatgatgccattcttgtatagtctctttgcatgccatggcttccccaatgacagtgagtgcaagtggcaagccatgacattttccagcaactattctt

SEQ ID NO: 161175 - DNA, 211 bp, Arabidopsis thaliana landsberg; identical to SEQ ID NO: 160569

SEQ ID NO: 161176 - DNA, 422 bp, Arabidopsis thaliana landsberg
tgtattttttgtttcgtcaaaaagttgtttattaaattccacaaagttgtaccaacagtgttaaaacttaagtgatcgtagtaaaagtaaaacagaaatcgtatgaaacatcatggagctaatcttgtatgacaaaatagtatagagttctcttctacctaaaatgttatgttgtttacagatagacctcagaaaaagtaaaacaacacaggagtttcagaacctatccaaaccaacagcagtcacggtttagttgcaagctgccaaatcttgaccatcccatcatcactagccgacgcaagcaaccggttcccctcctgtagcaggttacaatcccaaggtcaaaatcatagacaacataaccacatgtacttaggccaatgtaagtcgagtaatcaatggcatcatttctctgaacacta

SEQ ID NO: 161177 - DNA, 213 bp, Arabidopsis thaliana landsberg
  unsure (1)..(213): unsure at all n locations
ctttaatgagaaacaggaacttattgacgaagaaagtcgatgatgatagctcaagaattgggaatatatgttgtggagagcaaaagaggagcaatattatgtctattgctttctctgctctgtttaggcacttggcctgctcttaggctctttcttgacggcgtggtcgtctcccacaacattactatctngattattccatcactaactttt

SEQ ID NO: 161178 - DNA, 276 bp, Arabidopsis thaliana landsberg
atatcaaaaaatttaacatcattatataatatatagtttaaaaaaactcaaaaaaagttccgtcatattttgtgattcaaaattttaaaaatgaaaatatattaaccaattagcgaaaaatgtgtgggttcaacatcccgcatcgactaaaatatttagacaatgattcataaataagatcaacattaataaaataaatggtttttttttgcaggatgggttttgcgggacgggtttggcaggacgttgcttaataaagttgtaaactataaaata

SEQ ID NO: 161179 - DNA, 210 bp, Arabidopsis thaliana landsberg
tgaattaggacacgtgaattcaccacaggttctaatgactcaaaaacaggcaaaagtagtttatagagaggtacaactcaattccaaaagaggtacaaattacttcaaaacaagtaaaaaaagtacaaatgactctagaaataggaattcaacatagtttcaaactttaacatacttgttgcaacataaaaaggaaatacaatcacaaaa

SEQ ID NO: 161180 - DNA, 166 bp, Arabidopsis thaliana landsberg
catatctcaccgcgtaagttgcagttagatgtatagagagcgaaggagccagagggtctaagtagtgtagcttttagacaactggaggcggtttcatgcagttgtggtactcgagctgagacatttcaccgccgttcggcggatcggagtggcatctgtaggagct

SEQ ID NO: 161181 - DNA, 367 bp, Arabidopsis thaliana landsberg
cgatcaaggcagccttagatgaagcagcagattgatctactcgcccctcctgctcgatcctctactcgacccatttactcgaccaatggtgaccaactctacaagacttgttgagctatcaaagcctcttcggatcctcttcattcctcttttgttaggatttgattagacctgctaggcatatggatttggttagaatggtcatggcaataaactagagaatgttgggagttcctgtgttttcaaaccttttccacgggttcgggttttgtgttttgcttgagggcaagcaaaagctaagtccgggggagttgatatgatcctatttttactgcttttagctatgatttacgtataggttttagag

SEQ ID NO: 161182 - DNA, 434 bp, Arabidopsis thaliana landsberg
tctcctccttcggtttaccattccccaccaccaccaaagaaacactacgtgtacaaatctcctcctcctccagttaagcactactctcctcctccggtttaccattccccacccccaccaaagaaacactacgtgtacaaatctccaccaccaccggtgaagcactactctccccctccagtttaccattccccaccaccaccaaagaaacattacgtatacaagtcccctcctcctccggttaagcactactctccccctccagtctactattccccaccaccaccaaagaaacattacgtatacaagtcccctcctcctccggttaagcactactctcctcctccggtttaccactctccaccaccaccaaaagaaaagtacgtgtacaaatcacctcctcctcctccagtacaccactactctccaccaca

SEQ ID NO: 161183 - DNA, 216 bp, Arabidopsis thaliana landsberg
tctagcccataagtccctatcactcggcgggtgagcaacagttatagttatttatttagttgagttagttcaagcaattatacaagattctaccaagtataaaatacctaagatcatgtactaggtggagttccaaacatacatgcattaagattaaactcaactagaaagaatagtgtaaacgatcaaacaaaaccatagaaaccgccaacctaa

SEQ ID NO: 161184 - DNA, 374 bp, Arabidopsis thaliana landsberg
aatgggtttagaggagacgagtttacatggtaggacgggtttggatgagacgagtttatggggtgctatgagtttagatgagacaaatttggataccacgggtatactcatagaattaacaatcaaattacaactatacaatactaaacaaaacaaacaataataacataacaaatacaatttcaattttaaaattttagttacaaaaatacataaaatcaacattatagtataagtgttaatcttctttaacacctctaaatgttattcttctttgatacatttaaatgtgtaatttaatacaaagttactaaattacatatgttccacagattaaattttaaaacaccaaatatttaaaaacaacaaataac

SEQ ID NO: 161185 - DNA, 166 bp, Arabidopsis thaliana landsberg
ctcgtgtaggttgtggacagcccatctttgtctcagtagactccctcagtggcatgtttgggtccttttccccattactttattaaagtgagccgccggttcaggtacaagatactatcattaccgcctgccacaattagacacccaaccagtaatggcaaggacc

SEQ ID NO: 161186 - DNA, 471 bp, Arabidopsis thaliana landsberg
  unsure (1)..(471): unsure at all n locations
taaaacgttcttcagaatcaagggaaaataaaggcaatgtataaaagaatagttcatgctactaaatccatgcatctaagagatgataatgatgataatgaaaaaatgnnnnnnnnnnnnnnnnnnnngcttaactacctccactaatggccgtaaatgtccgtcaccaggtgatggtatgaacaccagctccagtttcatttttcaaaatatttatatttttgtagcaattgagaattggtttctcctattgaaggttgaagatgtttcggtgaagagataagattcgtctttagcatacatgacatgtggtacttggacatctactgatgttagtttaacttttgtcacaggccatacaatcttgatcttcagacttcaacgttagtacgttacgttagtatttttttcttttaattgtcagctatatactgcactatcatacaattaaaggtaaccgacgtttaattc

SEQ ID NO: 161187 - DNA, 110 bp, Arabidopsis thaliana landsberg
atgaaatgatttacaaatccgttgaagtctagctggtcaggatactcggctctaacccgagagacccgggttcgagtcccggcaacggagttactttttttcagttacag

SEQ ID NO: 161188 - DNA, 140 bp, Arabidopsis thaliana landsberg
tgtgatgctaacaatcaagatgtgattagaagtcactaagtcaagccaagcaataacaggttttagtgtgttctagcagttctaagtgaacatgcagaaaccagaaattcaagcagaaacaataaaacacttgaccaaca

SEQ ID NO: 161189 - DNA, 171 bp, Arabidopsis thaliana landsberg
aattcttcgctcccttccggaagcagatgattattcattcgcttctcacgttccggtgaatagccggggcattgaggaatagccagaaaggtatttagggattcggatctgattctacccctctcccctcccctagccaaacgcaaggacccacaccaccctacctttcct

SEQ ID NO: 161190 - DNA, 422 bp, Arabidopsis thaliana landsberg
catcttaaggtaaaaaaccttagaatctccattagcagaagcaggaacaagtctagtatcaagaagcttaagaataccgtcacagattttcgataactcagattcgatcttgcttctgtaatcacggatcgtggtcacatggtcatcgttaccacgactctcttctttttgttcaatggaagagatgattctccaggacgcacgacgagcgccgattacgtttttgtaagcgacggagaggagattacgttcttcgacggtgagttcgtctttgtcaacggcttcagcgactttttccatgaattcaaccatttcttcgtaacgttccgcttcgtctgcgagctttgcgaggtacacgaactcttccctcgccgaggatgatgctggtggtgccgccattagagatcggtgatggatggatt

SEQ ID NO: 161191 - DNA, 98 bp, Arabidopsis thaliana landsberg
agcttccatcacggaccagatcccgaattcttcttctgaccaccgaacgattgagtttctccgatcagatctcagtttctgggaataattcgaagtta

SEQ ID NO: 161192 - DNA, 105 bp, Arabidopsis thaliana landsberg
cgtttttattcagaacaattagtagaagtagagagcaaggtggtacctttgatcatcgcagtatcaggagattctggctctgagactcctattaagtatgagcat

SEQ ID NO: 161193 - DNA, 126 bp, Arabidopsis thaliana landsberg
caaagcagaacatgattcagctatggggtgccattaagcacccgaatgtatatatccccaccttgtttatattcttatggcaagccacgccgcactcagatggtgcaatgttttacatcacgtatg

SEQ ID NO: 161194 - DNA, 222 bp, Arabidopsis thaliana landsberg
tgaagaaaaaatttggtttctgtcaaatgttttgtacatggccctttcaaattctatatcctgtagttagctacaacacgcttttagtttgcatgaaatataaaatctgaactagaatgagaaaacaatttgttccaggtaaaagaaatggtcactgaactcggttgatttgtgagctgaaatactgttgaagctcattagtcgttgtcggtaggcttttcg

SEQ ID NO: 161195 - DNA, 418 bp, Arabidopsis thaliana landsberg
ctcatcaagacgggaggattcgtagcgttgtggcggattgggaagcgaatcccaggtgttttcctcttggaaatgccgacggagcttcggttactatgggaagctctccgaggtttccgatgtatgataatgatttcgggtggggaaggccggtggcggttagaagtggacggtcgaataagtttgatgggaagatttcggcgtttccggggagggaaggaaacgggactgttgatttggaggtggttttatcgccggagactatggctgggattgaatctgacggtgagtttatgcgatacgtgactaataagtaacggagtttatgaataataacgttaacggtttttctctgtttttcttttcttgttaattaagaacttaacgatgtaagattatcgtaatgtgactttgtaag

SEQ ID NO: 161196 - DNA, 228 bp, Arabidopsis thaliana landsberg
  unsure (1)..(228): unsure at all n locations
gaaatttttgactcaaatgagttgatgggtcaaatgagttattgggtcaattggttgatgagtaaaatgagttgggttgtaatggttaatggtttcaatggtttacccaattaacctatcaagttttgtaaaattgaattaaaccaactaanatcttaaaccaatgtcaatttagttaaccaatcatctaaccatctataaataaattttcaattctaatatcagcat

SEQ ID NO: 161197 - DNA, 437 bp, Arabidopsis thaliana landsberg
tcatactagattataacccgcggtataccgaggagacaatttacttttttaaattagtatatataaaattctgcaaattatatctatctataaaatatttttattttatagtttacaattgttattaagtaacgtccttccaaacccgttccgccaaacccgtcccataaaaacaaacccgcggtataccgctaagttaaatatataattaaaataaatattttacgatattgcaattgtattttggtttgtcaaacaaatttttgttttaaatagttgccgaaatctagttcaaattttggagaaataagatttagtgaatagattaagaatgtatttaggtgcgttttgcttattttaatggattgcaattgtattttggtttgtcaaacattttttgttttaaatagttgccgaaatctaattcaaattttgga

SEQ ID NO: 161198 - DNA, 195 bp, Arabidopsis thaliana landsberg
gttaacattcttccggatcatagagttctaaatggccaaacggtagctcgtttttgctgccagtggaaaagagtatgtcgagaaaccggagctgctgatgcttcaaatgagataagaaggaaaggttcatgtttatttgtgaatcattatgtatgaaaccttcatgttcgaataagatcaagaactgagctagca

SEQ ID NO: 161199 - DNA, 395 bp, Arabidopsis thaliana landsberg
ccgcgagaatgggcaaaagaatataagtaagtggttttgtagtcattgctttggctgcagtagccaaaggagatgatagttaaacttgtttgaatgatgttccagctataagtagagctattacagcatggaaacttgttttggcagggagatttaggttacttaaccgctggtgtgacattatcgaggtactttttggttgttttttgtaccaaatggcactttgtgtttgtatatctaatgagaaggagatgatgttaacttgtagaaaaatcaacggcacaatatttcagaagatacttggcaacaagtcaaggcgttaagccgaagtgtacatgagaatctagaaggataaaaaactgaaggtacaaattgttagaagtgtgtaaatatgt

SEQ ID NO: 161200 - DNA, 378 bp, Arabidopsis thaliana landsberg
cagaaaaaaaaatgttatacgttatttttttctatattgaattattgacaataaattggttcagaaagttataaaaaaaaaaagaagacaaagtaccataaatattttccatctaccgaaattttttaaaagtaatgtacttgtcttgtcttcttctaaggttgaagagcttaacataaacacaaatcatacaaaccaataaagtacaacacgttgaacagtttttaaacgttaatgggaagggaaaaggcacctttttcttaaccctaaacacaggaaaaggtgactaacaaacccttccttaattgattcctaaggtacacattacacatttgcctcgagagagttctcagagacagctactacagttacctagct

SEQ ID NO: 161201 - DNA, 748 bp, Arabidopsis thaliana landsberg
  unsure (1)..(748): unsure at all n locations
taaaaaaaaaaaaaaaaaaaacatacaaaaaaaaagaataaaaataaaaaaataaaaaataaaaataaaaaaaaaaaaaaaaaaaaaaataaaaaaaaaaaaaaaaaaataaaaaaaaaaaaaagaaaaaaaaaaaaaaaaaaataaaaaaaaaataaaaaaaaaaaaaaaaaaaaaaaaaaaaaaaaaaaaaaataaaaaaaaaaatataaaaaaaaaaatgaaaaaaaaaaaaaaaaaaaaccaaaaaaaaaaaaaaaaaaatataaaaataaaaataggaagaaaactaaaatataaaaaaaaaaaaaaaaaattataaaaccaaaaaaaaaataaaaaaatatttcaatttttaaaaaaaaaaaaaaaaggtaatagttttaaaaaaaaaaaaaaatagaaaaaagtaaaaaataaaattaatgaaggaaaaaaaaatatagaaataaagaangaaaatataataaaaagataacataaacaaaataaggagataaaaaaaaaaaaataaaaaaaaaaaaaatagataaaaaaattaaaataaaaataaaaaaaaaaaaaaaaaataaaaaaaaaaaaaaaaaaaagaaaaataaaaaaaaaaaataaaaaaaaaaaaaaaaaaaaaaaaaaaaaaaaaaaaaaaaaaaaaaaaaaaaaaaaaaaaaaaaaaacaaaaaaaataaaaaaaaaaaaaaaaaaaaaaaacaaaaaagaaaaaaaaaaaaaaacaaatcgttttgcg

SEQ ID NO: 161202 - DNA, 565 bp, Arabidopsis thaliana landsberg
aatgataaataagatatagctttcgcaactggagataatagtagtgaattattgtggttcttctgtatctagttgtttcttgtggtccaacagttatgactacttatgagttatgagtagaaaaaaatggcttggaaaaatatattaagagacacatgcaagtacacactacattgagagaaaatactatatttagcattgcattttgtcaggaacaacttagcattttgatgaagtaagtgtgcttcacaaattttcatatatatttttttccagttttcagcgtttggttcctttttgaacttgggaggtgcggtgggagctttgtttagcggtcaattagcagtcatccttggcagaagacgagtattaccattttaccctatttcttaatcatactagtaaattagtaattactattacatagagaattatacactagtttctttcaaaattattttcttagtactaaattctaataaattttctttatttttttattatgaataacaattaaagacgttgtgggcatgcgatttgttctgcatttttggttggctctcca

SEQ ID NO: 161203 - DNA, 901 bp, Arabidopsis thaliana landsberg
tctctggatttggaaaagttatggaagatgaaattagttcgtttttcgaatcatccccacctctgaagaacatggaggagattctagagaatcttaatgagttcatcaaactgaattcatcgtcacaaggcaagatcatagctgttgattatatacgtgacattattgaattattgaaaatgattcaaagggtttttaaatttcagggggaaggaggattgtatgtgtgacttcagggggaacaacggttccattggagcaacgatgtgttaggtatatcgataatttcagctccggaaacagaggtgctgcttctactgagtaagttttgtttctcttatataaaccctaataaagttgtggtttttctctgtttttatgatcactctatgatgtaaattggttttgatttggtgcataaggaatttcgtcaaggctggatatgctgtgatatttatgcataccaggtaacgttggccttgtcatgtgtatctcaattgtgtgtagttgaaagataactgaaatttttgtttttgttggtaatagttatggtggtttttgatatcggtttattatgcgaatctttaggggaacttgccaaccgtattgtcgatctcttcctgatgatccattccttgaatgttttgagtttcctgataagactaacattcaaggtttttttcttagaacatctctttctcaatctatgcacatagattcatctttattcaaatgtagttcatggtttatggatattaagtgtgtgtttctgctctctatggttgtaaattatgtgtctttatacatcattttgttggttttcagttcatacatcacatttggaagctgtgaaaatggctgttatggatcagcaagctgtatgtattagaccatttgttta

SEQ ID NO: 161204 - DNA, 353 bp, Arabidopsis thaliana landsberg
gactaggttaacttaagggtctctattgagtatgaacttgttgtctagggataatttattgagcatgtcaatgacctgtaaactgaggaaacgaaactattcaattaccccatcctcgggaattgtttatctgattgattttattgtttactctactgctatttactgcatcttgtcatctgttgcttagtttctacaattctttactgttactcgacctgatactcgaccacccaattgtctggcaacaaactgtgtagtcgagtatccctgttacattttttgtctgttacttgacttgtcactcgaccacacccagtgctcaccacacccagtgctctacaaagagctgt

SEQ ID NO: 161205 - DNA, 354 bp, Arabidopsis thaliana landsberg
gactgttttaacttgagggtctctattgtttagacacttagatttggttatcgaacttgttgtctagggataatttattgagcatgtcaatcacttgaaaactgaggaaacaaaactactcaattaccccatcctcgagaatttctcatctaattgatttcttgtttactttgctattgtttactgcattttgttacctgttgcttagttttgcaacttttgcctgttactcgacctgatactcgaccacccagttgtctggtaagagactgtgcagtcgagtatccctgttacattttctgtctgttactcgtccagtcactcaaccacacccagtacttggcaacgagctgt

SEQ ID NO: 161206 - DNA, 117 bp, Arabidopsis thaliana landsberg
  unsure (1)..(117): unsure at all n locations
atagtaagtagtgtatatagcatagctgtaataatagtcggtctggagaatctgtgtcataagctctaaggttaagctctgacgtttctaacattccaacgagtctgacnaacaaaa

SEQ ID NO: 161207 - DNA, 209 bp, Arabidopsis thaliana landsberg
tcaactatttaccttatggtatagattactttcaaggtccaaccggtcggtttagcaacggtcggaatattccagacgttatcggtaagttttcaatccggttttcttgatttaattagctgaatccattttttcttacgttattcgattgtcatatagccgaccatgatcgggttcttacagaaaaaaattataaagacagttgtcca

SEQ ID NO: 161208 - DNA, 640 bp, Arabidopsis thaliana landsberg
  unsure (1)..(640): unsure at all n locations
aacagaaatggctattcttttgttcccaatcaacccaattatagttatgattcgtatacacgatcgtcgggttggcgaggtccagctttctcttcgcggaatgcttggtctaggagtaattcagtaaatcaacttttcgtcttgtcatagatatacacctaggaatgttttagcctccttatgttttaatattctctttcagatagttaacagacacttgatcgatgatcccatatccgcttactcaagaacatcgatttcatcaaccgtgtactaaaaatcatcatcctctgattattcctggttttgattttgtttcaaaagtatagtctttacatcctctttcagaacttgaaaaattatatattgttcttggcagagatttagtaccaccatcacatactcggcatcagattccaatccgtaacagcaacaacctgcgaagacaacacctcgaggcactaagacaagccgnnnnnnnnnnnnnnnnnnnnnnnnnnnnnnnnnnnnnnnnnnnnnnnnaaaccaatgaagaagacgagatcctcaaacatctaacaaaagaaacatatagcccagttccaaaaagcacccttctcagaagcctgagcttatactacagaaacaaaaacccgggaag

SEQ ID NO: 161209 - DNA, 187 bp, Arabidopsis thaliana landsberg
taatcaaacacacttaattatacattgcatttcagatacaaacactcaaacagacacttagagcatacaaattacataattaaatccaaaccaaacccaacccaaaccagatcgaaaatatcgtccagaggacatcattactccactttaaaaacacgtagaaacaacaaattagggagatattttt

SEQ ID NO: 161210 - DNA, 210 bp, Arabidopsis thaliana landsberg
ccgaattccggagaagaaaaagatgaagtgattgattaaattgaaatcgataacatcaaccatctctttctctcgcctgcaaagttatctccttttcaaaccgaacgatcaattcgggaatcttcatctttctacgtgttttctcagctatgtatctctgggttcgacttcagtaaaagcttcaccagccatggatttcgttaggttctt

SEQ ID NO: 161211 - DNA, 359 bp, Arabidopsis thaliana landsberg
attacaatgcctaacttctttgaattccaaaccctttactacactaacactttttgtatcccccttaagaactctaaacttttactctctttttttttctttttttttcattcccattctcttttccaatcattccatgcacaatcccaatcccaaatacgagtctccacctagtcctagctaacccaaaaagcgtggggtaggtctacatgaaagactgcacttgtcggctcatacctatcatgttataccaagctcaatcgaaaaagacctcacaatcacacaaatgatctttgtcttgaaataaggctagggtaagggtatgggaaactcctctaaaattgagagacagctacttg

SEQ ID NO: 161212 - DNA, 430 bp, Arabidopsis thaliana landsberg
ataaacaaaacaaattatatagcacaaaggcaaatctttcctagaaattgccataattcacgttacaacgctccaaaatagatttgaccagttttctaactcgcaactcccaccaaatttcaagaacaaacaaactatatgacttagagaacctcatgtttaatatcttcctccactgcttctgctttaactgtatcagttgccacttcctccttgatggttccatctccctccctcctccagtaaatcatccattatcatttcatcctctccaccattgatatcctctacttcatcttcttcatcttcatctcctactcctcctccaggtatctttctcttctttggcccatgctccatcctatgagtctctaattccttgtccatcgtttcctgcaaattcataccctcgttgtttgctttcctagcc

SEQ ID NO: 161213 - DNA, 219 bp, Arabidopsis thaliana landsberg
  unsure (1)..(219): unsure at all n locations
aacaagagcaaacttttcttattttcaatggagccgttgcttataaatacgctccctcatcatatcttcttcttcttcttcttctttggtgatcaatcataaaacacaaagccatctttcatctntttcttcttctttccttttcaagacctgcaaatatttctcgtctcgatcaaagctttgcgactgatcactgatgtgctttcgatctctcgtgac

SEQ ID NO: 161214 - DNA, 413 bp, Arabidopsis thaliana landsberg
gcgtcaccaccgtcatcaacgatgagatcaggaccacctccaggaccccagtcaagagctctctccgtacaccaccaatattcttgaagagtctcacctttccaagcgaacaccgcggcggaatcacgagcaatagcggccgcggcgtggtcttgagtggagaagatgttgcaagaacaccatctgacttcagcacagagagcggttaacgtttcgattaaatccacgatttggatcgtcatgtggagagaaccggtgattcttgctcctttgagtggctaagatggtccgaattcggtaacgcaacattcaagtccaggcatttcgacttcggctagctcgatttcgagacgacagaagtcggcttgggacatgtccttgacattgtattcgcggccacttgaggttttctc

SEQ ID NO: 161215 - DNA, 373 bp, Arabidopsis thaliana landsberg
  unsure (1)..(373): unsure at all n locations
atcccatggtcagaagaggatcggtgcatccaagaagaataggatccatagttgaggtctagattcagaatctgttccataggttgtgtctgtcgttccttgatgcaatccagacgagtggttagctccatgatagcaccagatgatgcaggaggatgataatgtcttcagtagtccttttcttacaagaccgtttactctcactttatacgcatgtaaatcttgtgagatgggtttatccttggctatcannnnnnnnnnnnnnnnnnnnnnnnnnnnnnnnnnnggatgtagcattcaagcttggtgaggtaggtacttgtctgttgtttcctcagccattcctccagtctgctattaggctagttttatc

SEQ ID NO: 161216 - DNA, 248 bp, Arabidopsis thaliana landsberg
ttagaaatataaaatttacaagctgtaaaatgtttttttttgtatatatgctttaaggctatgatttgattgttataattaatattagcaacaggaacaagactaatacaaatatcttaattgtagagttgatcaatctcgtctttgtatttagccacgaccatgtcccgtctaatcttcatagttggtgtcattaacccgttgtctatctgcattgttgtgtcattaaagagttctcttaataaggt

SEQ ID NO: 161217 - DNA, 424 bp, Arabidopsis thaliana landsberg
actgattcaagcttgattcactgactggtttatgtgtttaatacgctgtagatcaaagaaagagcagtatagctagagatgtggaagatgatgggccaatagaggtaatagaagatcatagagagagagaagctactgcgtgaacagagttcactatggatcgagcaaaaagaactgtagaggaagatcacacaagccttggttgacaacgttgttctctaaaccaaagcttctcctctgaatctttgtttaagaaacaatctctttagtccttttgttgaagccaagtcttttttttttcttagagaagaaagcgaaggctgttttagcctttttgcatcaagcacataatgagaattgtggtcttgtgaccaatctcttgtttgttgtggttctggtgtcgtaatatcatcattaataagaa

SEQ ID NO: 161218 - DNA, 145 bp, Arabidopsis thaliana landsberg
ctattccgaaagtatatagtgttatattttgcttaaatatttctataaattaatatttattaatttatggataaattaatatcattataaattaataaaattttatggtcccaacattattaatttatagagtttttactgtata

SEQ ID NO: 161219 - DNA, 173 bp, Arabidopsis thaliana landsberg
attattattctgggaaactcaggtttctgatgtaaatcactaggcacagacacatctgaatcagaccaacgcaaacccagaggaccggttttatctagtactagtagtaatattaccagtagtgaaattaacgaataagactgcacttgcaagtgtattttgatattcgttga

SEQ ID NO: 161220 - DNA, 244 bp, Arabidopsis thaliana landsberg
ccttaactttgctcttgcgagtctgtactagtttattagctgtttccttaataactttgttgaacaacaacactgttgattctctcttcttctctgtgtcttggtgtttcagaacaactctgggtttgcgttgttgttccttgtcgttgcttaagttggttcctttgttctttaagcgtctcctaccaccagatttcgaggttgtgtcagctccggaaatgatttttcctctcttgaacttgag

SEQ ID NO: 161221 - DNA, 166 bp, Arabidopsis thaliana landsberg
gtttttttacgggacggatttggcgagacgggtttggcaggacgctacttaataacaattgtaaactataaaataaaaataaatagatttaatttgcaaacttttatatatactaatttaaaaaataaattgtccccgcgataccgcgggttaaaatctagtaatt

SEQ ID NO: 161222 - DNA, 183 bp, Arabidopsis thaliana landsberg
attgatgagtgttgtaggtttgagtcaatccgactatttgaaaatctagatggcaaagcaacaaacttaaggacatcctagtttccaacataatccacaaaggctggagctaatctcactactcttccttttacctcatcaaaacggttagtgttcgtagtacttgactccttgttcatacct

SEQ ID NO: 161223 - DNA, 375 bp, Arabidopsis thaliana landsberg
  unsure (1)..(375): unsure at all n locations
attattnnagtgnttctcttattttttttnnagccaaatgaaatgtctatcaaccaaaccaaagcataaatagtttttatttggtttcaatttactataaaccgataacattgaaaacagcaacactgagccgatatctaaccacaaaaaccatctccatcaatctctgtctatatctatggacacagtttcaatttcaagactacaaaaaacaacagaagaaaacacccaaacaaaagacagagacaacaaaagagctctcttcttcttgtaaagttcatagatagagagagacaacnaaagagctctttttctataaagggatcaaagaagtagtcaaatcctaagtttaagcaaaacaacaccacattcctt

SEQ ID NO: 161224 - DNA, 473 bp, Arabidopsis thaliana landsberg
agctgatcccaacgttaaaacctgacactcgtcgcaagttctattacgaggcagacacactactttgtgtttaccttctattggatcgtatcctaaaaagactgttagttccttccagctttttcttggtttgggtaaggttaagaactgtctcgtgatagggttccaaactatcggcatttttgatgtcttaaagcagatcaagccctggacagattccgtagaggaataaatactacatccttctggtaattccatatgataacgataaagaggctgagaagaagagtaagaccttctagaattctgaagtgaatgaagatgttgcggaattgaggacacaaacaacttgtcattttatatgaagcaaactaaaagactcggccgtggggaccgagtttcgaacaagttgatgaaatatggatcggtggtgattgataaccaaagcttagacacgcaacgaaacgactaaa

SEQ ID NO: 161225 - DNA, 95 bp, Arabidopsis thaliana landsberg
tcgaataatatgttcacggattgccccggttgttagctttccagggaatctaactacccttcgatccgatatctcatccgagaattatctccatg

SEQ ID NO: 161226 - DNA, 164 bp, Arabidopsis thaliana landsberg
agagaagctaattgtaatattaccgaacagtagaaacattacaagacactgaagacgcatcgccaccgttaaaagctaaaaactaacccagttggtggaaatcatcggtcactatcaaagacaatcgacaagaagcaaataaaagattacacatatagccaaaa

SEQ ID NO: 161227 - DNA, 261 bp, Arabidopsis thaliana landsberg
ctacatatgttgtatttattataaaaataacatttttaaacaaagtcaatccaatgcagcattatatccaaatagtaaaaatattaaaaaatattatagcatcacttttttactatactattttttatgtaattcaaataaaatatacaatttaatttatacaaaatattaatgtccgtggtgtatagcacaggttatatctagttactgattgtaaaagactaatcaactcttctttgtaagacaatactcgtcaattct

SEQ ID NO: 161228 - DNA, 400 bp, Arabidopsis thaliana landsberg
acatcaccatcacgtttaatctctttccagcagaaattcatctcattcccagccatcatcatcatcgttgtatcaccgcacttgatgtcgcgttgtggtcatgaatgttatacgtggttggtttcgtcaccgttcattgccagattgttaggtaaggaaaacctatcatggttatgaactatactactgaaattgtttcacttagcaattggattcatggatcataacttcaactattgggtttttgtgtgaatatgtgaaaaaaggaaacagttcaagtggtggaattggtgatccgtttcccgtcacgtacgaaggagtttggacgagttcttaacagttctgaatagatctcgttcccaatttttcagaacagttttccgatccaaaatcagaggta

SEQ ID NO: 161229 - DNA, 268 bp, Arabidopsis thaliana landsberg
caatagtttagtgtgtaaaaaggcgagcatatcttttcaaacctattggatacaggtaagctgcatttaaatatcaatcatgtttataaagagttgtttatattgaagaatgttttggctggtcctcggtctattagtaatatttctgactcatatacaaagatggccctcaatgtatatctatgtttttttcgtcatcatggactaacgatttaggtgtataataatataaccaatagttatatagttctgacggctattgagcata

SEQ ID NO: 161230 - DNA, 404 bp, Arabidopsis thaliana landsberg
ttttgatgtatgtgatattaattcatattcatggtcttgttgttgttcgatttcggatatatctaaacatattaagattaggcattggcaatttgaacaaggctcactgatttagcacttctatgattcagagtttttttttttttttttgaataaaaatgattcagagttgttgcaactgcagtaacgtatatgcgtcttgtttacacaaggtatggcttcttcggtaatcgttgtgtagcacgaggcttggtcatttgatttatgggtactgtgttttggcagaaagagtttgacggaatatgagcctcggcttgttgctcctacatgcttgtatttggcttgcaaggcagaagagagagtggtgcatgccaaacttcttgtcttctacatgaaaaaacttt

SEQ ID NO: 161231 - DNA, 232 bp, Arabidopsis thaliana landsberg
cttctcacttacttaacccataagccatcaatcccaaacacaccacaacaatggcttcttctatcttcttcttcttcttccttatcttcctctccgtcgtctccgccgtcaaactacctctctctcccttctcccactccgaccaatcaccaaaagacccttacctctctctccgtcgtctcgctgaatcctcaatcgctagagctcataaactcaaacacggcacctcaat

SEQ ID NO: 161232 - DNA, 485 bp, Arabidopsis thaliana landsberg
acaggatctgttctataggctcgtacctctgtttccttgatttctcaagagacaggccttaaaccctggttgatgaaccatgaccgtgcggctagagcgtgattgacggctacgatcgtccttggatgcatccggtgctgtagaggatcgttactcggctcggttctaccttgtcggggtggtcgcacggcggtctgacaggtttctttttttttccttttcaccctgaaacttttaatttcttttatttttcaccctctaactttgtattattcccatctggtcctttttaaaatttccacgttcaagtttgaatatcttccataactgattgggacaaagaaactcttaatttttggttgtgctgtaaaagattttgttaagtatgtcacctcaattgatgtcattttatttgtttgtatgtcagttttgaggtttctgtttttattttggatcctccaaataggatttaagaagcaattttg

SEQ ID NO: 161233 - DNA, 229 bp, Arabidopsis thaliana landsberg
tttctttctttctgtttctatttttgtgtttttttttcttttttttgtttttttttttcgttcttttttttttccttttttttttttttctttgttttcgttcttttttgtttttttgtttttttttttttttttttcttgttttgcgtttgtttttttatttttgttttgttttttttttttttttttcttttttttttgggtttttggggtttttccggtttttttc

SEQ ID NO: 161234 - DNA, 391 bp, Arabidopsis thaliana landsberg
tttttgccttataagcaaacatattaattttttaaatattatgattgatatatttagaatttataaaacattatgaatatttaaacttataaattttttgatatatcacaatttttaacatcattatataatatatagagtttaaaaaaatcttaattttttccgtcatattttatgattcaaaattttaaaaatgaacatatattagccaattgacaaaaaatgtgtgggttcaacgtcccgcatcgacaaaaatatatagacaatgatttataaacatatcataaataagatcagcattaatataaataaatggtttttttacgggacgggtttggcgggacgggtttggcaggacgttacttaataacaattgtaaactataaaacta

SEQ ID NO: 161235 - DNA, 288 bp, Arabidopsis thaliana landsberg
ttctcctgatttgattgtttattcattcttctgagtcctaattcacactctgaaaatatgttgacagggattctctggactgtgaagatggtgggggctctgttttcaatctttttcttcttgctagtgatgaaaaattgttgctacattttcagatgtgaatgttcaagattctctatcttttttttttttttgaactctttttaacttggagtggtttcccaaaaaataagatgcaaaactcatctttttgttggttttctatctttaatctgtgagaaataaaaa

SEQ ID NO: 161236 - DNA, 558 bp, Arabidopsis thaliana landsberg
agcttgcaatgtcttgttgctctccatcgcctactcttaggccgagcttcaagcaagtattgaggaagcttgaagagatcaggaaatgatgcattagcaaacttgactaatttgtggaagagacataggaagagaaagattcaaacaatcagaaacctttttgcaagattgattcaatgcgtagggcggataagagagtcttcataggatgatacaatacatataacaagttctagcttgtggaagttcacagagaagtagttagtctgattatctacagaagtaactgaagatggatcaaggttttgcttaggaaggacttttagaacagagttattggagaataactgagaaaagagccaacaagagactcgaagaactttgtaaggcctctagtaatcatagaacatcatctttttgaatgtaaattgtctttgcagttgtatctttatagccttgctcggtctgtgcagatatgattcttgagttgtatacctgaaatctccaagaggctctctctctctttctttctctatatatatatggttcttgttcttg

SEQ ID NO: 161237 - DNA, 109 bp, Arabidopsis thaliana landsberg
aacaacattaccacaccaacgatctcataacggtgcatagtttcaagggttaaccttgggagcccatccagagatcacatacttttcctcggtcttagttttctcaaaa

SEQ ID NO: 161238 - DNA, 267 bp, Arabidopsis thaliana landsberg
gaacttagaacccacacaattattacataaatggtcactcactcccacgcttaacacgttaattctcatcacatggctatggattttactaacattaaccccaatcgttttattacaacaccatatgtcatatcatagaagatcccacatccatttagaatgtctcaacgtcagccaccggattcaaatccgcagctgcttcagcattcttcatcgcctcgaaccgtggctccttgggctgaaacttgagtccggcatagagtttca

SEQ ID NO: 161239 - DNA, 106 bp, Arabidopsis thaliana landsberg
tgaaaaaagggggatcagttccgtcgccgcttcttcgatttttgacgccgccgcttcttcttcttcctcgcaggtacgttctgggtaacttagggattgcgtcgtt

SEQ ID NO: 161240 - DNA, 390 bp, Arabidopsis thaliana landsberg
ctcaaatccaaaaagaagaaggcttaatttcattcaactcttgccgtaagacaaagttctgtccttgtttcttaagttgtccctacattgttatggtctttcagaggtttagtccggaaactttaaatgggtgtcgttgaaccgtacgagactatatcttattgactctaaatacatagacatgttaagctcaaataaattcttgagagaatatatactaatgatgatggattttaggctccctgacaattcaactaaaaaactatttacagaatatacgaatgatttagatgaatgatgcatttcacgaatatatatatttgtttcttattttgtcttttgtgttttctccatatggcagttactgatctattttcttttctggtttcg

SEQ ID NO: 161241 - DNA, 259 bp, Arabidopsis thaliana landsberg
aattcctagctcctcgactccaaaaaaaaatcataaacgtattaccgtctcttgttttcctcgtaaggttctcaaaatcgattatcttcattacactcgacttgtctctgtttcgaatcctacgtcgtgtttttcttttcagtattcggttacgagaaatcttaaaccgtacttacatttcaggtattatatcggtcgaagtctccaatcatcggtctgagtaatctttgacaatgtatgtgtaattcccgaccgattg

SEQ ID NO: 161242 - DNA, 60 bp, Arabidopsis thaliana landsberg
ctatctctctctctctctctctctctctctctctctctctctctctctctctctcgcggt

SEQ ID NO: 161243 - DNA, 231 bp, Arabidopsis thaliana landsberg
ggatcacatctcagtttcaaattgttaagtcaaaagagcaacaaactcatcaatcttcttgtcggaactacctccttcagagatagcttcgcgagccaacaccttaagcttctcaacattcttcctcatctctttccctctctctccttccatgacctcaacaatgcatctcgcaatctcttctttactcgaaagcccttctccatcggtcctcactctaaccccaatctt

SEQ ID NO: 161244 - DNA, 487 bp, Arabidopsis thaliana landsberg
acttcgtttcactgcatagacatggaatattactctcatgatctatcagatcggtttcattcttcagcatttcccatgtcgatcattctctgttcttacttaggctgatgaacaagcacatccgttttgtcagaagttgacagctgatataacatttgaagataggcattccattacattgtaggtttattatagttgagcaaacatatatacattcccagctctggcttggccttatgcagggacaatccgtaaagagaaagcccaagctctccaatagagatgcgtttcacctacaaagttgaggtaaggtcatcttcggacgtccaggaacagagccaggagttcctaagagccaatccaactatctcttttctaactgatgtttctgtacggctttgggctacttgactctggatgtgaaaaccagaagcgaatttagtgattcttcaaattagaaagtttctcttccattttcaagaacaat

SEQ ID NO: 161245 - DNA, 174 bp, Arabidopsis thaliana landsberg
aaaacattataattcttctaaaattgaactttcttttattttttcaagcattaagagatcacaacagatagagtgtcagaacaaatatataatcaaacatagcctaactgaatgggagagaatgataacaggaataaggaacgaccagaagaagtgaattatgatatgattact

SEQ ID NO: 161246 - DNA, 2352 bp, Arabidopsis thaliana landsberg
atgataacaataaaatggagcttgtgtttaatcttctacctttcaaactcaataattgttattgctaaacacttgtgtcttccagaccagagggatgctctttgggaattcaagaacgagttctatgtccaagagttcgatccctctgcgaatggtgatacagatatagagaagtggaggaacaacactgattgctgttcttgggatggtgtttcttgtgatcccaagacgggagtggttgttgagttagacctcgagttcaatggtctcaatggccctttgagatctaatagtagcctgtttagactacaacatcttcagatcctagaccttggcagcaataatatttggggtacgctaccagattccatcggcaaccttaaatatttgaggtttttgagttttaaggattgcaatctctatggaaagatttcttcttcactcggaagtctttcttatctcactcatcttgatctttcggataatgagttcactagtgaaccaccagattcgatgggcaacctaaaccgactgacagattcgctcacctggatcgaccttagggataacaagttcagaggtatcctcccatctagcatgagtagcctctccaaactggagtatatttttattggtggaaattcattttctggaaccattccctcttctctcttcatgctcccttcgttggttttacttgacctgggaggaaaccacttcaccggccctcttgagattgggaatatctcttcacaatctaatcttcaacatttaaacattggaagaaacaatttcaatccaggcattgttgatttgagtatattctcacctctcttgtcacttggtcatttggatctttccgggattaatttgaagatcagttcaaccgtcagtcttccctcatccatatacacctttattttatcgtcctgcaatatttccgagtttcccaaatttctacgaaaccaaaccatgttatcctatttagacatctctgccaatcaaattgaaggccaagtaccagagtggttatggagtctgccagagttgcggtatgtaaacatttctcagaattctttcaatggttttgaaggaccagcagatgttattcaaagatgtggagaactaattatgctggacataagttcaaacacattccaggatccatttcctttgttaccagtagtctctatgacttacttgttcagctccaataatagattctcgggagagattcctaaaacaatatgcgaattggataatctttggatacttgttttgtcaaacaacaacttcagcggttctattccaaggtgttttgggaatttaactctttgggtcttgcatcttcggaataacagcctctctggtatttttctagaggaatctatcagtcatctattgcaatcacttgatgttggtctcaatcggttatcaggagaactccccaagtctctgatcaactgcactcgtctcgagtttttgaacgtggaagagaaccgaatcaatgacacatttccatcctggttgaaatcattgcccaatctacagctgcttgtccttcgttctaacgagttccatgggccaatattttctcctggagattctttaagtttccccaaactacgattttttgacatttcagaaaatcgcttcagtggagtcttgccatcagattactttgttggttggagtgtaatgtcatcgtttgtagacattattgataatacgcctggatttacggttgtaggagatgaccaagaatcctttcataaatctgtggttctgacgatcaaaggattgaatatggaactggtagggagtggtttcgaaatctacaagaccatcgatgtctccagaaacagacttgaaggagatattccagaatccatcggtatactcaaggaactgattgtgctcaacatgtcaaacaacgctttcacgggccatcttccaccatctctatcaaacttgagcaatctccaatcattggatctatctcaaaacagattatccggcagtatcccaggagagctcggggaactcacatttctagcgcggatgaacttctcttacaacatgcttgaaggtccaataccacaaggcactcagattcaaagccagaatagttcttcatttatagggaatcccagtctatgcggtgctcctctccaaaaaaaatgcggtggagaagaagaagaagaaaaggaagagaaagataaagataaagtatttagctggatagcagctgcaataggctatgtacctggtttgttttgtggactcgccatcgcccacattctcacttcatataaacttgactggttcacagaaaagtgttgtagaaaacaa

SEQ ID NO: 161247 - DNA, 260 bp, Arabidopsis thaliana landsberg
tgatcgcgctgggcttataagtgctgctccatggtaagaatttcagaacaaggcttgaacattgaatgtctcgctgagttatgttagcaaaaaagtattttctttaatgacctgtcagtgaatacaagtgtggcttagcattttacgcttattaattgtgcaggataagagttccgtggcctttccaatggggagcaccattgtttgatgctggtgaagcatttgccatgatgatggcttcttttgttgctcttgttgag

SEQ ID NO: 161248 - DNA, 273 bp, Arabidopsis thaliana landsberg
  unsure (1)..(273): unsure at all n locations
gatgaattcattcttgttctgtttatatggacttttagattttaggattgaaaaaccaaaagaaaggattaatcnagtttgctggtggtgttttcactcactaaattaccatttttagctaaagttatatgaaacaatcggtatgaaatctagctcgattgtagtataattgcgtcagaatcttgagagcttggattatttgacctttatnnnnnnnnnnnnnnnnnnnnnnntattctgaacattttgaaagcccgtattttatgggccgga

SEQ ID NO: 161249 - DNA, 471 bp, Arabidopsis thaliana landsberg
  unsure (1)..(471): unsure at all n locations
ggggggggggaaagggggggggggggggtgggtgtgggagggggtgtaggtggggggaggggggggggggggggggggttgtggaaggggggggggggggggggggggggggggggaagggggatgggggtgggtggaggggggtaggtgggggatggggggggggggggggggtggggatagatagggggggagggggggggggggggttgtgggggggtggtgggggtggggaggggggggggggggggggggggggggggagggggggggggggggggggggggaggggagggggggggaggaggggggggggggggagggggggggggggtgtgggttttttttgtgggggcgggggggggggncacccgggaagggggggagggggggaggagggggggggggggaggggagggggggggggggggggggggggggggggaggggggggggggggggggggggggg

SEQ ID NO: 161250 - DNA, 241 bp, Arabidopsis thaliana landsberg
aaataaatttcaatcagtgaaatacttttttggtttctaaaaaataaaagatattaatattttaataaatattagttatataattaaattttaacaataaaataatatttgacaaatagatgatatataagtgtttttatagatttttcagagtttctcacttaagagactaattctactctctttcatattttttgattatattttatttttatattgaacagtttttcaataaaaaacc

SEQ ID NO: 161251 - DNA, 492 bp, Arabidopsis thaliana landsberg
cattgataagggtaactctagggttcatcaaatggttaataggcgaaaggtatatacccatgtcgatagattcaaaaaccgggtcaatccactctcgtgacagagatccccataactctaccacttcctaatctcaaccctcgttgatgaaacatagaagagcaggagtttaagaaataatttaccaaagccaataggcagacaagccaatcccttggtcgagtctacaaatctctagaattcgtaggtcagacatccatttgaactttttttggacgctggacgtctatgatcgaatctacacattagccagcgaaaaccgcatagggaccaagcgaatccagaagggtataaacctaaacactaaccacctaactaacctagagattagcctaatctaatctatcctcaagaaccctaatcactactcatgcaacattctcaagaatacaaacccagaaattactgaaatcataccaaaatgtagatgta

SEQ ID NO: 161252 - DNA, 412 bp, Arabidopsis thaliana landsberg
tatgtgacccggatcaacagaacaaccattatgaacacacagatcatggcgaagatcaagagccactggaagcaacttgtctttgagctttgtgaatatatctttgtcgctcttgttgtcgcgtgtcctgtgctcgataggctttgctcaatggcctcctcagtagagtcaagtatcttttgttaatgaatccacaagaaaagaaagaaagaaaaatgttaggagcaatgaagccggttaaaaggatatatgaaccaatatagattcttctcttgttacatagttgttgattaaaaaagtaagaataattggtttggtgaggaaatggttagcatctacactctcctgtattttgcgcagattgactaatagctagaattctctccttgagttgctcttgcaagtccccccc

SEQ ID NO: 161253 - DNA, 261 bp, Arabidopsis thaliana landsberg
ggtttctcatccagaaactgttcaatataaaaataaagtataatcaaaaagtatgagagagaatagaattagtctctcaagtgagaaactttgagaaatccataaaaacatttgtatatcatctattggttaaatattattttattattaaaatttaattatataattaatatttattaaaatattaatattcttttttttttgagaaaatatctcactgctgatagagattcccttaataactaactaacaaaaagcttt

SEQ ID NO: 161254 - DNA, 124 bp, Arabidopsis thaliana landsberg
gaaaacaatctctttggtcaacaaaaaaaaaaaaacaatcactcaagcgacgaggaatggtaaaacagtgagcatgaagttctcgtaattgaaagtagctgagcctgataacgccgtatccttc

SEQ ID NO: 161255 - DNA, 184 bp, Arabidopsis thaliana landsberg
gcttgagatcatcatttttaaactagaggtgttggatcacaagacgcgggaaagagcaggagttattacacctactctcggctctccagttcctgtgcttttgcagtttgatgctgcttctgatgtatacctttacttttggattatatatctcttgttagttataactctacactcttttaga

SEQ ID NO: 161256 - DNA, 252 bp, Arabidopsis thaliana landsberg
  unsure (1)..(252): unsure at all n locations
tgcattcatttagtttcttctactttggaacgagacaggtaagaaaacgctataatgaaagtaacttttaggcccaagaaatccaaatgagccaagatattaaaagcccataccgacacaataagattgctactgtgaagtnnnnnnnnnnnnnnnnnnnnnncacttttcaaaggtaacatgtttcttgttatgtgagaaacaaagtgaaatcacattttaaaccacttaggctttgtggtcttcttctct

SEQ ID NO: 161257 - DNA, 932 bp, Arabidopsis thaliana landsberg
  unsure (1)..(932): unsure at all n locations
atgatgcaacccaatgcaaaacttttgtccccatccgctaaatttctaccgtcacctatagagccaccgcaacacaaccgtagaaccaccgtaggagcacctccgtcattggaacgaaactgcaaattatcgcgacggaatcttagtaaatcctcgttgcttctactcctcaccactcaaacaactctgacgccattgctcgacttctctaaagctcaagcagatacaattgctaaccctaatctcacaaattgcgaaaacagagtaaggaaaatgtttataaactggatttcaatttcaatgtctccttattaattcgatttctgtttccaattttccccagattccgactaagaaagcgttcatcgacgtgtcaatcgacggcgaaccaatcgggaggatcataatcggattatacggagacgatgtaccggcgggaacagctagattcagtagcattgtaagcgggaaagctggaattacttaccggagaaaagattttgtgaagattatgccaggttatgtccaacacggcggaattagatcgtacggtgtcgatgccgagcgtgccaccgccgcggtggggagtctccaaaacctaattgaagagtgggagagagggaagagaggagagatatgtaatgtaaataaggcgggaagcgttggaatcgtggtgagagatccgtcgaaaccgccgccgaagacgaagcttgtggcaaggaatgggaagcttgtggtcgaagaagaggtaattgcggtggggccaaacggaacggagtttgttataacggcggttgnnnnnnnnnnnnnnnnnnnnnnnnnnnnnnnnnnnnnnnnnnnnntggaaggaatgggagttgttgagaagatgagagaagtgaagactgtgagggataacacttcatctccttatttcaggtaatatattactg

SEQ ID NO: 161258 - DNA, 3834 bp, Arabidopsis thaliana landsberg
ctggttccactactcctttgcttatttctcctagggattcaacttttgcttgatgttgtggtgaataaggccgctgatttgactaagtgtggaagtcaagatgatttttctattggtgattgtcccatcccaaaccctccactgttgcctcccctgttacagattccagaacctgaatctcgtgctgtcagcggtggtttcttttcgtacaatgaccttcctgataagtcttgtagaaaaactggaacttgtcctgttactatacttcttactgggaataaccattcccttggtcaaggtatatgcgcttctttgatacatttactctctattttttcctatgtaacttatcagttaagtgtttctactacagctttatctgggaatatgtttggtggttcgtttgctgtgaattcctctgacctcttgtctagtttagcctataatgtcttggtacgttttgatatttctttcaatcaagcaagtgcaaacatttatctctctgttttagatttttaactagaggtcatgtgcatgtgagtgacttcagggttcaacactagcactaggcacaaacaattatgcagatcccgggattgagtcggattttcccatctacagtatccaatctcagtgcagtccaaactctacatggccactctcatttggaaaaattcatacaggtagttttttttttttatgttcaaagcttgagatgataaaatgaacagtgaaaaatgtggttttcttcactttgatgatcaacttagtggttgtgtctaatattatctcagcagtgacgtgtcttcaagggttgtctctatggagaaataactctgtagaggtcaatgatgagcttttcaagggtaattggaagggaaatcctgagaggatgacaaatgagattgctgcaggtttgtttcattttcttctatatacatatgcttaagaatcaagctgtgatttcttactgttgatgtatttttgttgtctttagcatatgatctcttgaatacggatagaaacaacttcgatgtgacgatctggtataactcaacaaacattgatgacccttcaagggcacctttggttcgagttcctcgcttgctcaatctggtatgaatctaagtcacgctgtagtactcttttacatgtttctgttattgaacggatccaattaatgttcacaccgtgcaaaacttgcaggtatcaaatgcttatcttaagtttcttaaaggccccgggacgaggatattattcgagtttgtcaaagaagttcctaaacaccaaactaaattcaatcttgatatcgcttccatgctaggcccgctttttttcacttgggttgttcttcttctattccccgtaagttatttaacaatttcttactttatgccattgcaagtactaaactcaacaaagtattcatcacattatgtggttgtgtgtatataatatttgcaggtgatcttgacatcattggtgtatgagaaacaagagcgcctaagaattataatgaaaatgcacgggctaggcattggtccatattggatgatttcctatgcctattttcttactctatctatgttttatgttatttctttggtgatcttcggttcagcgataggactcaggtacttccggctcaatgactacagcgtccagttcattttctattttatcttcgtaaatctgcaaatctccttcgcctttttagcttcttccatattctcaaagtttaagactgcaacaggtactaacatcacatttcttgaatcatctcacgaatatgttatatatcaacggcttcatgataaaaaaaaatcggcttataattgtagttgttgcttatacattggtgtttgcaagtgggctcttgggaatgtttctctttggtgaactgcttgaatctcccacattccccggtaagttaacaaaatcaataccttgaagaacgaatacacatgtttatgtgtgaccacttaagtaactagtatatatctatgttacagaaaaagggattcttgctttggagttgtatcccggcttttccttattccgcggattgtatgagttcgcgcaatatgcctcccggggaaacgggatgaagtggaaagatctcaaggaaagcggaatggataagctgttctacctcatgtctgtggagtggtttgtgattctcattgtggcctactctatcgatcttctttcttcatcagggagaagccctttcgttttcttcaagaaatcatcttccctaccaagtcctagtgttcaaaggcaaaactctgaaaacgttctcattgacatggaaaaaacagatgtcactcaggaggtatgaaaaacaaaaatcttattttctttccatgtgactccaacttcaagtcgttctgataaaaattgaaaatattcagcgggaaaaagttgagaaattgaggaaagaagggaccacggggcatgcgatcgtgtgtgacaacctgaagaaggtgtatccaggtagcgatggtaacccgccaaagctagcagtaagagggttatatctcgacgtgccttcaggagaatgctttggcatgcttggacctaatggtgccggaaaaacctctttcatcaatatggtgagtttttgcaaaaccactattcttactctaaattacgtttcagggttgagttttgtgacattgttctgctgcgctaaatgactgggctcctgaaaccaacatctggaactgcgttggttcaaggtttggacatatgcaaagatatgaacaaagtatatacaagcatgggagtctgcccgcaacatgagtaattaacattttatcaattcctttaccatacaaataaggaacaattgatggaatggtttttttttttttttttctgtcattatcttggtttcagcttgctctgggggacgctaacgggaagggaacatcttctcttttatgggaggcttaagaatatcaagggctctgctctaatgcaagtaagtttatcacttactgatttctttatatgtatgttaccccataagacaatgttaattggatatcatacattttttaaggctgtggaagaatctcttaaaagcgtcagccttttcgatggaggagttgccgataaacctgctggaaaatacagcggaggtatgaaaaggcggcttagtgtagccatttcgcttatcgggaacccaaaggtacaactcctggtctcttatatgttatgtgattttgtaagcaatggctcgaatttattaacgaatccattgtctgatttgtaaaaggtggtttatttagatgagccaagcacaggacttgatccagcctcgagaaagaatttatggaatgtgatcaagcgtgcaaaacaaaacacagcaataattctcacaagtatacatatattagtttcctcacttacggaatgtgattgagtatgcctcctaaattatacttaatattaacgttaagacaacattttcagctcattccatggaagaagccgaatttctatgcgacagattaggaatttttgtcgacggaggcttgcaatgcataggaaactccaaggaactgaagagcaggtacggtggatcatatgtcttcacaatgacaacatcttcaaaacatgaggaagaggtagagagattggttgaatctgtctctcccaacgccaagaagatatatcaccttgctggtactcagaaatttgagctcccaaagcaagaggttcgaattgctgaggtgtttcgcgctgttgaaaaggccaaagccaacttcacagtctttgcatgggggctcgccgacacaacgctcgaagatgtcttcatcagagtcg

SEQ ID NO: 161259 - DNA, 1334 bp, Arabidopsis thaliana landsberg
attcaaaaacccttcacttgcctcactgttcttcgtcatggcgaacaatccttcacagcttcttccttcaggtatgcaattttttcttcacatctctcactttccaccttcttatatgtaagaaaatcgaactagatctgcgattttttggttttcaatttttgagcgatttggtttgtttgtgcagagctaatcgataggtgtatagggtctaagatttgggtgataatgaaaggagataaggagctcgttggtattctcaaaggataaaatgtttatgtcaacatggttcttgaagatgtcaccgaatagtaagtctgattttagggttcgattattgcttcatatcttgtttaattggaatgttgcttgatctattacactttaggaggtgaatcatagacattgaaccatggatgtgattatgcagaacttagccttttggattttgtttttgggtaattgatctcaatactgatttgtgaatgtccatcacagttcattcatttgctgattaatgacatttattgtgtatgcatagagtctatttcagcggggtcatatgtggtttcggtgacttgagttgtttgtggttgtgtgaggattagttaattgatgcttaaacccgtgttgctttggagttaggatctcatagattcaagttttgattgtaacaaattcttgattgaattgtaactagagtgtgttactaatttatctaagcatcgttgtgtagtgagattacggcagaaggaagacgggtcacaaagcttgatcagattctactcaatggcaacaacatcgccattgtaagtaaaaaaacacttgtggttactcatagccatacgttgtataaacttccttgtgatgaattttcaagtatcttgatataaacagttggtcatttgaatagtcaaattgctaagaaactggtgttgaaaatgtttgtgatgcagctggtgccaggtgggtctcccgaagatggagaatgagatttgcgagatttgattggtgttttcagacttgtgtgaggaaggatgtaacttttggttttagatttaacactttgttcagagaaaagtagttgattttaaactcagaatgacaaaagttttcattgttcagcaatgtgaaagagctaaagcatcatatttattagactcaatgcatcattacttctacttattcaagctctcttcgatgttctaatgactatccccgttagccacacgagcgttggacaagttatcaacagagtctcccctctcaaaaacagctgcagctcccattccagtgcctgtgacgttcgcattttacatataccattaacatag

SEQ ID NO: 161260 - DNA, 524 bp, Arabidopsis thaliana landsberg
atactcacgagtcaagtcagaaggtctatatgtttcagtgatcacttaaactaaaaatgggagcgtgcgcttcacgtgaatctttgaggagtgattcagcgaagctgatattactcgacggtactttacaggagttctcatgtccggtcaaagtttggcagattttgcaaaagaaccctacgagtttcgtctgtaactcagacgaaatggacttcgacgacgcagtgtcagctgtcgccggcaacgaagagcttcggccagggcagctttattttgtcttacctctgacgtggctcaatcatccgttaagagcggaggaaatggctgctttggctgttaaagctagttcggcgttgaccaagagcggtggagtcggttgggtttccggcgacgacgatgtaacgaaatcggaaaaaacttaccaaaagaaaaacattgccggagttaagacaaacggtggtggcggaagaggttgcggtaaagggaagaggcgattcacggctaatttgagcacgatcgccgag

SEQ ID NO: 161261 - DNA, 2337 bp, Arabidopsis thaliana landsberg
cttcgattaaaagttccaaagcaaagcgaattgcttactactacccaaaatctcaaccaaaatgtgataactttccaagctatgttcgaaatctgggattcttcttgcccataggaagaatctgtgagcaggaaagccgagatttttgcagcgtttcaatacttgttcgactagatttgactaacatcggggagagtaagcgacaagagtgtgttcgagatcatctttagggttccggtggtcgctcaggacgcgggagatctcgtttactagatctggtgatggtggatcgtgtagaagtgtagagaagatgcgaaatgattgagatttaggggtttggtaaagagcgcgaacatagagaagagactgttcgaatcgccattcaacagagcaatggagccaatttgagttttaaacacaaagccattggatttgtatattaataagtgagcccacttaatttatcaggcccacttaatttgttgcaagattagatcaatattcatgggatcggttaagattcggtaaaccgggacggcttgagtaaaaagatcgccagatgcaaataaagagacaagagaagaaagaaaattttgatcgtagctcttctaagaagcatttgcaaaacttgtccaactgaagaaagcttgagacttttcactgggtatttgcagtttctcacttgggtcttgaagtatataggtagatgtcgaagcttttactcattttctttcttttttggtgtttcttacttcaaagtttctatttgcgttgttttgtgttttgcagagaagatggatcatgtcagcaatctaccagagggggttctttgtcatatattgtccttccttaccacaaaggaagctgctttgacttcgattctctgcaagagatggcgcaatctcctcgcgtttgtccctaatctcgttattgatgactctgtctttctccatcccgaagagggtaaggaggaaaggtacgaaattcagcagagcttcatggagtttgttgatagagtattggcattgcagggtaattctcccattaagaaattctccctcaagtttagaactgactttgcttcacaccgagtggatgcttggataagtaacgtgttggctcgtggtgtttccgaacttgatgtgcttgtcattttgtatggagcagaattccttccgctgtctccaaaatgtttcaagagcaggaatcttgttactctgaaaataaacagtcttggtattgattggttggctggggacatatccttaccaatgcttaaaactctcgttctacactcggttaagttatgtgttgataagttttttttcgtgttttgcctgcgctcgaggaattagtcttgtttggtgttagctggagagatagggatgtcactgtgtcaaatgcgagcatcaagaccctaaccataaagttcaactattatttaggcactctttcgcttgatacacctagtcttgtttacttctgtttctctgatcatgttgctaaagactaccctctagctaaaatggagaaattatctgaggctaggatcagccttttggttactgaagatcagatcgagcgagcaagagcgccaaatatctattgggttgaggatgatgttgttctccgattagttaatgtggggaagctcatgaaaggcatacgaaatgttcagtatctcaacttgtctccgaatactctcgaggtcagttaggtgagttcttgttttgagacatgtaacggcaaaatgtctaattgtggtttgttttgttttcaggtacttttgaagtgttgtgaatcgatgccactgttcaacaacctcaaatcgttaactattgagagtaacgagaggcgaggatggcaagcaatgccagttcttctaaggaactgtccacatctagaaactctagtccttgaggtataaaacacccaaacatttttgttagtttccccgctttggactttggaaatcgcttattgtctcgtttctgctttcagggtctcgtgcaccatgtgacagataaatgtggagatgcttgtgactgcattttccggaaggataaaggccgttcgctcaaatcttgtccagtaaaagtggtagagattaaagagtttagagtaacaatgaaagagatgcacctgatagagcatttcttggacaactttccatgtttgaaggagatgaagatctatagagaagagtatgatccttcaccgtttggaaacgaccctcaagtggatgatcttatcttggacatgatagaagagtacaaggatatatatagttgcaatgtccaactcttggagccgtgtgacaagtgggatgaacaatga

SEQ ID NO: 161262 - DNA, 8071 bp, Arabidopsis thaliana landsberg
atcatctccttctctgatcaagatggcattgcagctgttccttgggttagcatcaggattaccacgaagaaaaccctcttgtcgcttgatagattgtgcagtttgagctacctgtacatctagcttcttcaagtgagagcttagattgtcgatcttcccattaagatctgtgtagacagcatcaaacttgccattaaaatccacaacaagctttgtttggctctctagaatctgctcaagcatcgattccattcttgtctctgatgagggtggagggggggggggcttggtaagctgaattaccataggttctctgaaagttgttctgaggaaaagtcttctggaaagcaggctttggagtgtagttggaggaaccctagttccctgcaaatctgttgccactgaagttgccttgtggcagcccaaacttcctgtatccctgaccatctatatagaagactccttcctttgactcaggctcatgctcaatagtctcttcctcggctgcaaagtggacatgcttcttccctgtgagcaagttatgaaccgaatctagcttagcattcacctctaccatctgatttcctgaaatagctccagcaatcttcttcctctcaaaatcagcattcttgttactgttgctacaagcgaggttctctatcaaggatgtagcatcagctaggtaacatgtgttgaagttaccattgctcgctgcacatctattatctccaatcaactcctctgaagaaggtacctagaagttgtacctcactgaaaccatgatgtgggcaatctcgttggtactccttgaaacgaacccaagcagccttgaaagcttcaactggaccccgtgtgaaagtagacagcttgtttctcaactcctcatacttagcatcatcgtagaaattgttcaagaaggctatcttgatgcttctccaagtcttgagggaacctgctttaagttgcttcagccaagaagttgcttccccagcaagtgaataagggaagagcttgcacagtaggtagtcctctgagactctattagccttgatgctgacaacaaggtcctcaaatcgctcgatatgatccattggctgctcatgagataagccatggaaaggatgttgccaactaaagcaaagtagcaaggcttcagctcatagtcgttctcctagaatggtgggggttcaatcgctgatcgattagcatagaacaggtctagcctgttgaaatccccaagattacgacgtggtttcccagctggaggaatagctgcaagaatctggtgttggtgtcgatcgacacctctgttatgtcgttcgacaccaattgatccgcttgctgctcccaatggtgtcgatcgacacctagttggtgtcgctcgacaccgagccctgctacgtttctggcagctaattgcgcattgaggcgcgcctgatcctcattggcgtcctcagggaggatgattccatgctcatccaatctctgattagcctcattgtaggcttgcccatcctcatctctcaaaactccttcctcatcaagtctgatgactttgttaaccattgctaatctctaagttttgcggttggtgcgttcaagttttcccaagtccagaacagacaagttgatcaactccttctgttgtgtgctccttgtttgcctaggcatacacatgacacacaaaaaagaagaaacgtgtgagtaacaaaataaaagtaaaaactagacgaaatctctaaactaaactcaatggtgactcccaagaactttggcaacggcgccaaatttgatatggttcaaattgctttaaacctactctctcaaataagagatcaattgcagtatttaagggttgaatttcctctaagttcttttgttcacacaatgaattaaatgtcaagattaagctagaagagtgtgagtaaaaataagagaaatcaaagtaatcaaatcgcagattgaaggttgtgaaacaataaaataaagagttaggagtagggtattctgaggaaattattagttagtagatctaatggaaactaggttgttatcgaaccattcttaaactcaaattctaattatggaataaccggtggcgttccgcaaaactccctatgcctatagctaagaataaccggagaagccgagagatcttatacctagacatgcattctaaacgagttcaattgttcaccttagtcgataggccgattcttattacacacctataaataaggctcatcaaataatagatccaactacagatacctatgacggatatatctattgtctggattcaagttttagttaattactctagatctagcattacaaacaattaaagatgaagaaattctacagataacctagcaaagggggcgatctaataaaccatatgaatccctaatgagaaaccctattcctaacaagcagattactcagacatattgattgaaccaaacaacataattgagtatgaaagcataaacacaccaataaagatgagggaaagaaaggatctcttcactgtattcaaaactgaatggatctttgaaaacaatggatgaatagcttatgtctctcagcaacagggttttgcaaaaagcttgataatagaaaactagggtctaaacaatgtatataaaccctataaaacgtctagggactaataatgcaaatagaaaagtcttttggggcaaatttccttttctgtaaacttgaaagcgtcatgaactttgctgagccgaaactggtgttgatcaacaccatgagtgtgttgatcgacactcctcttaatatggaactgaaaatcgtccttagcttccttttccttagcttttgctccaaaatgtctctttatcttcattgttgtctcactgcataaagtacgtgaaaagacactaaaaagactcgagaaacaacataaagactcaaaatctgatacttaaaacttagataaaatcagtgaaaatagggttatatcaaagatcctaaggttggttatatggatggaaatatcatgtcgtttgagattaatggggagaagttgattattatgttaaaacctcgttgaaacctgaaattgactttatttttccattgcatgcatttgatactcatgagcgttcaaccatcaaagaatatttcaaaagtatatgctacatttgtagtcatttttactgatgtgaatttgatcactttaccatggataattgtgtattacttggcacatatcatttcttgcactaacaggagaaggacaaaaggtctactgactcaaccttttgattcttatgattaataatttgtgttgagcgggatcgagtcgaacgagccctccgtcttcttcacggcgtttcctgtcctaccagttcagaatcttcggaccacgcgaagaaaaaagaagataaagagagacgcttggcggaagagaaacgccttgcgaatgcaggattgatttcgccgcgggtagcctctcccgatgcgactcaagtccgggatgttgctcccaaagttgtaggcccggttgacccgacgccttctgaagttcaagaggtcaatcctactgctgttgggcctttgcccgaggcgattgttgcgctgcctgcgagcgacaaggcggcgggtaagcgtgttcggacggatgattcatcgtccaagaagaaaagcaagaagaaggaggcctcgagtgccaaggcgggaaaagagctcccgatctttaaggatcggattacctcggcaaaccttctcgagggctgtgcgggtcctctgctccctccaccggatactctcttagagtcgcggaagtatgccgagacggcgtctcacttcttgcgggtacgtgtaacccttttccttctcgtttgcgcgttatttctaagttctgatctcgtaatttgtctctaatctgctctccaggctgtcgcctcgatgaaccggatggtgctgatatgatcagggatagcattaacgatatggagcatgaaccggagcttgaacgtgagcttgtagctgaggatgagcttgtagctgaggagaagcttgtagcggaggatgttcttgtcacaccggccgtcccaatgactcgttctagagctaagctattcgaccaagccattgccgggatgcttaaccacatttgggaccgaccaaatgacttgtgccaagtcactacctctttggttttgattcaagctcaaggacctcatcaagatggataagtgatttatgagtgctctttttccctgcctttggttttgtcctactgggttttccaaaggaaggtttttaatgaggcttatgtggcctttaaagttgaggagtgtattttaaattttaaactttgtttttaatttctgttgtgttctaggcagccttggagtatgttccaagacttgcctcttcatcttctcttctccttttctttatattctcttgtattctcttttgagaacttatttttcttttaatcaaaaaccttttctaagaagatcatcttggtgtgtatatccagcaaaatccttagtctcttttggtgcgcatatccaaaggatctaagtctcgatatcttgaaacccttccgcaagcttctgtgatatccatcgattcattcaaatctatccatcatcacggctttacagccacctctatcctttgcttaacctaagagtgtcgagtccttgggaggatctcatcttgtggtgatatgtctataatttgcatggtttcaatgtccattcatcatcgttttgagtccagcttcgtatcattcatcactgttttatatcatttctcatcgctcttgcatctttgcatgattaggatagctttgcatacatattgcatttctgagttgttttcaggtgatttggagctgtttgcgagcaaattggaagaaacgagccagaaccagaagacatactcgaccaccaggtcgtgtgcatccagcaccatactcgaccaccaagtcgagtgactttggagccattcttcccatctactggaccccctggccgagtatcctcagctcaggctactcgatgacgctactcgaccccctggttgagtatcacttcgccacaccacctgaccacactcggccattcactccaccaagttactcgaccccctggtcgagtatcatcactcaccacaaaccatcactcgaccagacactcgatcacatcttcatagtctactcaaatccgcactcaaccagacaagctgagcacaaggaagagaagaggagaagacgaagtgtttggaagcggcctggacctccatcggatcacgaagcccatctcggcccattatcactctatgggccgggcgattaggttattggcccgtttactatcattctatttcgttttgtataaatagatgtcttagggttctgtcctgagacatctagtcgacattgagtttttgcttcagttttattttctgttttactctactgcgtcgcttttgcttttacaacctgtaatttgagatttttccaagttattcagattccgcatttgatttcatctgtcatcctgtttctctactctttatctccttacttatgcaaaattatcatttatctgcgtttatgtctttgagcatgttgtctgagtagtgacttagaattcttagggatgggatagagtagttgtggactccgtagtctgtagaatggttaagttttagaattaatttaatcccttcaggactagttgcgtttactgcttatttctttctgatcaactggaattcgatcccaagcattctcgcacccagaaggtgttcgatggaatgcttgatctactagttcctgagatatttgtctctatcccaagggattggccgtttagagcatttattgactttatcagtccgttcttgttgcctgcatagttagattccgttaatgggaattggtctgggctagctttgcttgaggatttctatcacgggagtgaattgatctgttgttgaacctgttgtgtagggatagcttgattgcgcttgttaaccattcgaataggctaggataccactctactcgattaccccatccttaggaatttctcgtctatattatttctctgttttatcgttatcgcttaatcgttctcattgtctgtttcttagtttttgcaattactcgaccaacttactcgaccacacccagtgtctggcaacagactgtgcagtcgagtgcagttgtctcgtttcctgtctgttactcgacgtgttactcgaccacatcctgcttctggcatcagcctgttgtggtcgagtgaatttagtaattttgataatgtttcagttttctacatgttcacttaggattgttagaaaccccaaaactgttattgcttggcttgacttcgtgacttctgatcacatctcatttgtttgcatcaaatatgtggagagtcaatttgtatcaacctcgactccgaagcatcctcaacaaattccagagaaagcagttaagaatcctaaggattatgctactgcaaatgctatcaccatccaccaagaaaatgaatctccaccaagtcatctgactctcaatactgaggacagtatggttcaagaaggcggggattcaactcaaattgctgcacctgcccctaagcaattcatttggactatagagcacacacctttgttgaacactcaccatcctggaaaaaagttcaaaattgaaaaactcaagaaagatcagaatcaagagatgattagcagtgccagcactcaagaaacttacaagaagaaagtcatccaagaaaagcttgatgatctcggttcattcactctaccatgctctctaggaccactgacattcaataggtgcctttgtgatttgggagcatctgttagccttatgcctctctctacagctaaaaggctagggatcaaggaatacaagttctgcaacttagctttactcttagctgatgattctgttgcacatcctcatgggctaatagaaaatctgcctgacaagattggaaatgttgagatacctacagattttgtggtattggacgtagatgaagaaggcaaggatcccctgatcctaggcagaccattcttagcgtcagttggaacagtcatagatgtcaggaatggaaaaattaatctgaaccttgaaaaaggcatcaagatgaagtttgacatcagaaaagcttcagggaaatcaacaacaggaggtcagagttttgggattcaggacatggatgttgatgaagaaacataagctggaaccctaccaaaagtcaactatacttctcaactcagcaagctgaaaaggacttttgaccacaagaagagagcaacacaaaggctagcttagactgaagatcctacataagatgactggtatgagatgagaaaaatatttaaatggcaaagcagagtcatagagggattatcttcaagggtgatgaagctgaaagatcaactatggatgtttgaaaaaagagttaataagtattcaatgagtattgatccagagaagattggaactgcactagctatcaaggaggacgaacatttcccaacagaatggtttgcaccagaagatcagaaaggagttcacttagaggaaaaaagcctagagagcaagttgttgagtgagaaggaaatccctattccgacttattctctaggagtgcctaaacaacatattaacccctctgctgaagaacaacgcttgacacttgattctgttactgaagaacttctggaactcaggatagaatacaaagctcaaaaggataccattggggagctaactaacaagatggaaggactaaaccatgcaatcttggaacttcaagaaatggttaaaggctaccccaattttaaatttgagcattggtcaaaggagcctgattcagaagaaaaagactactctgctgatcagaaggaagcatattttgaagaaaaatcaaatgagtactcatccttccatatgtcaagagaggatgcagagtattattcagacacagaagattcaaccactaaagatgaggacttctctattcctctcttcaaccttttttttgac

SEQ ID NO: 161263 - DNA, 1641 bp, Arabidopsis thaliana landsberg
  unsure (1)..(1641): unsure at all n locations
tatttgtgaagtaaacgtagcaattattataatttattactctaagaatctcatgtcgcattcatcaattaaattagtaagtgagcatttcccaaagtagtatatatagcaaggcatgaactttcttcatatgtcatataactcaataaaacattaatatacaaatggttaacattttgattctatcacttctcttccttatcatctttcttcttctcaccgccttcaaacgcgcaaagcggcggcaacatcgaccaataccatctcctcctggttttccgatcataggaaacttacatcaactcggagaattaccacatcagtctctatggaagctctcaaagaagtatggtccagtgatgcttttgaatcttggaaaggtcccaacagtcatactttcttcctccgagacagcaaaacaagctctaagagactatgatctccattgttgtagccgtccttccttagcaggtactataaatcattccacatactaaaatcttgaattgttacttcattaattcatctctcactcctcagggggaagagagctctcttacaacaaccgagacatatctttctctccttacaatgattattggaaagagctaaggatgctctgtactcaagagctcttcagtgctatactattcactcaacacatcacattatggtcgacgaggtcagaaactcatcgattcaatcgcggaatcagcttctttaaagacttcgatatacttgaacaagaagtgtcttgctttaactgtaagtatagtatgtaggatagcatttggtgtgtgttttgaaggaactgtgcttagcaatgacagtttcaacaagttaatccgtgaagcattcgagatgttgggaagtttctctgcctcagattttataccgtacataggttggatcatcgatcggttcactggtttacaagggcggagagaaaaaagtgtacgagatcttgatgcgttctatgaacaaattattgatttgcataaagaagaaaaggaagtaggaagtgaagattttgtggacttgcttttgaagttggagaaagaagaaactgttgttggaaataacaatttcacaagaaacaaaggtaaagcaatcttgatggtaattaatcaaatactcaaaatccaatggtaagaagttctgtattctaacttagtaacatgttcttgtaacaggaaattcttttagcggggatagaaacttctgaaggaaccatggcatgggcgatggctgaacttgcgaagaacccacgagtgatgaggaaagttcaatctgaaatccgaaacaaatttgggaacagagaactaatcagcttcgaagacatagagcagctccattacctgaaattggtgattaaagaaacatggaggctacatcctccagcacctcttcttcttccaagagaagtaatgtctgagtttgagatcaacggctacacgatgcaacccaagacacagattcatgtcaatgtatgggctatcggacgtgatcccaatacctggaaagnnnnnnnnnnnnnnnnnnnnnnnnnnnnnattgatagtaatattgatacaaaaggacagaactttgagttgctaccgtttggaggcggcaggagaatgtgtcctgcaatgtacatgg

SEQ ID NO: 161264 - DNA, 1762 bp, Arabidopsis thaliana landsberg
catagcgattttggtttcattgttatctttgagactaacctattgacatttgggttttgagttctaaatcttttgcaggagaatcatgagtaactacagtggcagttcttcaattgatcctgactataacatgggtgagacagagtcgtcgtcttcaaggccaaaaagagaacagaaagaatatgataacttcaagagaaaagctgagatagctcaagggaagagagcaatgacagagaggtatgagcttatagatgaggatctggaagccgagtacatgcctgagcatactcgcagagccaccaaacttcttcacgaacttgatgtattgcctgctgaggagtatatcaggctcttcaaactgaatgagttctgtagcacaagatatccatgctcgaccacacttgcacaacttggatttttggaggatgttcagcacttgtatcagagttgtcatatggacactctaatggcttatccatatgtagcatatgaaggagaaacgattcagttcctctccacactataagtggagctttaccaaggtatgacctccgatgatttggaatgcgaaggattgggatgcttgcgattctctatgtatggtcatgattatatgctatcaatcaaacgcttggaaggattgtttggtttcccaagtggaacgggtactaagtccaagtatgacagagaagagttgaaagacttatggatcaccattcgcagctctgtaccgctgaattcttctatatcgaagagcaatcagatacgcagtccggtcatcaggtacttccaacgttctatagccaatgtcctttgctcccgagagatcacagggattgttaccaattcggatatggagatcatcgctatgactctcaaaggcactctccgccaaactaagaacaatatgtctctccaaggtgaaatcaatgacacatctctctctatacttcttcaaatccacctatgtggatacaagagctgggctgtcagcaataaccacaagagagcacgatgcgctctttgcataggcggtgttctgacaccgattctgatcgcttgtggagtcccaatcacatctgatggacttgagccacgggcaatggatatcgagcatcagcatcactgcgaattcctggagtttgcaatggttggcgatagggaccgtttcaggtttgagcactctacagataagaaagccagcatccttctccccagccttgaggttacacgcataatagagggagataacattgattttaggcctgagcttgggaacctctactatgagaacgctccgccattggatgaggatgatcttatagaagaagctgctgaggatgggatggatgaagacagagaagtggagtttgacgctagtatgtatcattttagtgaacatgtacctccagcgagggagagcaagagcttgagtgaagctcataggaacaacagcaagctgtagaactggtgtaagaaacaggacaagctactccccaagtgcctcaagactatcaagtttctgatagataagttgagctgctcctcttccactatagctattccacagggacaacctcctcgatacatgccatcgaggagatttgatgagtctgagccaagtcagcacatgcctgagcctagtgagcagagagtctcacaggtccctgctagacattcgtcattcgagtcccgggagcacaagagaagaaggaaggctacactcgttcgctctagcagcagatcacgacttattcac

SEQ ID NO: 161265 - DNA, 1036 bp, Arabidopsis thaliana landsberg
  unsure (1)..(1036): unsure at all n locations
cacttagatttggttaaagaactgctcagcactctttacagaggagttttaccacgcatcagaatgcttctggataccgccagcaaatggaacttctagaacaaagatgttgaagaaggtggaaacactgaataccaaagtttgatacttagaaggacattctgcatcttcttctgctccaaaacaaatcagccaacttccaggcaaaggaattcagaatccaaaagaatatgctcacgatatcactctgcgaagtggaaaagcacttccaactagaggggaaccaaagacagtcactgaggacagtgaaggtcaagatggggaggatttcagtctcggaaaaaatcgagcagacagaccactcgagcatccactccagcatccactagagcaaccactcgaccacgttactcgaccaacctttccagcaacatcaccaactgctctgaaaccagttgttgtcaaaaacaaagaaaaagtcttcattcctcatccttacaagcccccacttccatttcctggccgacacaagaaagagttagaagataagtacagagctattattgccaagaacataaaacaagttgaagccaggatacctcttgttgatgctctcacgcgtatcccggattccgaaaaattctttaaagacttgatcatggagagaattcaagaggttcagaaaacaacagttatgagccatgagtgtagtgccatcatacatgagaaagatgaaccagagaagctaggagaccctggttcattcactctaccatgctccctaggttcattgacattcaataaatgcctttgtgacctaggaacatcagtaagtctaatgccactctcagtagctaagaggtttaggttttaacaaatataaatattgcaatatctcttgattttggctgatgggcnncgttagacaacctcatgggttattagaagatttgcttatcaagattggaaatgggagggtgcctacagacttcatagtgttgaacatggatgaagaaccaaaagatcccttgatctt

SEQ ID NO: 161266 - DNA, 6180 bp, Arabidopsis thaliana landsberg
  unsure (1)..(6180): unsure at all n locations
aagaaacggctcgatgctaaaaaggtcgcgtggtccgacgaactcgaaggcgtgcgttggtcgcatcggacaactcctcgccgagccacaggagaaacccctttcgccttagtctatgggacagagtgcataattccggccgagatgatagttccaagcctacgacgaagcctatcccccgagaacactcctgataactctcaaaggctcctcgacaaacttgatctgattgacgaacaaagagattcggccctagttcgtatacaaaattatcataatgaaacggctcgtcattacaattcaaatgttcggcaacaaagattccacgaaggggatcgggtcctccgaaaagttttccagaacactgccgaaccgaacgctggaaaactcgggacgaactgggaaggaccatacttaatttctaaagtcatccgacccggagtgtatgagttcgctgacttaaacggtaaagccgttccaagatcatggaacgcaatgcacctaaggaaatactacaactaaatccaaggtgacaaaacttgaactacgaggtggcttgatccctgaaaagggtacgtaggcagctcgtctttagacgagttcagctaccccccattaaaaaggggggagtgggtccgtatatccatactcccatttatcatcttgttagtttttaactttggtgataaataaaaatcaattcacaatttctgaacgtattgaacaatacgatgagcgacggctcggagtatcttttatgcctgctcggcaacagcgcgctaaacaaataacgagataaaatctatcagataacctctgatcagaattttcatcttcagaaacccggctatactataaacgccggtattctagctcatttctaaacgctaaaaatgactcggatcgggtcgcaaccgaaacgtttcattccaaaatccaaattcaactgtacttatcagaaaaaggttcggatttaaataaagatcgaaaacttcggaattgattaatggataaagccatccaggcatgaattcataggttctaaacaagggataaagccatccaggcacaaaagtaaaaagaaaatcatcaaagtttattcttgaggctcggaaggaaggacatcagcagccggcaaatgcgaaccggattgatcggtaactcccatctcgtccgcgagagcttcaaccgacttatgcccgcctnnnnnnnnnnnnnnnnnnnnnnnnnnnnnnnnnnnnngcgcctcttccagcttggacgtaacttgcaccagttttgcctcggcgtctgcaaactctgagggccactcttcaaactgggccttcttgtaacgcccgcgatcctcaataggatcgttggctaggacttggtccgaaagaaggggagggtggacctacaagagagaaggacccggccctaagctcggacaaaggggaaaacatgcgggctaagcttggatcgtgaagaaatcaaatgggtctgctcgcccaaagctcaggctcagctggaaggagtgacagttactcaggtcgagtgacagtccagctcgggcagctggacgagtgacggatgagctcgaggtagctggacgagtgacggacgagctcgaggtagctggacgagtgacggacgaactgggcggttatgggcgaagagatacaactcttcggaaaggtgcaaggaacggatgtgttgatttgggaagcatccattcgccccctatataaggaagggcgcccaggaccattccacacaccacaacacaccgaaaacacaagaaaactcaccattaaaactctctccctcttgggagaataaatagtcttaggattcggtagccgggctgtggccgcaataaagaaggagggtcggatcgactagcctcgagaaggaagttaaggacctaagactttgagtctaagggttctaggatgtgagttagtagtcggatccttgaaaggatcaactagagggctgggtagtatccgggtcatgtgcatcctacacaagactcggtccgggtagggatcggctgaggcggggacgcggctcggcggaggaccggcgggtcttaactgacctgccgagaatcggccggactgatgcgcgatcttcccctctctgaattctctccgcggatccgagtagtgtatggcatatagagcattgcatggacttgcatatgattaagtaaatgagattacttatagctctatgactttcaggaacgaatggtgatcgtgggaaggacttggcttaggcgcgagagactcaaggccgggatgatgggtggtgatagttcggatagtctagggatcgattatataacttgtaatagcttatatacaaattcataggttgtatcgaatcctttgcttaatcaataaagtatccgattgtttgtttactctattcatctcatatattgaatcacggaatcatatggaacggattagactaggaaagaacctcataaacggttagggccgagtcacttagtggctttggtcgagagaactcgtccggactttaggcagtccggatcggggcctttcaatcccaccgttgaatatgtagatagtagtatcatgattaactccacggagtttcatcccgatcggacttcattacaagctccaaacgttgtcgtcaacaagtcatcttgaactgtcgtttagggtttcctggatttgacagactttgcagttacttgcccagaaagaaacactcataacttctcgaatataaatccgattgaaactctgccagttgatatggcttcatggcaacgtgatctttgcagatatgtcttatttagaaactcattctctatggtatgacgggaaacatccttgtataaccttaacttgaagctactattttctcttcatcttcttccttctttgcttcgcccattctctgattttactaagatctgtttcatctcacttctccttaatgacatgaaccaaatatctttctctctatcttcctccattgcggttgtgacgatccgttctcatccaaagcgtctcgccttctccactactccgtttacttctcttcgatcatctttctctttctcctcaagccaattcactctctcttaaatcaagttctctttctctgatggtgtttaatctctctctctcacatatctcgatgaagtcaacacgtcaacatgacccaacagtgtcacaattagtctcggcttcctccaccaccacccatgagctctttcccttttctttgatccaataaataaaactcaccacgacgtcgtctgtttggttactcggaggcggtggctgcgatcccactattatgccttagggtttctcaaggttttctttatttttcattcgcgcccaacaacgatggtatatatatatgcctttggactctaaatgggctgtctcatatttccaaaacaaaatagcccatcgaatgagggagtggggtgttacatgtaatgccatcttaaccagagatggagatgatgtgtgggaggaagttgatactgaagaagagctagaactcgctactatatagttggtgtcgaccgacaccttccagtgtcgatcgacactctatggaacactcttctctaagacgattccatatgacggtgtcgatcgacacacctcaagtgtcaatcgacactaggttcggactgcaccatatgaggtgtgaattctgatgaagcttgagtctgcttacactccttctgtctcttatccgaggacgcgtcgttctaagcaggagatccatgctactaagtgcacagccatcatggagaagatcctccatactcttcctaaggatgcttctgagacatcttctacctcactcaacaggtatgtcaagcgagttgttgacaatggaattagctcagatgaagctaagctgcttaccagagacatcagtgcaatcatactgccaaaggccaagaaggagaaggcactgagagtagacatagctgagtacatccgcaccatcactcctggtcagaccattgagaagctcccagatccaggtagcttcgttcttgattgctctatctccacaagcagattcagccgctctttgtgtgatctggaatcaagcatcaacctcatgcctaagtctgttgctgagagactaggcatgactcactagaggcctactcgcatcactcttctcttcgcggatcgttccaagcgaatccctgaaggaatccttgaagatgttcctgttaaggttggtaactctataatccctgctgatttcgtggtcctggactatgaaaaggaacccaaggatcctcttatccttggaagagcattcctagctacagctggtgctaggtttgatgtgaagatggagtttggcatggatggttcagagcttataaagtctatcagttgcattgcttccagcacaaacacacctcctcaaactgatcagaatcccaccacagagccacacacaacgctcccatccgctcagctcgcaaatgagagtggtagggcaacagtgtcgatcgacactactacctctgttgatcgacagccacgggtttcacagacagatgattctgcacattctcttcagcccacaccacttgaggacctatgtgataagttctcttctatctcttctcctgttttatctttgattaattctttagattattcgaagactgcttcactagataacaagcctagagttcctcgaaagcttgtttctcctgttgtccttgcaggtgacgtgatgagtgtcgatcaacacacccctgagtgtcgattgacacatgcagctgccccaaccagatctgagtggcgaggaggcatcagcaatcatccaccactccacccacatcctgaactccgccaagtcaagctatagactcaaaacaagcgcttagtgggaggcaaccaactggtttgatttttcttttcccttacttttattttcttttattttgctttatttttcccgctttctcttgatttgaatgccactggggacagtgtcgtttaagtctgggggaggttcttactaatgatgcttttatttttgtttcttataatttttcgtttttaagttaattgagtcattttcccttctcaagaagagaaaaaaaaaagaacgttttctttagtttagttaggaatcatgatgtatatttctcttgattattgcatggttgatgagtactgcaggtttggactcatttatgaatattggaaaatctagatggcaaaccgagagaccttaggatatcctagtttccaactcaaccactaaggctggagctaatctcattgctcttccttttacctcttcaaacggttagtattcatcgatcttgactccttgttcatacctgatattgagaccaatgtgataaaaaagaatatgttcctctccccttataaaaagaaaaataaataaataacgagagattgagatgactttcggatagtgtataggggtaggaatgtttcctatgaccccattattatacattatttggaatgatcaattacaaaggttggaaaacgccgagggtgtcgatccagtatgcgagttcccctttgtttactctctaaaaagaataagtctgggggagagaaagaacaccgaaaaagaaaaaaaaatatataaagaatggtcaatcacttccccgaatctccaaagaaagccataaattcttaaacaccaatgcgacacataataatgggacaaacaatcctactgtctcgaaacaacgtaaatctcaaaaacatttttaaatgtcgggtttcttttggaacatctgcggtttctataagaaagggaagcaagaagttgttagcgattggctgagagctggaaatttcaatttcggttgtttgattgaaacaaagattacagagaggagggcagataggattatgacatcagttttcaaaggctggtctgtcatgacaaattatgaggaccatcgactaggacgtttatggcttgtttggagaggtaatgttcgagtcacgccgatatacaaaacatcacaaatgataacctgctccatctatcttgaaggacgtaaagacgagtttttcatctctttcatttacgcctcaaattttgttgtggaacgcaaagtcttgtggaatgacctgaaacaccaccatgatgctcccatgtttcaag

SEQ ID NO: 161267 - DNA, 1268 bp, Arabidopsis thaliana landsberg
gtgattcttaccatcttcacaaggaagatgtgggtttactacatcaaattggtttcgatgcctatagattctccatctcgtggtcgaggatcttgccacgtgggaatctaaaaggaggaatcaaccaagctggtattgactattacaacaacttgatcaatgagcttttgtctaaaggaattaagccattcgccaccatttttcactgggacacaccgcaaagccttgaagatgcttatggaggattccttggcgcggagattgtgaatgatttccgtgattatgcggatatttgtttcaagaattttggagatcgagtgaagcattggatgacattgaacgagccattaacagttgtgcaacaaggatatgttgctggtgtaatggctccaggaaggtgttcaaaattcacaaaccctaactgcaccgcgggaaatggagctaccgagccttatattgttggtcacaacctcattcttgcacatggagaagcagtcaaagtatacagagaaaaatataaggcatctcaaaaaggtcaagttggtatcgccttaaacgcgggttggaacttaccttattcagaatcagctgaagataggttagctgcggcaagagctatggccttcacattcgactatttcatggagccgcttgtaaccggtaaatacccgattgacatggtcaactacgtaaaaggcggtcgcttacctacatttactgcaaaacaatctaaaatgttgaagggatcatatgatttcattggcataaattattactcatcttcttacgctaaggatgttccttgctcaagcgaaaacgttacattattctctgatccttgtgctagcgtcacaggtgaaagagaaggagtgcctatcggtccaaaggcagcatcagattggcttttgatatatccaaaaggaattcgtgatctccttctctatgcaaaatacaagttcaaggatcctgtcatgtatataacagagaatggtagagatgaagctagtaccggtaaaatcgaccttaaagatagtgagaggatcgattactacgctcaacatttgaagatggttcaagacgctatatcaattggagccaatgttaaaggattctttgcgtggtctttgctagataattttgaatgggcaacgggctactcagtccgatttggactagtttacgtggatttcaacgatggacgtaagagatatccaaagaaatcggcaaaatggttcagaaaattattgagcgaaaagaaaaggaattga

SEQ ID NO: 161268 - DNA, 2521 bp, Arabidopsis thaliana landsberg
atgatttgcaggcaattgataagagatgatcccgaagaaaatgtgagttctcgtgttttcaaacctcttctcttgataaagatttttgtttttccttgaggacaagcaaagatccaagtcggggggagttgatatgttgcatttttggtgtcttaggtcccttagttttgcaggctacattgattcacaagaatccggtcaagctagtgacattaaacaagcgcttcgtgggaggcaacccacaagttattgtacatactttcttttgcttctttcattttctttgattttggtttgtttcgctccgatgtggagtttagacttattgactcaacagtcgatagagtctttatatttgacggtggtgtgagattgtttttgagtgcaggaacccgccaggtttagatcgatcgatcccaacactagatcggtcgatcctgtcgtgacatcgaagctgaaaaaaagtccgccagggtgggatcgatcgatccgatcgtgacgtcgagctcagaaacatccgccagaaagggatcgatcgatccagaaatgagtcgtcgggaccaatggcaacagatcgaccgatccaggtagtcgatcgatcggtccgggaagcagctttgcgatttgagcatgcaattgaattggtatcgatcgatcgatccagggtaagtatttcaattctgtttaaccgaaaattgccaatgaaccaaactagaccagattgaaccgggtttgccacttaaaaaacgaaatcgaccaacagttcttcatcttcttcgttaaaaaaattgaagaacacttagagaaattcataactttctcatttgttgctcgattttcaaaatcttggtgtctgtttcagtcgattttttgccctctttctatatcttgtgttgggttttctgatctgcaaaggtatgagttcgaaatccctctttttggttccgttttagaaaggtgaaaaaaaaaaaaatctcttattcttaaatcccttgatatttatgagttgtttgatgctagattcttgtctaggatagcttggggacctatttgtgcctttaattgctggattaaggtcaaatttgaagattgaatttttcaccattgttgcaaaacggacatgttcttagaatgtgaagagaacgaatttttaagctcttgactagatgtgtatgatgcattgtttagttttcttgactaatacataatgattgagcttatgaattcggtttctggtttattttgacaccacttttctctttttgaaggaatgggaaaatcgaatgaagtcgcgggaacctctagaccacgtcgaagtacttccgctccaggactaaaagaggatcctaacaagcgacctgtaacgggcgaatgggatgaccatgacacccaatgcttagctgctatgaaacacattaagattttgccaatccgggttgcaaaacattctgttctatcgtcacttggtttgcttgaagatgttaccacagtgtttcagacgcttggtatgggaagactgtggagactagaatattatgtgtatcctaagtatgtgagggacttcaaagccacttgtcgcgtcacatacaggaaccctatggagcctagagcgagtgaaggaactctcacatttttcgtaaacatgaaacactacaccaaatcattgtttgaagtctgtgatatgtatgggttcaccaagggagagtctatcgcttttgcaaagttgtcttcagcggttgccaatgccttttggggtaagattgctagaggatcatacaagtcacattcaacaaagataactcacatctggaacccagttatccgctgtgtagtgaagcttattagccattctatgtacttcaaagctctggcaccatctgactaggactgaattaccgatgcacttctatagcatcaagcatcttccagaacctaatgctaatgtcgctgcgattctatgcgatgcattcatgaagatgaagattactgctcctacctcagcctcgcaaagcctctctattggtattgcactcactcctctttttctacgctgtgatctagacttgagcaagaccacaattaagaaggtacaagagttattggaccaccatcacttgatacatactcattttctcaagtcaggcgatgtgtacgaatttatgggacgagatggtgctacatacttctaccaattaccaaacaagcacatcatctaagttatttctaccgagaatctagagttcaccccatctgacgagttcttgattcctgacccatcagacgaagttcctaaacgtcgcaggtccatagaggaaccacctgtagttgagtttacctaaggagatgatgagatactataagattcagatgaccaggcttacactgtggatgtacaaactcacctgctcctttcttctgacattgaccgctaccgtctttcacatgtactacccggtgatgtatctccacacacagcttggatgattgatgatatatccctatttttgtcggcattaactat

SEQ ID NO: 161269 - DNA, 2090 bp, Arabidopsis thaliana landsberg
atttgaatttatttctacttgggagttagaagatattacagtgagattttataaaagggtggaggcgggtgccgtacaattgagtcatgttctgctagagcaatgactaggttaggttcttccaacttctttgaacatgaagtgcctttttttggcgttttaagcagtgacccatctcaaaaccctggtacattacgagaaatctttagtagcttctccgttgttgcttttgtatatatatatggtagtttctttgaagatctatatagttgtctttgttgtttgtttgtagacttctttaactggaacagagttatgatacggtactgtgatggtgcttgtttttctggacaccctgaagctgaattcaaggtaataaggcttttggtcggatgatagccaaaaaaattgactagttttcatgattctttgactctctttctttcgtctcagaatgaaacacggcttttcttccgcggccagctcatttgggaggctatcatggatgaattgttgtcgatgggcatgtcacatgcgaaacgtgtaccgtcctcattatcttataaatcttaatttgtagaacttaagtctctgtcttgaaatcccattaatgtttctttttgttttacatgtttgataaattgcaggccatgctcacaggatgttctgctggtggcttgtctactctaatacattgtgactactttcgagaccatctgcctaaagatgcaactgttaaatgtgtttccgatggaggctatattcttaatgtgtatgtaacttccttttatcacaagtcatgactttaccttttcagtgctctttcattaattccttcaatgaagctggtgatactcccacagagctaaggaaaagcagctaacaatgactatcaacaaaagctattttccttcactttcaggcttgatgtccttggaaacccaacaatgggatctttctttcatgatgttgttaccctgcaggtttgtattcactttctgtcaatattatcttgaataagtcttcattgaaataatcaagaacatgtcatggttttgggttggattgctgcggttgacaccgaccagagcgtagataagagcttggatcagaattgtgttgccaaaatggaaccatctaaggtagcttttgtctcttccttcgaaaaatctttcgtgcctaattatgattggtactgaggcttcttgatttcggtttccagtgtatgtttcctcaagaatctcttaaaaacataagaactccggtatttcttgtcaacacagcctacgattattggcaggttagagttaccaatcctagcatgagcagcacttattgcctgcttccattagatttgactccaattcatgtttactgttttactaataccaaacatacattcagattcaacatgtcttggtaccaacttctgtggatccagataaaagttgggcaaagtgcagactcaatattaaggaatgtgatgccgaacagattaaagttctacacggtaatttactccttaataaaaataaatgatgccaaacaaggatgagcaaattgatcttgtaacctgattatcaaaagtatcctctgtttcaaagtacaatcagtagatatgagcaagctgtgaagcagctataagatacaagatacaagttgttgaatatttatatgaatcataagatcttcctcggagcataagttaatacggccagctctatttatataaatcctatttaatttacaggttttcgcagttctatgatgactgcaattggggaatttcatcagaacaaagatggtgggatgttcatagattcctgctatgctcattgccagacagtcatgtccgtgacatggcactccctgacctcaccaagaatcgaaaataaggtaaaagatatttaacatgttgcttgttcttacaaatgacctcacctgtttcgtgtctgttttttccgttgttcttgtgggaacagacaattgcagagtctgtaggtgactggtacttcaaccgagcaaaaaatgtcaaagctatcgattgtccttacccttgtgacacaacatgtcacaatctgattttcgag

SEQ ID NO: 161270 - DNA, 1062 bp, Arabidopsis thaliana landsberg
tttcatggcggcgactatggcagattataatgatcagatcgtcaatgagacctctttttacaaccgaatggttctgagtcaccttttgccggtgaatctatgggaacctttaccacatttcctccagacatggctccggaactacctcgccggaaacatactctacttcatctccggcttcctctggtgcttctacatctattaccttaaactcaacgtttacgtccccaaaggttacttttttcaatttcgatgttctgttttgaaacctttcttttgttgattccttggattgtatcgcctgatagattgtgttatacgttaaccttttttcttactgttactttcagttcttgtcttctacttctcatttaattagttttaaagtttaatatttttggctaatccacattttttaagttgaatcttccatgaaatttgagctcaaaatataccatgaaattgaaatttgtggttcttagttctatttcttgcttggtttcttctatttttgtggttagaatccattcctacgagaaaggcaatgcttttgcaaatatacgtggcaatgaaggctatgccttggtacactcttcttccagctgtctctgagtatatgatcgagcatggttggaccaaatgttactctacacttgaccatttcaactggttcctctgtttcctctacatagctctctatcttgttttagttgagtttatgatttattgggttcacaaagagcttcatgacattaaatttctctataagcatctccatgctacccatcatatgtacaacaagcaaaacacactctctccatttgccggtatgtcaaagctatatgttctcaatctaaattcaagagcttgtatcaatggtgacttctttacttgatgtttttcgggttttcagggctcgcattccatccgctggacgggatacttcaggctataccgcacgtgatagcgctgtttatagtgccgattcatctcataacacatctgagtcttttgtttttggaagggtatatggacagcaagcatccatgattgcatacatgg

SEQ ID NO: 161271 - DNA, 1040 bp, Arabidopsis thaliana landsberg
  unsure (1)..(1040): unsure at all n locations
gtctgatttctccttttccattagtctctcatcgggtgctcgttcattatatcagttgttccttaaaatggatggtgtacactgaatcatgtttagaaacagaaggtgaagtggcttatttcttccttttgaggaaatatgcttaagcatttttatgtctgtgtactgttaaattttatgtttctcttacctctaaggtagatgagctactgagcttaccaaattctcttttccttaaatgcagaaactttggtccattcgactctggaatcgtgtaatgttgcagatttttccttcagagtctttttcaacatgcaagaaaacacggtctatgtgagacaaaggccacacctttacaggttcttggagagggtgggagagttgtttcatgtcgttatcttcacagcaagccacagcatctatgcctcacaacttctagatatactggacccagatggaaagttcatatcacagcgtttttatcgcgattcatgcattcttttggatggaatttacaccaaggatttaactgttctgggtcttgatctggccanagtggctataattgacaactgtccgcaggtactttatcttaagatctgctcatgggtctcaacattattcattaaagtctgatgtttcatgatgttttatatactctgttactgagaacactattaatttgatgaaaggccccaccatcagtttcagtttgaagaatatctgtcacattacaaattacaaactttcttggtgtataatgatacatgtacccgttttgattatccaagttgtttctttgttaattgtttcaggtgtacagattgcaaataaataatgggatccctatcaaaagttggnnnnnnnnnnnnnnnnnnnnnnngttgattactatacttcccttcttagagactttggctgttgctgatgatgttcggcctatcattggcaggagatttggtaccaaggaataagagtttccttctcttttttaaaatatacaaagagtgcagatcctcatttctctccttggatttggt

SEQ ID NO: 161272 - DNA, 1209 bp, Arabidopsis thaliana landsberg
ataacaatggcgacggcttcaggtgcttttaagtctaggaaagatcataggaagcaaaaggaattagaggaagctcgtaaagccgggcttgctccggctgaggtagacgagggtggaaaggaaatcaatcttcacatacctaagtatttgacaattcctccattatatgccaagtctgaaaaaccgagtttgaagcatcaaaagaattggaaaactaaacccgtttccacaacatcatattatgaccgaggtgcaaagacttatcaagccgaaaagtatcggaaaggagcgtgtcaaaactgtggtgcaatgacgcatgatgtgaaaacatgtatggaaagacctcgtaaggttggtgcaaaatacacagacaaaaacattgcacctgatgagaaaatcgagagtcttgaatttgactatgatggcaaaagggaccgatggaatggttatgatccttcgtcttattgtcatgtgagagatcgtcatgaagcaaaagagaatgcacgagagaagtacctgaaggagcaacaactaattgcgaaactagaggagaagaacattgatggagaggaagaagacttaagggttgatgaagccaagattgatgagagcatgcaggtggattttgcaaaggttaaaaaacgtgttcgaacaactgatggtggaagcacaggaactgtaaggaagatccgctcccatatacatgcgtgaagatccgctcccatatacagatccaaatgagaaattttgtttgggagataatcaatatagaaacagtggtcaagctatagagttcaaacagcaaaacatgtattcatgtgaagcgtttgacaaaggacaggacatacatatgcaagcggctccatctcaagctgagttgtgttataagagggttaagattgcaaaggaaaaactgaattctcagagaaaggacgcaatcattgcaaagtatggggatgcagctgcaaaagatgacattccgatggagcttttgcttggacaaagtaagttgataaagacttcacaagccaacggaatcaaactcgtccctaatgtttttgtcaatttgtgcttccttgtttttgtcttcatatcttgaatgtcttatatatacgttggttgtttcttaattcccatccaaccaacgtcaacttcgaagtcacaaatataatggaaactggcatgtgaataattattagcatactaagg

SEQ ID NO: 161273 - DNA, 509 bp, Arabidopsis thaliana landsberg
agatctagtggatcgtttgggtgttttatgaacatcgattcgatcatctttgtaatcagaggtttttgagttaataaaagaggatttacaaagaatcagaagtttgctgtattaaagtaacggttataacatctcatgttttgctctacttacgcatatctaattaaatacatgatcaaactcaattataaactaacactgctcgaaagacgctgtagctgcggcagaagacgctgtggattggtgtgtttccagtgggtgttagatgttaacagcatatcctgttttggatctgtgatggcttatgcggaatccggttgctgaggggttgtctgagctatcacccttcactagccgccttttttttgtatccatcaaaccggattaacgattgtttgtttctaaaagattttcagatctacggttttggaggtcagaggcttggaaatgagtggtcattttggaaggtcggggactcgaccaaattgggtggcggagagtcagaaact

SEQ ID NO: 161274 - DNA, 984 bp, Arabidopsis thaliana landsberg
atggcgacaacgatcaacaagcaagtcgtgttacttgattacgtaaccggtttcgccaaggaatccgaccttgtaatcacctccaccaccatcgatcttagggtgccaaagggatctatgacggcgttggtgaagaatctctacttgtcttgtgatccttacatgcgaaatcgtatgaggaaacctgatcctctgagccctgctactgctcagtccttcactcccggcaaggtaaaaacatctacttattgttcatcgcttaaacgcatctataaaaaaattgtgagagacttatgctgtgttgtgttgtgtgtagcctatctcagggtttggagtgtctaaagtgatagattctggacactcagattacgaagaaggtgacttaatttggggagcagtaggattggaagagtatagtgttattacaccaatggctcacatgcatttcaagatccatcatacagatgttcctttatcttactacacaggacttcttggtattgttaatcccccttcctctaggccttatgatccgttgttgttaacaacattgtaattattttcactctcctctgttcttgaaaggtatgcctggtatgaccgcgtatgttgggttttacgagatatgtactccaaagaaaggagatactgtgtttgtgtcggctgcatctggcgcggttggtcagcttgtaggacaatttgctaagttgatgggttgttatgttgttggaagcgctgggagtaaagaaaaggtaggttttacttgaaactctagctttcgtaattggatcttgatttgttgagcttctttaggttgatctcctcaagaacaagtttggattcgatgatgccttcaactacaaggaagaacacaatcttattggtgccctaaaaaggtacaagcaaagatttcttctatccacgaatcaagactaactaatatgagaagattaattctatcatttttaggtggtttccctgcag

SEQ ID NO: 161275 - DNA, 1151 bp, Arabidopsis thaliana landsberg
caggagcatcaagtggtataggtgtagaagcagctcgtgttcttgccctgcgtggtgtgcatgtggttatgccggtaacaaacgctggcgccggtgctaaagttaaggaacatattgtcaagcaagtccctgtagctaaagttgatgtcatggagttagaactcagctcaatggaatctgtcagcaaatttgcatctgagtacaaatctgctggtcttccactcaacctcttgatgtaagctattgaaatatcgtggttcatctatagccgtttggatttattgacgtttatgtttggacttgtctcaattttgaaagcaacagatggcgggattatggcatgtccttttatgctctctaaagacaacatcgagctgcaattcgcaaccaaccatttaggtgagtatgataaccaaaccaacattatggctttgtcctacattttatataattagtttctaatcagtgcaacggtttttgtaatccaaatacatttcaggacattttctgcttaccaaacttctgttagatacaatgaagaacacatcacgtgaaagcaaaagagaaggaaggattgttaacgtatcatcagaagctcatcgttactcgtacccagaaggagtccgctttgataagatcaacgacgagtcaaggtactaatggtgaaccaaatagtataattctccgatcccatcttttcttctaaagccaacattcttccttgatttggtctccacatgcagttacagtagtatacgtgcttatggacaatctaaactctgcaatgtattgcacgccaacgagcttgcaaagcaactgaaggtaaactacactaaacaaagcaaagatatagcaaatcaagaatctatgtttccatggttatcttcaattctggtatatgattaaaaacaggaagatggagtcaatataacagcaaattcacttcatccaggagccattatgacaaatctatggggctacttcaactcctatttggctggtaacttcttttctcggattcaactctcatcactccatgtttcataaggttacactcaaagtaaacaaacgcatacatatattttgagtctcttctgatctaaatgtcccggcttaagcaggagctgttagtcagtggctagatatatctc

SEQ ID NO: 161276 - DNA, 4892 bp, Arabidopsis thaliana landsberg
  unsure (1)..(4892): unsure at all n locations
atggaggtgaagacacttgaccccgaggtcgagtggtaaggtgaagtggtgatgtcctctactcgaccagggggtcgagtgaggtggtcgatcgacaccagtttcggcccaacaaaaatcctagacgctttgaagtttatagaagatcaagtttgccccagaagatttccttatttgcattattaggccctggacgtttttagggtctatatatattgtttttagacctaggtttcttatatcaagtcttttatcaagcttttgcaaaaccctattgtgagagacataagctattcatcgatttgttttcagagtttcattcagatttatatacagtgaagagatcccttctttccccttctctatttactgtgtttaagctttcacactcaaatatgttgtttgcttcatccaatatgtctgagtaatatgcctgttaggaatagggtttctcattagggattcatatggtttagtagattaccccatttgctaggttatctatagaattcttcatctttaattgtgcttaatgctagatttagagtaattaactagatcttgaatccataggtatctgtagttggatttattatttgatgagtctgggtgtgtaataagaatcggcctatttaataggtgtgtaataagaatcggcctatttactaagatgaacaattgaactcgttaagaatgcatatttaggttgatagtttctttgcttctctggttattattagctagagatatagggagttttgcgacacacccaccagtgattccataattagagtttgagtttaagaatggttcgataacaacctagctttcattagatctactaaccaatagtttcctgagaataccctgttcctagctctttattaaatcgtttaccacaaaatcaatctgttgttttcttgctttgtttactttactatttcactcataccctgttagcttaatctcgacatgtaactcactgtgtgaacaaaagaactctgtgaattcgatcctaaaatactgcaattgatcttttatttgagagagcagttctaagtaattggaaccatatcaaatttggcgccgttgccgaagttcttgggaatcatcattgagttttgtttagaaatttcgtttagtttttacttctattttgttactcacgcgtttcttgttttcttcttttctgtatttcaggtgtatgcctaggcaaacaaggagcacaaaacagaaggagcttatcaacttgtcttttcaggacttgggaaaacttgaacgcagcaaccgaaaaactcagaaattagcaatggctgacagagtcattagagctgatgcagaaggagttttaagagatgaagattggcaagcctacaatgaggctggtcagagattggatgatcatggactcatcctacctgaggacgctaatgaggatcaggcgcgcctcaatgcgcaaatagctgccagagacgcagcagggctcgctgtcgatcgacacaggagaggtgtcgatcaacaccatcgggagcagcacgacgatgcgattggtgtcgaccgacacaacagaggtgtcgaccgacaccaacaccagatttttgcagctattcctccagctgcggaaccacgtcgtactcttggggatttcaaccaggcctgacctgttctatgctaatctaacagcgattgtacccccaccattccagggtaacgactatgagctgaagcctgtctactatgctttagttggccagcatcctttccatggcttatctcatgagcagccaatggatcatatctagcgatttgaggaccttgttatgagcatcatggctaatggagtctcagaggactacctactgtgcaagctcttctcttattcacttgttggggaagcagcttcttggctaaaacaatttaaagcaggttccctcaagacttggagaagcatcaagatagccttcttgaacaatttttacgatgatgctaagtctaaggagttgagaaacaagctgtctaccttcacacaagttccagctgaagctttcaaggctgcttgggttcgtttcaaggactaccaacgagattgtccaaatcatggttttagtgaggtacaacttctaggtaccttcttcagaggggttgattggagatactagatggctctagatgcagcgagcaatgataacttcaacacacgttaaccagctgatgctatagccctgattgagaacctcgcttgtagcaacagtaccaaaaatgctaattttgagaggaagaagattgctggagctatttcaggaaaagagatggcagaggtgaatgctaagctggattgagtttataacttgctcacaaggaagaagcatgtccacttagcagctgaagaagagactattgagcctgagcctgagttagaggcaggagtcttctacatagacgattagggatacaggaagtttgggcagccacagggcaacttcagtggcaagaggtttacagggaaccagggttcctccaactacactccaaaacctgctttccagaagacctttcctcaaagcagctttcacaggccctatggtaattcagcttaccaagccccccnttcccctccaccctcagcagagacaagaatggaatcgatgcttgagcaaattctggagagccaaacaaagcttgttgtggagtttaatggcaagttggatgctgtctacacagatcttaatgggaagatcgacaatatgagctctcacttgaagaagctagatgtacaggtagctcaaactgcataatctatcaagagacaagagggttttcttcctgttaatcctgatgccaacccaaggaagagctgcaatgccatcttgatcagagaaggagatgatgtgtgggaggaattggacactgaagacgagttggagctcgcagttgcagagatggtgtcgaccgacaccctcctgtgtcgatcgacaccatacaggactcttttctcagagacgactcaatacgacggtgtcgatcgatacccatccagtgtgatcgacactggatccggactacaccttgtgaggtgcaagtacctatgcagcccgagcccgtttacactcttcatgtcccctatccgaggaggcgtcgttctaagcaggagattcacgctgctaagtgcacagccataatggagaagatcctctatactcttcctaaggatgctttagagacatcttccgcctcactcaacaggtatgtcaagcgacttgttgacaatggaattagcttagatgaagctaagctgcttaccagagacatcagtgcaatcatgctgcctaaggccaagaaggagaaggcacatagagtagacatagctgagtacatccgcaccattactcctggtcaaaccactaagaagcttccggatccaggtagctttgttcttgattgctttatctccacaagcagattcagccgctctttatgtgatctgggatcaagtatcaaccacatgcctaagtctgttgctgagagactagacatgactaactacaggccttcgcggatccacactagagatttgtatttaaaattatgagaaaggagggctagatcttcactgaaacctttagagttatattgctaagaacgaatggactttaattatgacagagcttttataatgtgaaatgagattacaagtgtaaagtgtgtgtgtgccaatgtgaactagattgaatgtgtcttacaagtcgtccttactcccttatatagatctacgcacgtggtagctccatccgggatctgcggagatcctcctggatattcggcaggtcagttccgagatatcaggtccgctccgcgaatatctcctcatcagttcctaggtcattattcgcttatctccctgcatcaggtgactgggcttatctggcccaaatacccattcgcgtatgtgggctcgtcagctgcgtaggtcctctacttggtgggcttggtgggcttttgtgggctggcttggtattttcgcaggtggattccaggaggggaatacagctccaacatttgccccccagcccattgagtgagtaggcgaactcgatgagcggacatataggttaggtaagattgcgaaaatattctagatgagatgatagatatgatgagatcagtcggttttgaggataaaatcaataaaaacgatttaattttaggttcatgaaccgaaagatattgaggagatacgcaagataagtcgctgctgtcgtggacgactgagatggagcgtctcttcagcgcaccgcatatgacagtccagatcaggcacgggggaaagatctcttcaatctcgaaactcgtggtgataatgatttacataacttcccacctctccacttgacgtcacgtcaactcacatgactctcaaggtaacttctctccatcctaactatttactatgtttatttttcgtttttagggataggaaaatttcatctttcttctgctatctccatcgtttctctgctactcccttctttctcgatctgccacttcgcttttcccttcatctctcttatctttctccatcgaaatcaaaagatgagcgacctcgaggattccttcaacaagagcaaccacagttacggcgacgacgagagttcgtcacagacgaggtcggcggcgtcaccgccgcaagtacaaaggcgcgtcataaccctaggcggaatgggtccaatccgtccgctgtcgaccagagccgacaagccaaagaagaagaaaaaggctcccaagcaaaagggaggcacgccgatgacgaacaacgatcaggtcgacctccagaggagatgctaggtcccggtgggggtgactatgatactcccaacgccgccgctgcatcctga

SEQ ID NO: 161277 - DNA, 768 bp, Arabidopsis thaliana landsberg
agcattagatccggtgaagttaagggagaaacttgaagagaagacaaagaagaaagtcgatttggtttctcctcaaccaaaaaaggaaaaagagaaagagaacaaaaacaaaaacgatgaagacaaaaaaaaatcagaggagaagaagaaaccagacaacaatgacaaaaaacccaaagaggtaatctcatttgctttttactatattgtttttatctctgaagaatctgattctcaaaaatgtttttgttttgctgattagtataatgagagcatgtttttttgtttctgacatttttgtaatgtttatagactccggtaacaacggcggtgttgaagctgaacttccattgtcaaggttgtattgggaaaatccaaaagactgtcacaaaaaccaaaggttagagacaaaaatctgtacgattcgcgttatcaaaacgcggcgtttgctaacagcggttttgtgaaacgcaggtgttaatggtttatcaatggacaaagagaagaatttgctgacggttcaaggaacaatggatgttataaagctcgctgagattttgagtgagaagctgaaacgtgcggtggagattgtgccgccgaagatagagcaagatatagagaatggtaacgattatggcgagaagaagaaaggtgtcggcggagacggtggtgggaaagagaaaaccggtaacaaaggcggtggtgagggagtgaatatgatggagtacatggcggctcacccagcccacgggtatgggtattacccgg

SEQ ID NO: 161278 - DNA, 4260 bp, Arabidopsis thaliana landsberg
ctggaaggagggacagttactcaggtcgagtgacagtccagctcgggcagctggacgagtgacggttgagctcgaggtagctggacgagtgatggacgagctcaaggcagctggacgagtgacggttgagctcgaggtagctggacgagtgacggacgagctcgaggtagctggacgagtgacggacgaactgggcggttatgggcgaagagatacaactcttcggaaaggtgcaactcttcggaagggcgcaactcttcggaaaggtgcaactcttcggaaaggtgcaaggaacggatgtgttgatttgggaagcatccattcgccccctatgtaaggaagggcgcccaggaccattccactcaccacaacacaccgaaaacacaagaaaactcaccattaaaactctctccctcttgggagaataaatagtcttaggattcggtcgccgggctgtggccggcaataaagaaggagggtcggatcgacctaacctcgagaaggaaggtaagggatcctagactttgagtctaagggttctaggatgtgagttagtagtcggatccttgaaaggatcgactagagggctgggtagtatccgggtcatgtgcatcctacacaagactcggtccgggtagggatcggctgaggcggggacgcggctcggtggaggaccggcgggtcttaactgacctgccgagaatcggccggactgatgcgcgatcttcccctctctgaattctctccacggatccgagtagtgtatggcatatagagcattgcatggacttgcatatgattaagtaaatgagattacttatggctctatgactttcaggaacgaatggtgatcgtgggaaggacttggcttaggtgcgagagactcaaggccgggatgatgggtggtgatagttcggatagtctagggatcgattatatgacttgtaatagcttatatgcaaactcataggttgtatcgaatcctttgcttaatcaataaagtatccgattgtttgtttactctattcgtctcatatattgaatcacggaatcatatgaaacggatgagactaggaaagaacctcataaacggttagggccgagtcacttagtggcttgggtcgagagaactcgtccggactttaggcagtccggatcggggcctttcaagttggtatcggagcatgcttggttctaggactaggtgctgggttaaggggtatcaccactagtcggcttgagaatctcgcggtagttgctctttactcttttgcgattttactaggagttatgtggattaactttggaggtttcgcagatgggtaagagtagcaaaacgggaaagagtaagaaggacaagggcattgtcgaggagattttggttgaggaggaaacgatgatcaacgagaaaacgagagtcgggacgatgctcgatgggatagacttggccggacccgaggccgggaagaagtccataaatgaggaagcaccggagagtagcggtgcaagggacagcacggataaccggaacaatactccaacagcccaagaacagtgggatttgatgaaaggaatgatggcgcaactagccacattaaccaaggccattgtagcagatccggtggtccaaagagtggataactaaaaggacgatgactcggaagttgtggaagtgaatccgcaaccgaatcatgggcgaaaaaggggagactatctaagtcttctcgaacatgtctcatggctgggcacgagacacttcatgggcagtacggacccgattgtggccgatgagtggaggagtagactcaagaggaacttcacgtctacccgctgccctgaggattaccaaagggacattgcggtccacttccttgaaggagacgcccataactggtggttaaccgtcgagaaacgcagaggggacgaggtccgatcctttgcggattttgaagacgagtttaacaagaagtactttccaccgtaggcttgggataggcttgaatgtgcgtacctcgacctagttcaagggaatcgcacggtgcgtgaatatgatgaggaatttaaccgcctaaggcgttatgtgggacgtgaacttgaggaggaacaagttcaagtgcgccgatttatccgtggactaaggatagagatccgcaaccattgtttggtccggacattcaactcggtttccgaattggttgaaagggcagcaatgattgaggaagggatcgaggaggagaggtacttgaaccgggagaaagcaccgatccggaacaatcaatccaccaaacccgcggataagaaaaggaaatttgacaaggtggataacaccaagtccgatgctaagaccggggaatgcatgacctgtggtaagagccacagcggaacttgctggaaggccataggtgcatgtggccggtgtggaagcaaggaccatgcgatccaaagttgcccgagaatggaaccaggacagtccaaggttctcggtgaagagacaaagacttgtttctattgaggaaagactggacatctaaagcgagagtgccctaagttgactgcggagaagcaggccggacaaagggacaatcgcgggggaaacggactgccgcctcccccaaagcggcaagccgtggcaccgcgagtttatgagttgtcggaggaagctaacgatgccggaaacttcagggcgatcactggtacgttcccacaactccctattcattatttcaataactgcatttgcattgcatcatgcatatgggaaaggggaggtactcagcattctaagggaatgtgtagggaccttgagagtaggtgacgtagtaacgcacactctatttgattctggggctacacattgttttgttagtccagaattggttgaaataggtgggttcaggaaagaaccaaacaccgattatggaacggtacgagcggccggcggacaggcaatgtatccgaccggacttgttcggggcatctcggttgtagtgaccggtatcaatatgcccgcggacctaatcattgttccactaaagaaacatgatgttatcttagggatggactggttggggaagtacaaggctcacatagattatcaccaaggacggatacaattcgagagggacgagggtatgttaaaatttcaaggaataagaacaacctcgggaagcttggtaatctcggcaatccaggctgaaaggatgctcgggaaaggttgtgaggcatatttagccacgatcacaaccaaggaagtgggggcgagtgcggagttgaaagacattccgatcgtcaacgagttctcggacgtgtttgctgccgttagtggtgtaccaccggaccggtcacacccgttcacgatagaactcgagcccgggacaacccccatatctaaagctccgtaccggatggcaccggcggaaatggcggagctaaagaaacagttggaggagttgttggataaaggattcatcaggccgagtagctcaccatggggtgcgccggttctatttgtgaaaaagaaagatggtagctttaggctatgcatcgactatcggggattgaataaagttacagtgaaaaacaaatatcctttaccccggatagatgagttgatggatcaacttggaggtgcatagtggttttcaaaaatcgacttggcctcaggatatcaccaaattcccatagagccaacggacgtgaggaaaacggctttccggacaaggttcggccactttgagtttgtggtcatgccattcggattgaccaatgcaccagcagccttcatgaaaatgatgaatggggtattccgggatttcttagacgagtttgttatcatcttcattgacgatatccttgtttactcgaaatattgggaagctcaccaagaacatctaagggcggtgctggaacggctaagggaacatgagctatttgcgaagttaagtaaatgctcattttggcaaaggagcgttggttttcttggtcatgttatctcggaccaaggagtatcggttgatccggagaaaatacggtcgataaaggagtggccacgaccaaggaatgccaccgagattaggagttttctcggactagcggggtattaccgaaggttcgtaatgagttttgcgagcatggcccaacccttgactcgactgaccgaaaaagacaccgcattcaactggtcggatgagtgcgagaaaagcttcctggagttaaaggccatgttgactaatgcaccggtattggtcttaccggaggaag

SEQ ID NO: 161279 - DNA, 690 bp, Arabidopsis thaliana landsberg
  unsure (1)..(690): unsure at all n locations
atcttccgccattataaaacagcatgtctcactccaacttttatttatctacaaacattaaatccacctgaactagaacagaaagagagagaaactattatttcagcaaaccataccaacaaaaaagacagagatcttttagttaccttatccagtttcttgaaacagagtactcttctgatcaatgaactcattttctgctttttctgaaatgtttggctccgattacgagtcttcggtttcctcaggcggtgattatattccgacgcttgcgagcagctgccccaagannnnnnnnnnnnnnnnnnnnnnnnnnnnnnnnnnnnncccaatatacagaggagttcgtcggagaaactccggtaagtgggtttgtgaggttagagaaccaaacaagaaaacaaggatttggctcggaacatttcaaaccgctgagatggcagctcgagctcacgacgttgccgctttagccattaaaggtacaacggcttacctcaattttcccaagttagccggcgagcttcctcgtccagtcacaaattctcctaaagacattcaagccgcgcctctttagcggccgttaactggcaagattcggtcaacgatgtgagtaattctgaagtggctgaaatagttgaagccgagccgagtcgagccgtggtggctcagttgttttcttcggacacaagc

SEQ ID NO: 161280 - DNA, 1190 bp, Arabidopsis thaliana landsberg
atgaatactttcaaaaccccttttctcgtcatcgttgcgattagctttcttgttgttgcaaccaatgctcaaaacactccacaagactaccttaactctcacaacaccgctcgtgcgcaggttggagtaccgaacgtggtgtgggacacaactctcgcggcctacgcattgaactattcaaattttagaaaagccgactgcaaccttgttcactccaacggaccatatggagaaaacctagccaagggaagtagttcctcgttctcggccatctcggccgtcaaactttgggtcgacgagaaaccttactacagctacgcatacaataattgcacaggtgtctagtatcttatacagtataacctctataaattaataatcgataaaataataacctctataaattaataattttttctggttccgagttgggactagtgtaaaacttgatacaaatcgataaattaataagataatattttttttgaaaatcctatgtaaatatatggtcccatcaatattataaattaataattatgtaaatttatgaatatatatatatatatatatatatatcaatattctatttaaaatatttattgaaatatgactctagtattattttttcttcaatttctattaattatttgtagagtttaattctaatatttttattacgtcaaaaaaactttgtattattttttaaacttaataattattttttccttgtaattagttttagaaaaaatgattaattataaagaaaaactacttttatatcgaaattttgtaaaaaaatacaaaatttttaaaaatctttctataaattaataattattaatttatcgataaattaatatctttctaaattaataaattttctcggtcccaacattattaattaatagaggttttactgtactattttgtgtgtttcgaaatgcataagttttcagtcatcataggttctaaaacctgcatgaggtgctcggctatatattgtcattgttaaaaagcttcctgcgcatataccattaataccagtacatctctatgcatgattattaaatcaaaaccaacaacacaatttacaaaaggaatattcatacataaaaaagaatgataaaattgatacatgacatttgaatagatttatatttacatatatacatgcaatgaaacatttgaat

SEQ ID NO: 161281 - DNA, 3030 bp, Arabidopsis thaliana landsberg; identical to SEQ ID NO: 7787

SEQ ID NO: 161282 - DNA, 3918 bp, Arabidopsis thaliana landsberg
aggacgatgaaatcaggccagacggaagtttgggatacttggagttctctgtttatcacgtagagtatcggcttccaatagagcatctcgagctgatgtatggatttccaagcggaaaagacacgagtcatcgttttgacaagaaagagcttcagtcattttgggccacgcttgggtctaagcatgtattatcattctttaggaccaagagcaacgagataaggagtccggtggttagatactttcataggtccttggctagtgcgctatttgcaagagagcggaatggaacctttgttaatagagaactagagttgatggagatagtactgcaagagttgcttggtttagcatcagacggtacagttctagctagagatcagacagacacttcggtctcattctacctaatcgagcacctgctgagttacagaggatgggctaagggacttaagaaaccaggaaaaagggttgtgggaggagttgtgacaccaattctgagagcttgcaatgtacctctacattcaacaccgattcctccgagatggattgatatgcaacaccttctcaattccaagagtttttggtcacaacaaaagaatggcctatataagtataggttcgatcaccccacaacaggacaatctatttttctcctcccaaaactcgcttccacttcgatcagagatggtggcaacattgagttctacccaccaatggagaacctctatacttcaggtgatgaagctgtaccgatggaaggagtgaatgatgatgagtcctcaatccatcattcagataatgaggcagaacctatggacgagtcttacacaacacaacagttttactttgaggagtactccgcaccgaggcaaagtaaatagtcaaaggaaattcacaagcgccttggtttcctccaaatatggtgtaagttccatgacaaggctcttgtgacactcaacaagaaatttaacaatctccaactcaagataagctgttcttcttcaactacggcaatgccacaaagcatgccatttgggagaagcggatccactcgtcacaaacctatgcatttcgatccgccttcaccaccaagacagtcttcatatgagccgagggaacaccatgctgcaccttcaccaccaagacaatcatccttcgaacctagagaaaaggaaaagaggagcaagttgcaaaagcgaagaagaacaaggaaatcagacgctggggcaagccaccgcaccatttgaggagccactcgatcagcaacccgaacaaagggtcaagcatccagctaatccaagttcagcataacccgtcccttggagtaatacaaaggagagtatggacgatttcgtctcctcctacttcacctgatcactgaggtaacaccacctcagtcattgtacataccattagcatttttatttttctttgtgtgttttgtgcttttgtcttgaattctctttcagatttttattacacaagggactgtgtaatttaagtttgggggagggttcaagacatgtttaacattgtgttctcttttcttatttcaatttttgtatcatctaaggcatagaaaaaaccataaaaatatgaaaattgtttagaaaatgatttcacaaaaacagagtgtcatgtagattgcatttcattttaggattgtatatagagtgtttgcatttaggattgctcatttacataggggataatgatgatttcaaaccgataagcatgttttgattctatgaagtaagttcaatgcctaggttgttcgccccctgttgaaataaccggattgtatctctgaagtaagactgcaccctgctttgaatttacaacttgactatactactttgattcgaaactcgcttatctgatgccattccttatctattagaacctgaactgaatttgcaattattatgtctatgtattttttgtgaactcatggctaccatatacatacttggattatcttattcacttcaccaccctctgttaatccaagtagctgtctctcactttgagagctgtttcccatacccttaccctagccttatttcaagccaaagatcatttgtgtgtgattctgaggtctttttcgattgagcttggtataacgtgttaggtatgagccgacaagagcagtctttcatgtagacctagcctacgctttttggattagctaggactaggtggagactcgtttttgggattgggaatgtgtatggaatgaatgggaatgagaatgagaatgaaaaacaacaccccgagagttcgagtttagagttttaagggggatacaacagtgttaagtctagtaaagggttcggaattcaaagaagttaggcattgtgattcaaataaaagggtaaatcgccctatgtgctaagattagaagaaaagccttaagtttgtcaaaggataaaaccaaacccgctagactcttaaatcgtttcaaagagaaccccttagaacttgaaccaaaaagagagaaagaatgagaaatagggtgccgttaggacatctatgggaatgggatcatcttctgagctatcatactatatcattgggtagatgagagtctcttcttgtatatgtccgttggcttttacctttagcattctaatgaagctcaatcttttctctaagagtcccatgttactcgaccaaaccattagagggaccatttttgtctcttaacctaagcccaaaaccaagtgagttcataaccattgcattgcttgatccactgttcgtgcttaattaatgttaaagggaattggttgatgtgaatgcttgaatagattaaggcaagttgttaggttgcattgtgacgagtatgactaatgtttttgggtaagggtctatcatcttgcaacctagaattagctacctggacagtgagcttacccgttttatatgcatgtttcggtttttgaatccccaccttccaacctctccttcaacctaagtctttttgttagcttgacggcaagcaagagataagttagggggagttgataacattgtatttatcatcatttagcgttgtatttactcattgtttcatatcattttgaaccaatttagcttattttgcacatttaggcatttaggatcattctccatatatattgcatgttttggtttgttttcaggtacaaaaggagattactcgaccctctactctatcacaccactggggaaggaggagagcagctactcgaccaattactctatccagcagatgcagaggaagcatcatatcaccacttgataaagcggctttttggcccgttttagctattgttttcttatgtttcagagagaatttggtaccattctatagccaataagaggagaaacacgtattctagatgccaagaaggttttaagagttttgaagctaaaagtatcaaaaggcaatcatttttgtatttcagaagtttagcatccggccgaggccttccccaccacggcaacaagatattttggtatgcatggaaagctagaagagtcaagattaacgtcaaagtcgaatcgaagcaatccatgaagccgtttggaagatatgacccgaagggtgaagacatgtcaagaaccggtcgtttggaaataataagtccaaaacaaatcaggccaaggagacttgaacccgggcagctccgattagctcaccaccaaccattaggttacgcccaagtccttccctctttgcgccaccatcattaggctccttccctgaagctcacttctcggcggaatgatgtttgtacccctaaacctaattcttgcccctcaagtataaatacttgttctaagccctaaccctaggtgtgccttcatcacaagcgaacccaagccgtcgccgagagctgccagcttgccgccgcacctcatgaagcttga

SEQ ID NO: 161283 - DNA, 1455 bp, Arabidopsis thaliana landsberg
  unsure (1)..(1455): unsure at all n locations
atatacaggacacttgttgtgttcccaaatgggaacaagaaggttagtggttcagggtacctttctctttacgtagccatagacaactcaactctcggacaacaagagatttacgcagatctaaggttttacatctttaacaagaatgagaggaagtacttcactatccaaggttcttataattttcaatcaagaaatgtagtgttttagcaagaaagatactttgtgcatgatagattgatagtaatatgtatctatatatcgactggtctttgttatataatctgtagatactgatgtatggaagtttagtgcaatcaaaagaatgtggggattttctaaggttcttcctctgattacgtttaacaacctaaaaaatggatacctttatgacgttgaccattgtgagtttggcgttgacgttatcattccaccattctacgaaaaatcggaagttttctctgtcaccaagagttttccgagcccgagattcacctggtatattcaaggatactcgacactgcctactgattacctatcagaggagttcatcatcggaggaaaaagctggtgagtttctcaatataattagttgtagtgcaagtgtggtgggtacgtagtagtatactactattaagtgtttaacaagtttttcaaatgctgaatcaggaatttacgaatctttaaaaatggttttggcgcttttgaaggcaaaaatttgtcgctttatcttaaccttgggccacaagagctactaaaagcaaaaccttatgacaaggtttacgtacgagccaagcttcgtgttcctaaccaattcggatcccaatccaatctcgttttggaaaggccacgtaagtggatactagatatgtgattatgactgttatttaatgtgaaattcataacatcttcaatcactacgatgactaatatgtgttttttcttttcttttctggcagttgataactggttcagtccccaaacaatcgggtggggatacgctgacttcatgcctctttctgatctgagaaattcatcaaagggttttcttgtgaatgatatgttggttgttcaagtcgctatggaggaaatttcttctacaaattaccttcccaaatagacttgtttagaagcttaaaccgtggcatctataatatatgtgttatatagtcttatcttttgtgctttaacttaatatcatgtttcttatgctttgtgtttcaagtgttttttccaatggaaaaccttattnctttctcccacttggtctaaaataaatggatatatcaattaagttcttctgtttatcatatccttaagttacatatagaagaatgcatcctacagtttcgaagtatatacacaatgtaataaaagaagatattattgacctagcgttggactaaagaggaacaaaattcattaaaggaaaacaccattgtgcctctgttccta

SEQ ID NO: 161284 - DNA, 2090 bp, Arabidopsis thaliana landsberg
atgaccaagactgagactgaagctacagagctaattgagaatctggcagttagcaacaacaaacacaatgttgactatgacaggtccaatagaggtggaggaggagaatcgaaacagcttgctgaattgtcagctaaggttgagcagctactcaggagagatcagagggttgttaatttctgtgatgatattggagaagctcaggtgtaccaggagtttagtgggaatggttcggaagataatcaggctgaatattctacttcggttaaatatttcgggtaattactcgagcaatcacaattgagtgtaggtttggatcataaaagagcatgactaaagtttttgagtagaatttgatcacctcgcagcttagaatatcaacttagacattgatttcatctggtttatctggtgctttggcttggagttcccgctttcaaacttcacctccagcttgttcttaattgtttgcttgagggcaagcaaagactaagtttaggggacttgataagtgtgtattttgcatgttttgagcatccatttgtcatcactttagcatcatatcatcactttttataccatttctgatcatttgtgtttaggatagttttgcatgcatgttgcatatttgtgttgttttcaggtgatttggagcttttggcgagctaattgggagaagcgtacctgatcatgtcaaaccactcgacccccaggtcgagtagacgcttcacgaactcaacagaccactcgaccccctggtcgagtaggggacttcacaatttcacctcatcactcgaccccctggccgagtatcaccgcgagagatactcgatcacgtcactcgaacccctggtcgagtgtcttcacccccaccacctgaccatcactcgatcacaccactcgaccccttggtcgagtacctccatcacacccactcgatcactcacttgattacatggccgagtcccaccatcatcacacactcaaccgatcactctaccaccaagccgagtaccaccatctccatcactcgacttcatactcgacttcatactcgactgccagcttcactgttttctccattccgcactcaaccagacactcgagcacaaggaagagaagaacactccagcttatcactcgactacctgggtcgagtaccgttcttaatccgtctcaatacttcgtcgttttgagtattagggtttcagaatattttgctataagtagcatgtattttacatttttgtgacctaagttttattccgcatacactgtgttcttgacattttgtaatccagatttctcttaatctattcagtattcagtatttgcttttcaatttcgtttactaagttgttcatcttgttatcatcttgctattactctgttgctatcatgttttcattctattcatcgtttaagttctttgcaatgatgtttgagtagtgactaggtttctgcggatgggttaaagtagtttagaattctcagtatgctaggtggttgagtttgatttatagatcccttctggattagttgttcttaatgcctatcgctttctaatcaactggaatttgagcctagacatttccgcgcccaaaaggtgttcgatgaaatgtgtgaaccactaattccagagattcgtggctctgtaccaaggtattggttgccgggagcgttttggctttaacttgttgatttgtaatgcatgttaggttagctgttgtcaatggtgattgagtttgggactggtttaacttgagagtctctgttgcggtggcacttatatttggttatcgaacttgttgtctagggataatatattgagcatgtcaatcacctgtaaactgaggaagcgaaactactcaattaccccatcctcaggaattctttatctaattgatttctttgtttaatgcatcttgttacctgttgcttagtatttgcatttctctcctgttactcgacctgatactcaaccacctagttgtttggtaacagactgtgaagtcgagtatccgtgttacattttttgtctattactcgacctgtcactcgaccacacccagtgcttggcaacaagctgt

SEQ ID NO: 161285 - DNA, 3828 bp, Arabidopsis thaliana landsberg
agctcgcccaaagctcaggctcagctggaaggagtgacagttactcaggtcgagtgacagtccagctcgggcagctggacgagtgacggatgagctcgaggtagctggacgagtgacggacgagctcgaggtagctggacgagtgacggacgaactgggcggttatgggcgaagaaatacaactcttcgaaaaggtgcaactcttcggaagggcgcaactcttcggaaaggtgcaactcttcggaaaggtgcaaggaacggatgtgttgattcgggaagcatccattcgccccctatataaggaagggcgcccaggaccattccacacaccacaacacaccgaaaacacaagaaactcaccattaaaactctctccctcttgggagaataaatagtcttaggattcggtagccgggctgtggccggcaataaagaaggagggtcggatcgacctaacctcgagaaggaaggtaagggatcctagaccttgagtctaagggttctaggatgtgagttagtagtcggatccttgaaaggaccgactagagggctgagtagtatccgggtcatgtgcatcctacacaagactcggtccgggtagggatcggctgaggcggggacgcggctcggcggaggaccggcgggtcttaactgacctgccgagaatcggccggactgatgcgcgatcttcccctctctgaattctctccacggatccgagtagtgtatggcatatagagcattgcatagacttgcatatgattaagtaaataagattacttatggctctatgactttcaggaacgaatggtgatcgtgggaaggacttggcttaggcgcgagagactcaaggccgggatgatgggtggtgatagttcggatagtctagggatcgattatatgacttgtaatagcttatatgcaaactcataggttgtatcgaatcctttgcttaattaataaagtatccgattgtttgtttactctattcgtctcatatattgaatcacagaatcatatgaacggattacactaggaatgaacctcataaacggttagggccgagtcacttagtggctttggtcgagagatctcgcccggacttaggcagtccagatcggggcctttcaagttggtatcagagcatgcttggttctaggactaggtattgggttaaggggtatcaccactcgtcggcttgagaatctcgcggtagttgttctttactcttttgcgattttactatgagttatgttgattaactttggaggtttcgcagatgggtaagagcagcaaaacgggaaagagtaagaaggacaagggcattgtcgaggagactttggttgaggaggaaacgatgatcaacgagaaaaccagagtcgggacgatgttcgatgggacagactcggccggacctgaggccgggaagaaacccataaatgaggaagcaccggagagtagcggtgcaagggacagcacggataaccggaacaatactccaacggcccaagaacagtgagatttgatgaagggaatgatgacgtaactagccacattgaccaaggccgttgtagcagattcggtggtcctaaaagtggataaccaaaaggacgatgactcggaagttgtggaagtgaatccacaattgaatcatggacggaaaaggggagactatctgagtcttctcgaacatgtctcaaggctgggcacgagacacttcatgggcagtacggacccgattgtggccgatgagtggaggagtagactcaagaggaacttcaagtctacccgctgccctgaggattaccaaagggacattgcggtccacttccttgaaggagacgcccataactggtggttaaccgtcgagaaacgtagaggggacgaggtccggtcctttgcggatttcgaagacgagtttaacaagaagtactttccaccggaggcttgggataggcttgaatgtgcgtacctcgacctagttcaagggaaccgcacggtgcgtgaatatgatgaggaatttaaccgcctaaggcgttatgttggacgtgaacttgaggaggaacaagctcaagtgcgccgatttatccgtggactaaggatagagatccgcaaccattgtttggtccggacattcaactcggtttccgaattggttgaaagggcagcaatgattgaggaagggatcgaggaggagaggtacttgaaccgggagaaagcaccgatccagaacaatcaatccaccaaacccgcggataagaaaaggaaatttgacaaggtggataacaccaagtccgatgctaagaccggggaatgcatgacctgtggtaagagccacagcggaacttgctggaaggccataggtgcatgtagccggtgtggaagcaaggaccatgcgatccaaagttgcccgagaatggaaccaggacagtccaaggttctcggtgaagagacaaagacttgtttctattgaggaaagactggacatctaaagcgagagtgccctaagttgactgcggagaagcaggccggacaaagggacaatcgcgggggaaacggactgccgcctcccccaaagcggcaagccgtggcaccgcgagtttatgagttgtcggaggaagctaacgatgccggaaacttcagggcgatcactggtacgttcccacaactccctattcattatttcaataactgcatttgcattgcatcatgcatatgggaaaggggaggtactcagcattctaagggaatgtgtagggaccttgagagtaggtgacgtagtaacgcacagtctatttgattctggggctacacattgttttgttagtccttaattggttgaatcaggtgggttcaggaaagaaccaaacactgattatggaatggtacgagcggccggcggacaggcaatgtatccgaccggacttgttcggggcatctcggttgtagtgaacggtgtcaatatgcacgcggacctaatcattgttccactaaagagacatgatgttatcttagggatggactggttggggaagtacaaggctcacatagattgtcaccgaggacggatacaattcgagagggacgagggtatgttaaaattccaaggaataagaacaacctcaggaagcttggtaatctcggcaatccaggctgaaaggatgctcgggaaacaatgtgaggcatatatagccacgatcacaaccaaggaaatgggggcgagtgcggagttgaaagacattccgatcgtcaacgatttctcggacgtgtttgcggccgttagtggtgtaccactagaccggtcagacccgttcacgatagaacttgaacccggaacaacccccatatctaaagctccgtaccggatggcaccggcggaaatgccggagctaaaaaaatagttggaggaattgttggataaaggattcatcaggccgagtagctcaccatggggtcgaccggttctgtttgtgaaaaaaaaagatggcagctttaggctatgcatcgactatcggggattgaataaagttacaatgaaaaacaaatatcccttaccccggatagatgagttgatggatcaacttggaggcgcacagtggttttcaaaaattcccatagagctaacggacgtgggaaaaacggctttccggacaaggtacgaccgctttgagtttgtggtcatgccattcagattgaccaatgcaccaacaaccttcatgaaaatgatgaatggggtgttctgggatttcttagaagagtttgttatcatcttcattgatgacatccttgtttactcgaaatcttgggaagttcaccaagaacatctaa

SEQ ID NO: 161286 - DNA, 550 bp, Arabidopsis thaliana landsberg
ttgacacactcatttcttattctacaccatagtctaaaagctcagtaactctcttctttgattctcagatcacagaactgtgactttacattgacagcttagagaaagagagagatttctttttctctcaactcagagatgtagagattctctgtcaaaacccatgacacagagcacttacctgtatgcaaaatctctcgtctgtctcaattcaacaaactccataaaagttttaaattctcatcgtcactcttactttgtcaagcagcttgttggttccataaaaagaatcctatacgcagcagatgtagaagtcgttggagcagcagagacacagactttgagtcccattgctgaaggatcagaagagagaaggagcagtgtatcagagtcgcagaagaggaagctcatagtgaatctcgacgtagatgttgcagcgattacaacactctctccaagacaacgcctttctgatgcttctgatgtcaaatgcagtggttcatctcctctcttgacctgatgaaatcagagttagctatataatactctc

SEQ ID NO: 161287 - DNA, 1943 bp, Arabidopsis thaliana landsberg
gtgtacatgttgtcaaattatgtgtttcattggtattccagattataaccgagtccaggagcaaggactcaacactgagcttattacaagaataaagacatgggagaaactttcagtattgttcctactagtgctattaggtatgaatctctatttactgtttgtaatatacagcgtaacagacaagttattcatcctaaacgtaattgggtaacgttggttcttgatattacagtggagaaggggtcccagatctcttgctgtggttggttcaatgggctcagaaaacaatggttgagaaacttacatatgttgacgaagtgcaggtctctttcctttctctttaggtaacacttgtttctgcaatacttcagcatgcggatttctgatcttttcttgaaattgttgaacagtgtactgtacttgaggtcaaagttattgaaggccatggtacaacgattgatgttgtgttggtaaacggtgaactccatgaaggtgatcaaatcgtcgtttgtgggctacaggcaagtaaaaaacttatgatccagacccgaacaagtgatggcactgggtagacatagaacttttctaagtgatcatattttcttcctcatatttcagggacctattgtcacaacaattagagcattactgaccccgcatccaatgaaggagttacgggtgaaggtactttctgatttccacttcatgtgttttattactgttattccccagaaatatggttcatgcaaatcacttcctaggttctttttctatacacaatgagaattcctggtctgatgtttcagggtacttatctgcattacaaagaaataaaggctgcacagggtatcaagattactgcccaggtgaaatggacttctatattctttattaaatatacttatgtttagatcacatcctgaaccatttttgggttgtgtttaaaagggccttgaacacgcaattgctggtactgccctgcatgtggttggacctgatgatgacatcgaggcaattaaggagtcggctatggaagatatggagtcggttttgagcagaattgacaaaagtggcgaaggagtttatgtacaagcgtctacattagggtcattagaagcattgcttgaatacttgaagtccccagctgtaaagatacctgtaagtggtattggcatagggcctgtgcataagaaggatgtaatgaaggctggagttatgctcgagaagaaaaaggaatatgctacaattttggcttttgatgtgaaagtgactacagaggctcgtgaacttgcagacgaaatgggagtaaaaatcttctgcgctgatatcatctatcagttattcaatcagtttcaggtttacattgagaatatcaaagaggagaaaaagaaggaatcagccggtgaggcagtcttcccatgtgtccttcagattttacctaactgtgtgttcaataagagagacccaataatccttggagttaaggtccacgacggtatacttaaggtatcctattcttactctgctatattctcggtaacttgctcacatgtccaaggattctcaatccttttaacattcgtcttgtttgttttagatcggaacccccatttgcgtcccgggcagagagttcacagatattggccgcattgcctctattgagaacaaccacaagcctgttgactatgcagagaagggcgacgaggtggcgattaaggtaataaggggatcattcccttcaacaacctttgtatagagaaagagagagagagacaaaagttgttgaggtttcaacttgatgcttttctctggttgtataacagattgttgcttcaaatcgcgaagaacagaagatgtttggaaggcattttgacatggaagatgagcttgtgagtcacatttcgaggagatctatcgacatactcaaagctgactacatg

SEQ ID NO: 161288 - DNA, 1740 bp, Arabidopsis thaliana landsberg
  unsure (1)..(1740): unsure at all n locations
gtaacgtaaaaaggtttttgattaaaagatagttgagtctacaaagaggaaattcaggagtttaaatagataagaagagaaggggaagaggtagtcttgggacaagctccatgatgactcggaaaggaaaaatatttaaatgagagtttgaacaagaatgagccttagccttccaaattcggggtcgtcttaatggtcttgggcgggattgataatgggggatttttaagtgtgagtcgagcctcattagaaacctactaaggaaaacccattggggcaaaaccttagaagggaaaaagagtacccaagtaacacctagccaattaccaattgtcttgagctgctattgagttccaaacgcttagtatgactttgtttggatgcttgcccaagtggttaagaagtccggtaacagcttggttgagaagtctagtcttcgaacgagtcataggactggttggttccgtacaaagcttcctccgctgcaagctgctcctcagctacaagctgctcctcggctacaagctgctccattggttcaagttccaagtcttgtctcacaatagcatatcatgccctcaggtggctaacaggcgaaaggcaaataccctagatgatagattcaaaaccgggtcaatccactctcgtgacaaagacccccataactctaccacttcctaatctcaactctcgttgatgaaacatagcagagcaggctttaaacattaatctattaaagtcaataagcaatctaaacatccaaggtcttggggttgaatctacaaatctctgaaattcgtagatcagacatccatttgaacgtcttttggatattggacgtctatgatcgaatctccacattancgaacgaaaaccacataggggccaagcgaatccaaaagggtactaacctaaacactaaccacctaactaacttagagattaccctaatctaatccatcctcaagaaccctaatcactactcaagcaacattctcaagaacacaaacccataaattactgaaatcatatcaaaatgtagatctaaacaagctaaacaactttacttaaacaatcaaatgcaaaaaagaaatagattaagagtaattaaggttttaagattcataaacacaaagaaaaattgaaagataaagcatagatcctttggacaaaccccaaagtgatctatttatagtaaaatgttgaaaccctagattcactagaagacaagagacttgaggcggtttgggcgaatactcgatcttggggatcgagtaaagagggtgctgcaaagtctacgtctttgtgtctatgctccgagtgatcaattggtcgagtagatgcttcttcctctcctatctgtatgctcagatgtctggttgagtggggaatgaggaggatccgaagacgctttgatagctcaacaagtcttgtagtttggtcacccttggtcgagtaaacgggtcgagtagaggatcgagtaggaggggcgagtatatcaatctgctgcttcatctaaggctgccttgatcgagtaagagggtcaagtaaactgcatcctcctctttagctgcctcgatcgagtagagaggtcgagtaaactgatgcctcttctctagctgcctggatcgagtgaatggatcgagtagagtcctttttagctccttctgcacctgaaaacacaccaaaacatgcaatatgtatgcaagatgatcctaaatgcctaagggtgcaaaataa

SEQ ID NO: 161289 - DNA, 1840 bp, Arabidopsis thaliana landsberg; identical to SEQ ID NO: 36259

SEQ ID NO: 161290 - DNA, 4100 bp, Arabidopsis thaliana landsberg
atgagacccaacgatgaaagcctggtggatatagttgtggaacttaggtatggaatctagaatgttgtgcaaacttgcggagaagtacaggttggttaggatttgattaaacttgctaggcatatggatttggttagaatgatcatggcaatggactagagaatgttggaggtttctttgtgttttcaaacctcttccacgggttcggctttagtgttttgcttgagggcaagcaaaagctaagtccagaggagttgatataaacctatttttacatgttttacctatgatttaggtataagttttagagtccttttgttatttgttgagtcttttctagtctttttcaggtctttacatgtttgggatgcatttggagattatggagcattctggtgcaaaacagacaacttaagctgcaaaagcaatccggagacaaaaattgacgtaggtctcgattgacacaacccctggtgtcgagcgacaccaatatctgacggcaattgaattgcgcaacttattgatgtttggaagatttccaaattcggcccagaactttctcctatttctaaagaagtccctgcacgttttaggtcatatatatatcgttttaaacgtcattgtttagacctaactcttattatctcttttattcttgggagcaaaaccctgtggagactctctttagagaagatctttctatacacttttctcttcttaatttcattattgatttcttattcagtcatgttttgttcttctatgatcatgcttgagtagttctcttgttgggtttagggattctcattagggatttggatgaatttgtagatagaagaccctgttaggataataaatttagaattctttatcttggattgttcttaatgctagttttagagtaagtagctagaacttgattttaggttattaggtatgccccacattaggtatctaatactggaactatcttagatgagcctagtatttagatgcgtgttagcgtccattacttaggtgaacttatcaaacatgattataatgctttcttagttctagggacttacaagagagttgggatcaatactattaagcatagtgagtttcgcggaacaccaccggttactttatattagtgatttgtgttctacaatggttcgataataatctcaatttactgctaaatctactattctgatatctcctgagaatttccctaaacctgacgtcttaatcatctgaatctacaaccaattttaattgctttcttgtcttttacttttataatattttctgtttagctttattcaaaactgttaatctattgtgtgatccgagaactttgtggaattcgatccctaagtgctataacaacctctttatttgagagagtagtcattagggtaatttgactcatatcaaatttggcgccgttgccaaagttctcttcgattcaccattagattaggtgtagaatttagtctaagcttttcttttcttttgatacttacgcgtttttatttctttttcttcttgtgtttcaagagtttaaggaattcaaacgcaactcaagatgctgatagtaatacctgatgctgctggagtgttacgcgacagagctggtcaggcatacaacgaagagggtcagaaaatagatgaacagggaaacctgatactataaatcgccgagggtgtcgatcgacaccaagaagaaatcagagcagatggacgacggatgactcttggtgactacaacagactggatctattctattccaatcggtctacaatccgaccacctaccttcgaaagaagcgatttcgagataaaccctacattatatactcttgtgagcatgcatcctttccatggtctttcccaagaacatcctatggatcatattgagcggtttgaagacttgatttctagcaataaggcagaaggtgtttcttatgactatcttccctgcaagctcttcccatattctcttgttgggaaagcatcttcttggcttaagcagttgaagcctggatctttgacaacttggaaagaaataaaggttgcttttctcaacaacttttataatgatgcaaggtctgaggagctgagaatgaagatctctaccttctctcaagaagcaactgaagcatttaaagccgtttggatcagattcagaggatatcagagagattgcccgcatcatggtttcagtgaggttcagctgttaggtatttttttcagaggagttgattggcattatcagatggctttggatgcagctagtaacggaaatttcatgtcaagatatccataggatgcaacaatgttgatataaagcttatcttccagcattagtaccaacatcgttgacattgcaaggaaaacgcaagttcagtatgtttcacaggttaacagtttagccacttcagagaagatggatcaaaagggatacatgagctacaatcaacaatctacacattagaaaccggttcagcaaactacaagcacaccctccacccgagaccactaggatgattgaatcaatgttcaaacagattctcaaaagtcaagagatccagacaacagattttgatcacaaactggttgcattatcagaagatatgaatgggatgattcaattattaaacagtcggaccgagcatttgactacaaatatagcagatattagtgttatccagttaaggagtggaaaacaactaaatccagtacttcaaagggaacttcctacagccaaaatcgtcaatttggaagaaaatgatgatgcagtttttgcaaaccagacaccagtgtcgaccgtcactgctgggtgtcgatcgacaccagccaacgcagacactacagaacccgacagtgtcgaccgacacgaactgggtgtcgatcgacaccaaccaagtccaaacatgcaaattctccaaaacccgatatgtgctgcagaaaatgtaacaaaacccaaggtttcttttcccaagagtcctaggaagtccaaacaggagctggatgatgctagatgcaaagctatgatggataagcttattgtagagatgccacttatagatgttgtgaagtcttcttctatagtcagacattatgttaagagaatggttactaaggatttgaataatgagcatggtgtgatgatgttctctgcacaagtaactggcattatttaaaacaagactccacagaaataggaggacaaaagaaagacagtggttgtctcagaacagattgtagagctgaatagtgtcgatcgacacccacaacagactgcactcgaatcgtttatcacggctgtagtcgatgctgcaagtccaagacagactgtcaaatcaagcactgcacctctactactcaatccacctcctaaacggctaaggtactcatctcctccacctacacctcctgatttcatctgtaagacttttaaattttccaagactgtttcacggttaagcaagccacgagtttctcgtcgagtgcttgtttcttcttttgatgattgtgaaggaaagaggagtataccacccatacctaagtgtcaccctactgatgttcctcatttccatggtcaatctcaagcgctaactgctcctataccaccatggatgatgcgatgttcttctaagaagcatttactgccaccttctgatccacctgatgcttgaatcccagcaaagtcaagttattgactataaataagcgcttagtgggaggcaacccactggtatgatttttttctttttctttttcctttatttacgttttttccgctaacttcagatttaaatgccactggggacagtgacgtttaagtctaggaaaggtagttactaactacgtttttcttttgagtcttattcttcctcttattttcttatttttgaatcgttttactgagtcaaaatctagttaggaataatgatctctattctttagtttattgcctggttgattaatgctgcagattcaactcaatttgactattggaaaagatggcaaaccgacagacttgaggatatcctactttgcaacacaatccattaaggctggagctaatctcacggttagtgtttaagaac

SEQ ID NO: 161291 - DNA, 620 bp, Arabidopsis thaliana landsberg
aggaagtttggacagtcacatggtaactttagtggcaactgattacagggaactagagttctttaggtttcatctcttaacctgccttccagaagtcctatcctcagagcaactttactaggacttatggtaattctttttaccaaattcctcctccaccctctagtgagagtaagatggaatccatgcttgaacagattctagagggacagtccaagttggttgtgggcttcaatggaaagtttaacgctatctacacagatcttaatgggaagatcgacaatctgagctctcacatgaagaagctagatgttcaggtggctcaaactactcagtctatcaagagacaagagggtttccttcctggcacccatgatactaatccaaggaagagctgtaacgcgatcatggtcagatctgaagaagaaagcatgaaaagggacgtgttggagctcgctgttgtagagttggtgtcgaccgacacacatcagtgtcgatcaacacaaggcaatccgatctgggacgaatcaaatgacaagacaatgtcaaacaggaacagaaaggatcgttcatcactcgacggtgtcgaccgacactcatctagtgtggatcgaacttaa

SEQ ID NO: 161292 - DNA, 939 bp, Arabidopsis thaliana landsberg
tcaggtcgagtgacagtccagctcgggcagctggacgagtgacggatgagctcgaggtagctggacgagtgacggacgagctcgaggtagctggacgagtgacggacgaactgggcggttatgggcgaagagatacaactcttcggaaaggtgcaactcttcggaagggcgcaactcttcggaaaggtgcaactcttcggaaaggtgcaaggaacggatgtgttgattcgggaagcatccattcgccccttatataaggaagggcgcccaggaccattccacacacgacaacacaccgaaaacacaagaaaactcaccattaaaactctctccctcttgggagaataaatagtcttaggattcggtagccgggctgtggccggcaataaagaaggagggtcggatcgacctaacctcgagaaggaaggtaagggatcctagactttgagtctaagggttctaggatgtgagttagtagtcggatccttgaaaggatcgactagagggctgggtagtatccgggtcatgtgcatcctacacaagactcggtccgggtagggatcggctgaggcggggacgcggctcggcggaggaccggcgggtcttaactgacctgccgagaatcggccggactgatgcgcgatcttcccctctctgaatcctctccacggatccgagtagtgtatggcatatagagcattgcatggacttgcatatgactaagtaaatgagattacttatggctctatgactttcaggaacgaatggtgatcgtgggaaggacttggcttaggcgcgagagactcaaggccgggatgatgggtggtgatagttcggatagtctagggatcgattatatgacttgtaatagcttatatgcaaactcataggttgtatcgaatcctttgcttaatcaataaagtatctgattgtttgttt

SEQ ID NO: 161293 - DNA, 888 bp, Arabidopsis thaliana landsberg
gttattgagatagatttcatctttttgatgcgatgtcgtcagtttctggctttgcttctatgtgggagctatcttttctctggggatttgttgctgttatctaatgtatgattcatttttacgtttttttcagccactgaatgggtgaaaggcaaagctatggaggatgttctgaccatcaaaaacacgtaagtaccgtctgtttctattcattttatgcagatattaacataatctgttgtgagttgttgtgttatgccaatcagtgttgtctaattggttaaactcattaaatgttgatataccagttactgtatttcatgactgttatattgttttgaggaacttggtcactggactttgtctgttggaacaatattggttgctggttagtatgccctgtgttcctattcatgttttgcagattttttaacataaatatgaacactcgtgttatctaattgctgcactcattgaatgttgacatacctgagccgaagtaatgtgattattttgtttagatgaacttagttactgcattttggtcagttggtctcagattggttactggtttggtttgtatggtatttcaggttttccagcctataatgatgcagacctcttgacttctttttcttagacaaagtaaacattgtgatttctgtcatggagtttctcaatatctgaagacttactctgaatgtgtgcttctctttctgtgatttattttgccagctaaatcgcaaagcatctttctctcccaccagtcaagctccactgcagtatgttggcggaggacgctatcaaggcagctgtgaaagactacaaggagaagcgtgtgaagacaaatggtgctgcagcagcaggagaaaccacacaggcttgatt

SEQ ID NO: 161294 - DNA, 1101 bp, Arabidopsis thaliana landsberg; identical to SEQ ID NO: 26218

SEQ ID NO: 161295 - DNA, 755 bp, Arabidopsis thaliana landsberg
tttgatacaatggcgtctcagagacatttaaaagatcttcttgaagaagatcaagaaccgtttcagcttcaaagttacatctcagaccgacgttgccaaatcaatgctcacgtaacgcatttacaggtcaagaaacgcagacccatctctcaaaacgctggacttccctcgcgtttctgccgcaacgcttgtttcttctctctccgtgaatctcctgacccgaaaaagtctccactcttcgaactcaagtcaccaaatcggagccaaaacgcgattttcgtcaatataccggcgagaactgcttccattctactagaagctgcggttaggatacagaaacagagttcagaagtgtctaaaacaagaacacgaaacgcaggaaacgcgtttggtatatttgggtcagttctaaagaagctaacgaaccggaagaaacgcgaaatcagcggcggcaaagaagctggtcgcgtttcttcctcttctgttaaagatatgttgagatgggaatctccggttgtacgtaaaatagtcacaagaaaatccaaacgtaacgaagaagaaaacgcttcttcccaaacgcataaaatcgcgtctgaaacgcatttctcacggaggtcaagtagtagtggtgtttggtcagagagtgttacgaacggagagagatcttgggacgttgatttcgaaacgtcgattagcaccagcagccgatctaacggttcagatgagtttgcgatgatgatgaacggacaagaatt

SEQ ID NO: 161296 - DNA, 3081 bp, Arabidopsis thaliana landsberg
atgggcgaccttttggtgtatttggatgcacttctccttatgcttcctcgaacaccattcccggtcttgtccgatccgtctcctcgttagatccgatccgtctgtctaatgatcggtctaccagatccgattcgtctctaagacgatcagtctaccccatccatccgctaaactccatcaaaccgttagaccgggaggtagcatgcacattagttcgatcgagttatactagccgagccgtaccttctttccgaccaacaacttcgtggtgtatttggactatttgtgatgtgtggtatttggatgttgtgagatgatgtgagatgccttgggcgtcctcccttatataggaggcgaatggatgcttcccgaagcatcacatccgttccttgcacccttccgaaaggtcacatccgttccttgcatccttccgaaaggtcacatccgttcctttcatcctttggcgatgcaaccattcgttggtacccgctcgaccttacaccttttggccgagacaactcttcatccgtgagctaccacagtccacaagctcgagtgtcagctgaccggaccacccagctgggtcagtactcgatcagttcactgagctaagtcgagctgtcggtcagctcacctagctgagctagctagtcttccagctggtttagctcacttagcttagctagctagttcatccagcttgtccagctcacctagctggttcagcttgaacattctcgttctttcgactaagtattttgattcgtttcttgaccatggtctagttttctcctaaaacaacctggcctctttatgaacgcgggacgcggtcgttacagtacccttttgagagatatatgaaagtcctcaaagattttgtgagaaacacagcaagacctgaagggtgtattgctgaatgttacttagctgaagagtggatccaattctatagtgaatttttgaagaagacaacaaaagttcaggaaaaggcagatagaaatactgagtatgagaacaactctatccttggagggcgtcctatctctgcaggcacctttattagtcttacagaaatggagagaaaaatagctcatttggctgtgatccagaatatggctgtcgtcgaaccttatgtagagtaagttacaatctatctctctttctattacttttctatattgcttttcactttctgcttctatgaatgctgattctgaattttgttttctctgtttactagtgagcacctgcagcttctacaaaacactaatgggagatgcagacgtgatgcgtctctgttatggagtatgcacactcaaaattttgcatcttggcttaaagaacaggctagcaatagatataagagcctgactttttctatttttctttgatagatacatcttgattcaagtactcatggtgaaacactgaaatggctggcttatggtcaacgttgttgcgcaagatcatttactggttacatagtgaatgggcaacgatttcacacaagaacagttgacaggaaaacacaaaatagtggtgttttctatgaagccacaacagtttgtaagtctagtgcaaaggataaggaacaagtggtggatttggtgcagtattatggctgcataacagacattatactgttggactataatgtcttctatgttcctttatttcgttgcaactgggcagtaaagggcaatggagctaaggaaaaagaagggtttacactagttaatttgaatcatagtcaagtctcctttttaagggatccgtatattatggcttctcaggcaaaacaagtgtttttcctgcgtgaagatgactcatcatcttggcatgttgcaatgagaggtccgtcgagaagatttagagagaaagagagtgacgatgttactcttgacattgggccattgccaacaacagttgacatcgatgttgacttggaagtagcagagaatgagagaagtgattgtgaagggatttatgtttgaaatgtagaactttgttttaactttgagtgttgattgtctgtctgttgtgtttgttgattgtatgtctgttgtgtttgtcgattgtctgtctgttggtttaatttgttgattgtctgtctgtttttagtgttaattgtgtgtctgctttgagtgctgatttaattttatccttttttctcaggtgatttacaatgggacaacagaaaaaaaagcgtggaagacaacctaaaaaagctgctgctaagaaatgcaatgatcaggtggagtatgtgggtacaattgagccaacagctgtagaacaaactgttgttccagcagaaaacattgaggaagttgaagacatcgatggagagacagaaaaagaagttgaagacatcgatggagagacagaaaaagaagctgaacacatcaatggagagacagaaaaagaagctgatgaagacatcaatggagagacagaaaacgaagctgaagacattaatggagagacaaaaaacaaagctgaagtgcaagtagcagaagaacctgaaggcgagcttgaattatctggagatgaagatgttgttcaacctaagaccaagaggcagcgtggaccaactaggatgaaagatattgctaaggatccaaatgccagagtgagagtggagtacaccatgatgggagagcctattggtaaaggctcagttaagttagcatcatatgcaggcgcattggtccgtgaacacgtccctatcacaattgatcgctggacaaaaataggtgaagaaatcaggacacttctctggaaacctgtccaggtaacacttcactttttatttttttgtaatatttgactatctttccttatcacagcaataatcactttttctgtaattgattgaaggcaaggtttgaactagatgaggagtatcaaaaggttgcagtgcttaagcaaatgggatgtttgtggagatcctggaaatcaaggcaagtaactaactttagagaagcaaagacaaaccagcagaggatgaatctgagacctaaaaatgtttctccatttgagtggagaaaatttgtgaagagcaaaactaaccctgaatttaag

SEQ ID NO: 161297 - DNA, 550 bp, Arabidopsis thaliana landsberg
gagattagtcatgaacattcttacaggttcttttctccaacaataaactgcttagcttccaatgcttgcaatcttcacatgttatgcttgtccactggtaatatatgtcttctcatactttctaggttggtgtattactttccttttcaaagttgttgaattggtcaagtactgagaaaattctagtttcattgaagagaagagattaatgtctactaaagttgcagattaggttcccttatagtaaaggtgaatttattttgtttcaggtaacgctgatggtatgggaagcattaggaacaatgagctgcatcgggcatgtgcggtgctcaaggtaatccattttgataaagaagggatctattataatgtttcttgtcattgcagtgaagaacatgtttttgctaatagatatattgaacacatgatgtaggttccgcttcaacagttcaagattctgaaccatcctaatttgcaggaaagaatctattatatctccccagtacatgtgtatctctttatacatcgtcgcattgggggacaactcgca

SEQ ID NO: 161298 - DNA, 2737 bp, Arabidopsis thaliana landsberg
ttcctcttctttctttataattttcttctcagagaaagagaattaatagagagagagatcatgggagatgaagatgttgatgggaagtgtagaaacatgtctgcatgttcctcaacgacgtcgtattcaactaaactctttctattcatggttcctcttgttgtcatttctggtttcgtctttgtaaatattggtcctaaagattcaacttctttattaacctctctgtccactactacttctcatcttcctcctccgtttctgtctacggctccggcaccggcgccatctcctctgctaccggagatacttccctcgttgccagcatcatctttatcgactaaagtggaatctattcaggttagagaaattacttaggaataccaaaattattcctttcttcattcttcatctttgcatgtcttttttcttttccggctattttatttatttcttttctgttcttatttgttactaacaaatacttatgttaatgttttaccaacagatatcataacatttatgttttaaattccgtggtcaaactacagtcaactgtaaaaaatattttgtcaactagtcaaatgtgaattttaattcgtttttattaaggacgagagaagcagtcgcataaaaaccgcaaaataagaaagcaaagattacagtttttttatatatgtagggtcgggtgatataaatttgaactaattaatcaaccaactaatgttcatatagttttgatttcttttaaagtgatttatttactgatatggaaccattctttaatttcatttatgtacaatagtctagagaataacaatgattgaacagggtgattataatcgcacaattcaactgaatatgatcaacgttactgcaacgagtaataacgtctcttctacggcatcattggaaccaaagaaaagaagagttcttagcaatttagagaagatagaattcaagctacaaaaagctcgagcctccattaaagccgcttcgatggatgatcccgtggacgacccggactatgttcctcttggtcctatgtattggaacgctaaggtctttcatcggtaagtgaaatgaataattatgtttactttctatatttattattctgaagttactgcaatttggattcgctaagaatgtatctgaattaaatttaagttacacggtttggaactgtgaatttattggttcgtcaaaaatgtatttgaattaaattgaagtcaaacaggttggaaactatgaattttatttgaattaaattgcagtcatccaggttggcagtgtgaatcataattatggcttggacatggatttactttttaataatatgatggggaaacctggccaggaagtttcaattaagtttgagttacgtttttagtaggtttttatatttaatttcttgctaaatactagtagtagtttgtttccattaaattagtaaatgcaatagatttgtggtgtcccatcttatatgcgtagcgtaagcagagcaaggaatctcataccttatttttttggagggctaaatttctaaaatcaaagaatattattattggcccatcttacatggtttacaaaagtaaggtaaccaatgatagcgtaacttgttgattgatcgtgaaacccatattatcttagacaagacattcgagcatgtgcacaaaaatgttttcatgtggtctagagtagagagtgaaacagattttcttttgacgatttgctaacacgaccatgatgtggttacaatgttttgtttatgtattgaaatgtttaggagttacttggagatggagaaacaattcaagatatatgtatacaaagaaggcgagccaccgttgttccatgacggtccatgcaaaagcatctactctatggaaggaagtttcatctatgagatagaaaccgatacacgttttcggaccaataatcccgacaaggctcatgttttttatctaccatttagtgtcgtcaagatggtaagatacgtgtatgaacgaaattcccgcgatttcagccccatccgaaatacagtcaaggattacatcaatcttgtgggtgataaatacccatattggaaccgcagcatcggagccgatcatttcatactttcttgtcacgattgggtacgctataacaatatatttggcttatatcttctggttagctagttatcgctataatcttgaaattttttggtatagggtcctgaggcaagcttctctcatccacatctaggacataattcgattagagctttgtgcaatgccaacacgtcagagagattcaaaccaagaaaagatgtgtcgataccggagatcaatctaaggacgggatccttaactggattggtcggtggaccgtcaccttccagccgtcccatcctcgccttctttgcagggggtgtacacggaccggtaaggccagtcttgctccagcattgggagaacaaagataatgacattagagtccacaagtatctccctagaggaacgtcttattctgacatgatgcggaacagcaagttctgcatttgtcctagcggttatgaggttgcgagcccgaggatcgtggaggcactttactcgggttgtgtcccagttctgatcaactccggctacgttcctccattcagcgatgtattgaactggagatcgttctcagtgatcgtttcagtggaagacataccgaatttgaaaacgatattgacatctatatcgccgag

SEQ ID NO: 161299 - DNA, 505 bp, Arabidopsis thaliana landsberg
cctttactcgtttgtagacaatgtattttagttatcagaaaagctgctaaaagaaactgagtaggtgaatgttgttgtgtcattatttataagatggtttggtttacgtttttttatgtatttgtgatagctacgagatggatcttcccatcagggtgctgtaacgtcaatggaaccgaacgaaggcacctttgtgcttcacaatgaaaacaacactaaggtaaagaaagatcttcactttggttttgttcaagaatgtaaagtttttaagggacttgaaagatattgcctctttgtttgatagaaaggaaaagtaaagcctgttcatcttattgatgttcctggacactctcggcttatatctaagctagaagaatacttgcctcgagccgccgctgttgtgtttgtagtagatgcattggagttcctccccaatatccgggcagcttcagagtaattcaaaaccatataaaagatgatttgcttaggcataagtgattgtaga

SEQ ID NO: 161300 - DNA, 972 bp, Arabidopsis thaliana landsberg; identical to SEQ ID NO: 21264
  unsure (1)..(972): unsure at all n locations

SEQ ID NO: 161301 - DNA, 1444 bp, Arabidopsis thaliana landsberg
  unsure (1)..(1444): unsure at all n locations
cactcatccgtgtgtcgtaaacatcttccaatggtcagcttcaagtggtaaaggagctactgagaagccatataagtcaactgattctaaggccccagctttgaactatgttgacatccctcattctcagatacgaaannnnnnnnnnnnnnnnnnnnnnnnncctttaagccagtttcaataggttcaacgattctgaaatctcgttcgttaactttataattttgacaggtcacagcctcacgtttggcattctcaaagcaaactatccctcactattacttaaccgtcgatacatgtgttgacaaacttatggcgtaagtataaaggtttggatgatgtattttgagtcgctgtcaatgggtaagctaaactaagcgaatttgtaaatgcagtctgaggagtcagcttaattcattcaaagaggcttctggtgggaaacggatatctgtcaatgatcttgttgttaaggtacatctttcttgtgtatactttacatgcaagccaacagatcttctaaaatatcctactgatatcatgcgtttttaggctgctgcattagctctcagaaaagttcctcagtgcaatagttcatggactgacgattacatccgccagtaagtacattgacaaacttttgaatatgattgtggtagcaaacattgtaacctttctctataggtttaaaaatgtgaacatcaacgtcgcggtgcagacagaaaacgggctgtatgtccctgttgtgaaggtgtgttcaaaatagtgtttaacccttggctgtagcacaaacttcagattgctgaattatataaatttcttgattccaggacgcagacaggaagggtctgtccacaattggagaagaagttcggttattagctcaaaaagcaaaagagaacagcttaaagccagaagattatgaggtgagagaattcattatcttactcactaatcatatctttcagtaaacatgctaataatctcgttttctcagggaggaacatttactgtctctaacttgggaggaccttttggcatcaagcaattctgtgcagtcgttaatccacctcaagccgccattctagcagttggatccggtatgctctctctcaatgcagaagagagtttttttactactttaccaaagatccaataaccgattcgtgttgtgtctgattcttaaaaaaaaaaaaaacagctgaaaagagagttgtccctggtaacggtccagatcaattcaactttgcttcttacatgcctgttacactgagctgtgaccatcgcgtagtagacggtaatccagttcattcatcatcattgattcattcattcatcatcattgtagaaatctaatattcttcttcttactgcaggtgccattggagctgaatggttgaaagcatttaagggatacatcgagaaccctaaatctatgttactctaa

SEQ ID NO: 161302 - DNA, 1012 bp, Arabidopsis thaliana landsberg
atgagaattgtttcggaacatgattgtcccaaaagcgtcgaagggcttagctatgaccctgaacctaacaggagtttcgatcacttggtctctgagaccgagtcttttgaaaagaagctcaatgcttttacaaagtttcatcaaccattcactaagacaacatcaaggacggatagagcattcgtaatgcgtgtatcaaaagatgatatagatagtgatgatgaagatgtagagaataatgatcaacaagacaaagaagaaagtcaaatctgtacctgtgatgatctatacttaagcgatgatgatgagtttgatcatgaacttcagtataccaaaagtacggaagatattaagaatcaagtatcagttgttgaaaaggaaataaggaatgagattgaaagggctctctctgcaatagctctggttgacaagtaccgcgaaaaccgtagagaagttgaacggagtcttgatcttcaatataagcgagaagttgctgaagcacttgagactcatatgaatgcagtcaaacgtgaacatgcaattatatcgtatatagaagaaagaaagataaggagagaagaagcttaagaggaagccaagaagagagaaagggcaaatcagaaagagaaaaaggaagtgaaagagagagttagtgttgttgctttgtcattggagaagcatacattgaagaagcttgaagagttagaagcaatgaaccaagagctgagatcacgtttaaatgaggacttcaggagttttgaacagagtattgcagagttagttcagcattaccagaggaatgattacatagactgctattgattttgatgtatacttcagtttttgtttatggcggtttcaaaatgaatttgctaacatttagtgatttgaacaatttaaacattcagaagaacacatatcataaatcaaaatatttgacaaattctactggttacagataaactcttgaacttgatattaaaggtaccgagcatgactatttaattatcat

SEQ ID NO: 161303 - DNA, 382 bp, Arabidopsis thaliana landsberg
tttttgtttccgtccaaccgttaccgaagcttttggttctgttcaatatgtaatgcctggagctgactttggttcgttaaccctatcggggttttttttagccgttttcccgaaattggtgttccgtgacaaagtctgatggtcctaatgatgatcctgcgcgttttcggtgtatgcctccccggtggtatttacggtaccctcgcgaattaacttccgtttctggtgtggttctgggtgcattgaccgcgtcttttggtgtacccggttattctttgccgttggatcaaattggctattgggcggtcatacttgtgccaggtgcacctgccgctattccggtaataggatcaccgctctagggttatgccgcgggagtgcc

SEQ ID NO: 161304 - DNA, 1942 bp, Arabidopsis thaliana landsberg
acaaataaacgaatgcgttgagttatctctaaattcattttgctactcaggaaaaacagaacattctaaaggcaaaagcattgtgttacccgttgtactagcatcacttgtagcaactgctgcatgtttcgttggtttgtattgttgcatttcttcaagaataagaagaaaaaagaaacaaagaggtgagattggttttagcattttgcataatcactatacaagatttctcactagtttctgaaacacgaattatacgcagacgaaaaacatagcagagagctattagaaggtggcctaattgatgatgctggagaaaatatgtgttacctaaatctacatgacataatggttgcaacaaattctttctctaggaaaaaaaagttaggagaaggtggttttggtccagtctacaaggtattattaacaaacaatacaattaatactgagcttgttagtttgtttggctaaaggtttaaacaaagtagctacagtttgaatatcatcatcgttacaatcttactatagaaactttgatgggcagggaaagctaccaaatgggatggaagtggcaatcaaaaggctttcaaaaaaatcaagtcaaggtcttacagagttcaagaatgaagttgttttgatcataaagcttcaacacaagaacttggtgaggcttttaggatattgtgttgaaggcgatgagaagctcctaatttatgagtacatgtcgaataagagccttgatgtgttactctttggtgagtggtgattttgaatttgaaaccataagtatcggatgagtgttgttgacatgtgacttctcatcgtttcgtttaggggaacatacagattcctttaagtctaggaaattggattgggagacgcgtatgaaaattgtaaatgggacgacaagaggacttcaatatctgcatgagtactcacgtctcaggatcattcaccgagatcttaaggcaagcaatattctacttgacgatgagatgaatcctaagatctcagattttggaaccgcaaggatttttggttgcaagcaaatcgatgatagcacccaaagaatcgtcgggacattgtaagtgtacatctcttatagttagttatgtatccacttgtttcaaacactaaaatgttgagtttaagtttatgtttctcagtattataacacacatactttttttttcattcctagtgtctttgcaacttatttatgaatgatgtttgaaaaaagtaaaacattgtgctgacgtaagcccatcctttttacatgtcaatgcaaaggaaaaaacaatcactacctatgtatttacattagaatctttggattaaatttcgtaagcggttgatttcagcggctatatgtcaccggaatatgcattaggtggagtgatttcagagaagtcggatatatatagcttcggagtgttgttattggagatcatatcgggtaaaaaggcgacacggtttgttcataacgaccaaaaacacagccttattgcttatgtaagtgtttctgtagttcaatatcatttatctaccatacataaaaacgtaacttaccttagatcaatcccaaactatatgttcttgatcatcttcaggcatgggaatcttggtgtgaaacaaaaggtgtaagcattatagatgaagcactgtgtggttcgtattctttagaagaagcggtgcggtgcattcatatcgcacttctttgtgttcaagatcatcctaaagatagacccatgatttcacaaatcgtttatatgttgagcaacgataacactcttccgattccgaaacaaccaactttctcaaacgtgttaaacggggatcaacagctagactacgtattctccataaacgaagcaacgcaaacggaactggaagcgcgatgaacattaacaatacttggtaacaatgttgctatcctgcttat

SEQ ID NO: 161305 - DNA, 1899 bp, Arabidopsis thaliana landsberg
gtggtataacggaaaaatcctacaattgacgggtttaaatcaatattaatacaagatggtatactacatgtgaaactctaaaattaacaatcaaaatacaagtatataattttaaacactaaacaatataaataatatcaacaaaacatatacaactcgtagtttactatacatttaaaatcaaataaaataatatcatatatttataatcaactttacaataaaagtttttagtttaactaaaatataagcctacctgctgtataatgcaagttaaaattataaataagcagattaccatcacgatgtttgtaccttctcacatacacacctatcaaaaacttaaaacctttcaaaatctcttggtatattcaaattaggattcttcattcatggaatcattattccaagggttttgggatgtcttatgaaatgattttggcagaagaggatgtaattttttttaataaaaagtagtcagcaaaacatatgtttttttgggagtttttagataattaaatcagagaataaggttgggcatatgagtaacccattcgagttcgggtagaacccgttcgggtttgggattaatgggtatataatttactacccaatagaataattctaaatattcggttctggttcgggtcggatccagttgggtttgggtcagtttgcacaaaacgtttcagaccctaaaaataccaaaaaaatagaaacgagaaatttgtatgtagaaagcgggtctccaaacaaaaaaaacttttaaattttattaagttttaataaatttaattatatttgaatatattttactaaattttgacaaatataacaaataattttgacaaacatagcaaacataacaaagtatacaatttaatttatacaaaatattaatgtccgtgttgtataacacgggttatgatctagttgaagtttaaaggatatccgtgtatcctttgttagtgatgtttttgtttgccactgcaatcttgactttacgagaaaattgaaacttaataattggtttctcgttatgccaaagatacagtcaggaaaaaaatatatatatagtgagaggtactaaaccatttggctaaagagatcttgaccacaaaacaacatagctatttatttttctcgtttggtcactgttggtactgggcctcaccggcccattaaaaccatttattcaggccaggccttatctcatgaaatagtaagagagcggctgagcttgtataacgtaggcccatctgtcagcctctcggctattcaacgacctcgaggagcgtgacttcgggaacaagaataactgatcacgagatcataggagaaagatccggggaggcggagaggtcgttgagattctcggacatatatgtactacaaggaattagcaacttaattcggcgactgatttagtaatcgttaaatttggcgattgcatagtgatgtattggcgactgataagtctatattagacattagtcgctaataagtctttaatttgaaactgatgaaaatagtcgctgatacgtctctattctggctactatttaacaagtcacatattctatttggacatttaattgggcttttatcggcttgatccagtaacgagccagtaacgagatcccatttcccactccatgagaattatctatggggtaagactgcttttaagattcttagtgattcaattcatgaggtaaaagatgatttctgtaatcctgcttacgccaatgatggtttttgtccaagttctctaaatatggggtatgaggttgttccgatgattgccaataaagttaaagctcacgctgaaaatgcaatagatggttcatctatattaaagtggaagggatcttgagcaagaattttctattatgtcca

SEQ ID NO: 161306 - DNA, 1150 bp, Arabidopsis thaliana landsberg
atgagttctaaacagtctcccgtcgatctcgagcgcttctcttgtcgattctagcgattcaaatcacccagatgaccttccttcgatctataaacagagagcagtttggacgtcttctgaagaggattatgtgtcttcttcgagtgcctccgagcagaggggctgtgtcacggctcgggaagataccaatgccgatattgctagggaattggatttgcccgatgatcccgagttgcctctcgttcggaggccccttgccccgatggctgatgaagccatgacatccaattgacaagatgtgcccgagcccttaatgccgacgataaagattgaggactttctttatttcggcccgaacgagacataagacattctgcgtcttaacgagcagaggacttttgagaaagccgagaagaagaagaggaagaagaataaaaaggcgataatgcgggatcctcctggctcaacattatgcaccgagcggtctctttcggatctcagggcccgattcggtcttggtgcagtaaccttgcgtgtgtagagccctgatgagcgagccgacaatccccctgcgggtttctatactttgtacgaggggttcttttatggttgcttcttgtggttgccagtcccaaggctggttttggagtacgtgacatcgtactagattgccctctcccagatcacgatgcggcccttgagacatctgctcgggattttgattcggagttatgaatctgaaactgaaattacgcttgctcatctaaggaattttctcgagattcggcgggttccaaaatccgaagtggatcggtattacatatctcctgctaagggtaagaaaattattgacgggttcccgagcaaggatgagtcgtataccgacaacttcttctacgtggctctcggagatgttgttcacaatgttcttctcgggacggttctgacgagatggggaactttgggtagttgtagttagcgatctatttatgtccgacgcgatttatataatttgtttctttttcaaactagtttttcctttgttgcagaacgcaccctcaagttcctcgagccgattcctgacgatttcctctcagcttatcacgcgttatcagctcggaagtgtgattggtcgaaacatttctctcgg

SEQ ID NO: 161307 - DNA, 1468 bp, Arabidopsis thaliana landsberg
  unsure (1)..(1468): unsure at all n locations
tttaacatttaactgtgatggttcagggcaaactgcggtgaaaagatggaagagtttctcaagagatgtttttaccattcgggtcagtatgattctcaggaacattttgttgcattggacgagaagctcaaggagcatgaggtattgatgttttcctcagcttattgtttttttctgcattcctcatgaattccttgcaaccacattgcatcattgcctcatttttctgaaggctaattgaggtcatgagttaccttggtaggtgtaaggtgatatgttgtagattatggcctgaatacagaattaggaaaactattgttgtttctgaaaaattagtaaaaactagaaaactttggtcttcttacattttttctttcttatttgcccttatccatcacataactatttgcagggtggaagactttcgaaccgtcttttctatctttcaatccctccaaatatctttgttgacgcggtgaaatgtgcaagctcatctgcttcatctgtcaatggatggactagggtcattgtcgagaaaccttttggccgggactccaaaacctcggctgcattaacaaagtctcttaagcagtacctggaggaagaccaaatatttaggtggagagatcgtgtttatgttattgtaaattttagtgatgatggtttaagataccttgctgatacgaaaagttgatttttacaggatagaccattacttagggaaggagctggttgagaacttgtcggttcttcgattctcaaannnnnnnnnnnnnnnnnnnnnnnnnnnnnagtatataaggaacgtgcaattcattttttctgaggatttcggcactgaaggacgcggagggtaatcattgttgtcctctgtctaatattttatttctcatgtgtgttgaagcctatgttttgacacttttctactcttcaaatccaggtacttcgacaattacggaataataagagatataatgcagaatcatctgcttcagatattagctcttttcgccatggaaacacctgtgagtttggatgcagaggatatcagaaatgaaaaggtctcctattgttccctttcttataattttgttgatttcaaggcagtattttgaggtcctcgcattaattcaggtaaaggtactacgttcaatgagaccaataaaacttgaagatgtggtgataggacagtacaagagccacagcataggaggagtcacttatccaagctatactgatgataaaactgtgccaaaaggtagtctgaccccgacatttgcagctgctgcactcttcatcgacaatgcaagatgggatggtgtaccttttctaatgaaagctgggaaagcactaaacacccgaaggtaccaaactttggaattttttttgcaaattttctggtttgcttgtaataatataaatatatctattgaaacagtgcggagataagagtccagttcaggcatgg

SEQ ID NO: 161308 - DNA, 1116 bp, Arabidopsis thaliana landsberg; identical to SEQ ID NO: 17205

SEQ ID NO: 161309 - DNA, 3084 bp, Arabidopsis thaliana landsberg
attcaggaaaggatttcgaacatgacgcaaaagttctcggatgtggagaaagttgctaacacactgcaaacaagccagatatctcttagcccaaaacgttagtactatacaatctcgtgttcggtctttgagtacaagaaaccctctaggagtccgaaggagcatgttcagtttgccggggtctcataccaagaatggaaccagtggccagactactcctgatgctacaaatatagtaactcaatcggaggactcggaaacacaattcggagatgatgtcgactagcagatcaactcgagcaagagaaccctgagcagttcgaagctatgaaaaaggttagccgcaaatacaaagaaatgagatcgaagttccactaggccaccagtatggagccaaacatcgatcgagttattgaagaaactaggcgaacccctttcacccctcaaattgcaagcttgaaaatcagagattctcggaagctcaatcttgaaccatacaatggactggaagatcctaagagttatctcgcagctttccttattgctgccaaacgggttgatcttgatgaagacgaggaggatgcgggattttgcaaactcttctctcgaaaatctgtgtggacaagcattgatatggttcatccagttgaagcaagggtcgatcagtaattttaacgagctgtcagctgtgttcctaaagcagtactccatacttatggataaaagcacctcagacaccgacctatggaatctattgcaaggaccaaacgagtcacttcgtgctttcattacaaagttcaagggcatgctttccaagctcccaagggtatcataacagtcagctttatccgctcttcggaaaggtttgtggcacgactcaaggttcaaggaagatctaatacttcacaaaccggatatgatccaagatgccttgttccgcgccaacaactggatggaagtagaagataaaaaagaaagctttgcaaaaaggaatcgacaagcaaaacctgcgatcacattccctacaaagaagttcgagcctagagaataccacggacccaaaaatttcggagtgcacacctccaacaacaacgtcgggaagcaattccaaaggaaagggaagtctaacacgtgggtccaagatgaaagtttgtattgtgacatactttgagtgaccaggcacgtgggtccttgaaaggcatctcgcagaattatgggcaagcgaagattctaagttcaacatagaagatttcgttaaaaagtatcatgaggcaagagaaaatcccggagctcaaaatcctatcgtaaaaaggccaaggtcatccaacgaagaagaaccaaagagctcaaaagggaagatcaatgtgatccttggaggttccaaactctgccgagattcaatcagtgttatcaaaaagcataggagaaatgttttgcttaaagcgagcttaagtatacatagatgatatgttggtcaaatcattgaagaaagaagaccacattcagcgtttagaagaatgttttgaaattctcaatcaataccagatgaagctgaatccggcgaagtgtactttcggagttccttctggggaattccttggttacatcgtgactaagaggggaattgaagtcaatccaaaccaaaccaatgcttatatatccttatatttacatgttttaactatgttttaggtataggttttggagtctatttgttatttctagagtcttttgaaaagactcttttctagttctttttcaggtctttacatgcttggattcatttggagataatgaagaattctaaagaaaaaccgagaactaatgctgcaaaagaaattcgaagactaaaaatcatgtaggtgtcggtcgacaccacccctggtgtcgagcgacaccaatacctgacggcaatttgaagaagcaacttaatgaagttttgaagatttccaaattcggttcagaactttcccttatttctaaagaaggcccatcacgttttaggtcacatatatatagattttaaggtcattgtttatacctaagttttgttttaattgagagagactctttttgagaaaagaatccaatccctgcagagaggattctgaactccttttactctccttcttattattcaatgcaatctatttagactttgatttgtgtttctttattcatgtctaagtaatcaccttgttgggtttagggagtctcaatagggatttagatggattagtagatcgaaaaccccttaggattattcttagagttcttcatcttgattgttcttactgctagttttaaattgatcacgtagaaccttgatattagacaataggtattgccgccatatgtatttgttatttgaaccatcatagatgagcctaagcatttaagaaagaacaggtagggttaatcatgctcatagaagggctctggtttagatactaggtgagctaatcaagcttattaacaatgcatgttttagcataggatttctcggcttctccggttatcttagttgtaagtatagagagtttcgcggaacgccaccggttactctagaattatagtttgagtttgagaacggtgcgataacaatcctaatattagctagatctacaatatatctatttcccgagactatttcttagacccgtttacttgcttatttttcttttacattcatttactttgtctagtttatttaaaaacatcataagtctatcgtgtgaacatagagagctcagtgaaatttgacccttaagtgctaacgacgatttcttatttgagagagtaagcttaaggcaatttgagctatacaactacgtagtaaaattggcggatgtgggtaatactggtagaataggagaatacatttgagaaatatagagtaatactatggcagtactattaacaattgagtgatatatgaatgaatatttgtttgtttcatgatatggaggaagcgatggcaatgcaaccactcggtatgtacttcccggcttcagggtataccaagaagataaagttatcgacgaggtggtatatcttccgagtgttgaagacctttcatgactt

SEQ ID NO: 161310 - DNA, 584 bp, Arabidopsis thaliana landsberg; identical to SEQ ID NO: 39457
  unsure (1)..(584): unsure at all n locations

SEQ ID NO: 161311 - DNA, 779 bp, Arabidopsis thaliana landsberg
ctacgaacttcagaatctttcgtctctcttaattatttttctcaaatttctcgaaacatctagttttcttttcaaccagccaatcatgggtagtgatcatcatcatcgaaagctccacgttatgttcttccctttcatggcttatggtcacatgataccaactctagacatggctaagcttttctctagcagaggagccaaatccacaatcctcaccacatctctcaactccaagatcctccaaaaacccatcgacacattcaagaatctgaatccgggtctcgaaatcgacatccagatcttcgatttcccttgcgtggagctggggttaccagaaggatgtgaaaacgttgatttcttcacttcaaacaacaatgatgataaaaacgagatgatcgtgaaattctttttctcgacaaggtttttcaaagaccagcttgagaaactcctcgggacaacgagaccagactgtcttatcgccgacatgttcttcccctgggctactgaagctgctgggaagttcaatgtgccaagacatgtgttccacggcactggctacttctctttatgcgctggttattgcatcggagtgcataaaccacagaagagagtggcttcaagctctgagccatttgtgattcccgagctccctgggaacattgtgataactgaagaacagatcatagatgccgatggagaatccgacatgggaaagtttatgaaagaagtatagggaatcggaagtgaagagctcaggagttgttttggtagtttcgcga

SEQ ID NO: 161312 - DNA, 1166 bp, Arabidopsis thaliana landsberg; identical to SEQ ID NO: 2830

SEQ ID NO: 161313 - DNA, 1183 bp, Arabidopsis thaliana landsberg; identical to SEQ ID NO: 6680

SEQ ID NO: 161314 - DNA, 1462 bp, Arabidopsis thaliana landsberg
tatccgacgcatcgtggctatagttgctgcacttattacagttattgatgacatctactatatttatggtactcctgaagaacttgagctcttcactgctatggttcaaaagtaaggactctactgcttatatttattctgaattttctttgtatataattacaattacataacattatatttaaaataatatagtatacgatgtaaattaagtgtgtttaatatatcccatattcacgttttaaaatatatttttaagtcatagtcgtttaaaagtatatataattaatcatatatccacacaagttcacataaatatttttttcaattccatctttctattagtttttttttgtaaataaaaattatagaaaaaaatgatatgttgatgatagattattaggattttaatcagctatttttcatgatatttttagttttaaataataatgttatctaaaatatttatttgcagttgggatataaatcgtcttgatgagctccccgaatacatgaagttgtgttttcttacattgtttaatgaaatcaatgccatgggatgtgatgttctcaaatgtaaaaatattgacgtcattccttatttcaaaaaatcggtaagttcaaatttgtatttacacattatagtctgtttttgataaaaataaataattattgtattatatatgtttttgttcaaactatagtgggcagatttatgtaaagcatatctagttgaagcaaaatggtacaaaggaggatacaaaccaagcgtggaagaatacatgcaaaatgcttggatttcaatttctgctccaacaatgttaatccatttttactgtgctttctctgaccaaatctcggttcaaattttggagtctttggtccaacaacaacaagacgtcgtccgatgctctgccactgtgctccgtctagctaatgaccttgcaacttcgccggtaagtgttctctcttgtaacttcgccacttttatgtgttttaaatcgtgtatgagtatttataacaaggataatcttgtaagtaactcacaaatgaaaccaaagtttaaaaatcaactgcataaactaggtgaacgaaagtctctatatcatggcaaaaaaaggctaagcaattcatgtatgacttgacaatgtaggatgaattggcgagaggagacgttctcaaatcggtccaatgttacatgcatgagaccggagtttcggaggaagaggcacgcacgcatgtgcagcagatgataagtcacacgtgggatgagatgaactatgaagcaagaacggttgcacgcagttcttcgttactttctcgaggttttgttgaaactgcaatgaacctggcacgcatgttgcaatgaatgtatcaacatggcgatggtcatggctgtcccgacaaagccaagaccgttgatcatgtccaatccttcctcgttgatccaataccattatat

SEQ ID NO: 161315 - DNA, 716 bp, Arabidopsis thaliana landsberg
atggctcacatttggcttctaccacttatctttctcgtctgtattcttctggccgttttcaaccacaagaaacatccgaaatatcgacaggttccatgtcctcctggcttcccgatcataggaaacttacatcagatcggagaattaccgcatcagactctatggaaactctcaaagaagtatggtccggtgatgcatttgatgcttggaagagtcccaacagtcgtagtttcttcttcggatacagcaagacaagttttgagagttcatgacctccattgttgtactcgtccaagcttgtcaggtactcaaatttcaatttctgttcctcatagaattcaagaaacctcatgaatcttgaatcattgtttagggccaagagagctttcgtacaactatctggacattgctttctctccttatgatgattattggaaagaagttaggaagctctgtgttcaagaaattttcagtactaaacaagttcactcgattcaacctattaaggacgaggaggtcaagaaaatgatcgattcaattgcggaatcagcctctcagaagaatccggttaacttgaacaataagtgtcttgaattaacagtaagtgtagtatgcaggacagcttttggggttagttttgagggaactgagctcaacagtgacagattcaacaaaataggccgcgaggcgctcgagatgtatgggaagcttttctg

SEQ ID NO: 161316 - DNA, 1437 bp, Arabidopsis thaliana landsberg
agatggcagacgggtaagcccgcgaccaaacagatcgcccgcgatgtgcccgcttttcttctgatccgtgacggaccagcccgtcgatattccactgtttcggttatatttttgacatcactgcacacatggtgagatattgtgtgcgaaagactcttagacgaatgaaagaattcaacttttcccatgaacttattcgagctactcacatgtgtgtgacatatagtttttgatagttacaaattgttaggtcgttagacttggtgattctacttggttagttatgttttcctttcaaaataattcagagttcctattcttcatctctacaaaaattcagctgtcgagagtgaagaatcaactttaattcaacgactgtttcggtaagatattcgtttttgaatcaacatattgttagaatcaacctagagaagaatcaacatacagtaatttttattttcttaaaaaatattttttagttgaggtagtggtatggggtaaatattttgagaattaaacaaataaaaagaagtattaaatagttttttaaaacacaaaaataggtttaagaaatttggaaaaaaaataaaatatatcacaaaattgttctctttataagtaactcgtaacgatgccttctctttcattctctgcattaactaactccactctttaacaggaagagaccagaggaattccaaatttctattagattcacttaactttcaaatatttcctttttgggttcttcgagtttgttgaaaatgtctgagaacgaagtcaaggatcctcgtatcgatggtatcaaaactaagatccgtgtcgttccagattttcccaagaaaggtagatttctttctttccttttctttatgttcttacttaaaaataaaaaaaaaaacaaaaacaaagattggtctctccctctgtttttggttgctgagaaaattgtaacattgttgtcaccacggttaaatttttcttacacgggttgggaacttatggatacaatgcaagtgctattttcttgatgaaacatattttcatattaagcatagtaatgtgagaattgcaggtataatgttccaagacataacaacactgctgctagatcctaaagcctttaaagacaccattgatctgtttgttgagaggtatcgagacatgaacatctcggtggttgcaggtactcctatttttctagatattaaaataaacaaagcgaaaacaaaagttattcatcatcttttaatttcattttaataataaattatatatttaaacctcatgtgggcagacagatatatttaactatgttgatgcatttaatttaataagatatgaagaaaatttggcgaagttgattaatattgtttggaatcatgattttataaatttacactattgtcatagtggtatgaatgttgccacaagtgt

SEQ ID NO: 161317 - DNA, 582 bp, Arabidopsis thaliana landsberg; identical to SEQ ID NO: 22821

SEQ ID NO: 161318 - DNA, 998 bp, Arabidopsis thaliana landsberg; identical to SEQ ID NO: 32941
  unsure (1)..(998): unsure at all n locations

SEQ ID NO: 161319 - DNA, 556 bp, Arabidopsis thaliana landsberg
tggtaatcttatttttagcaaaatattgcgttagtaatattgttcatggtcgtgagtcctgacagtgagtaacctccacattaagaaaaccttgttttacaggattgttacccagagagattagggaaactctatatagttcatgccccctacattttcatgaccgcatggaaggtcatttatccttttatcgacgccaacaccaagaaaaaggtacattgatttgctctgcttcacaatcactttattagtatgttttaagactgtgttggaaaatttgattgttaatttcgtgtttttttgggggggcagattgttttcgtggagaacaagaaactcactccaacgctgcttgaagacatagacgaaagccaacttcccgacatctacggaggcaaattgccacttgttcctattcaggagacctgattataggtcttactacggcccacctctatttccaaattattacttactagtattattttttatttgaataaaatgaaaaacatattgagtgtcgccaaatgccaacaattatatatttactgtcaaa

SEQ ID NO: 161320 - DNA, 792 bp, Arabidopsis thaliana landsberg
agaccgccttcttcctcctcctgctccttgacaatctctcccatgctccgattccgaatccgaagcggctttcgaaacaaacgaaaagatcctaatcgtcgatttcgaatcacccgacgatccaacaaccggagacacaccaccaccattctcatggcggaagctctggttattcaccggtccaggtttcttaatgagtatagcgtttttggatccagggaatctagaaggagatctacaagctggtgcaatcgctggctattctctgttgtggctactaatgtgggcaacagctatggggttgttgattcagatgttgtcagctagagtcggtgtagctactggtcgtcatttagctgagctttgtcgtgatgagtatcctacttgggctaggtatgtgctttggtctatggcggaacttgctttgattggtgctgatattcaagaggttattggtagtgctattgctattcagattcttagccgtggcttcttgcctctttgggctggtgttgttattactgcttccgattggtgagtcctttcgatactctattcgttctttagagatgttggattcgtagaattagtagagacttggtttggagaatcttattattcattctgaaattgtaaaactttgcggatcatcttagcggtattgagtttgagtatggatcattcgaactcacaaatcagtagaaacttggtttagacattcatgattcaatctgaagttgagaaatataattataactttggctgttttcttgtaaaactttgctaagatga

SEQ ID NO: 161321 - DNA, 1423 bp, Arabidopsis thaliana landsberg
ctctacggggtgatgatttttttttttcttaatttttgctgttgaactaggttatttgcagagtctcttgagatcaacctattcctcaagaccactgtattatcatctacaacaactggtaatgcttctgaatcgatgtttcttttgttttctattgagactggagtttctcgtttcctctttgataaatttgctttagtaatttaatatagcaaaattgttgttagtgggataggggaagtgattaaatgtgctagtggaatgactacatctgttatctatctgaattatgcgaaaagacacatctcctgaaaccattcatctgtggagaactatgttatctatgggtatgctgcttcattcttctctgatctaaatctgtatgttttcagggaatttctacctcaagacaattgcaggcgggtgaggagcctgtatcatcacctttgtcatctccagctctgctgggtagtggaaaagaagaagagcagaagattatcccaaagcgtcagaaagttcaggctgtcctcaagtccataaagcaggtgtgttctctctaactcctagtacagttttacattttagatgatatgtatacatcttgatttgttatatgcgctatataatgtgcccaaaccttacttattgcagagtcctaagaaggtcaacttggttgcagcactagtccgtggcatgcgtgttgaagatgctttgatgcaattgcaggtcacagtcaaacgagctgcacaaactgtgtaccgggtaatctctgagatccgagtttacaaacaaatcactgttggatttcgagtgtctagtctaatctcctctccaggcatttgataactttcctcatctaatgatacttagcatacaacttgttttgttaatacaatgcttaaaggagttaaatacattatactgcaggttatccacgctgcccgggcaaatgctactcataaccatggactagatcctgaccgtctccttgttggtatgtaaaactgattctggatccctgatttccttgttttacatttaaaaagagaacgtgatattttagagagttcgccgattggtactttaaggaagcaaacatgatatgccagaacgatgtatttcatctaagcttttgatatgtgattgcagcggaagcatttgttgggaagggactgtttgggaagaaggtagcttaccatgcaaaaggaagaagcgggattatatcaataccccggtgtcgcctaacagtcatagttagagagacgactccagaggaagaagctgacattgcaaggctcaaagttcacaattttaagaagaaaagcaaacgggagagacagcttgttccacacaagctcatcgagacaagtccaatatggaaccgcagaggtaccaaagccaatcatcggtcctcagagttggt

SEQ ID NO: 161322 - DNA, 543 bp, Arabidopsis thaliana landsberg
atctttgtgtgatagctcatgacatactctatgcaatctgagtatcagggtatcgagaggcacatccacggctgcataatgaaggtaagctagttcaacaaggagtttatttatttttagtaagtttgcatatatatatatatatccactaatttgttgagacgtcagggaaatctacttttacaagcgaaacgaccaatagctgcagcgatcgccttcaggactgcccagaatttgaggtccgatcttcgttcatatcaaggtctggttcgctaggtaaaaagatctgatatacacttccactgttgtactgttttggtggtataaacctttaacaatcatgaaaaggttggagtgtgtaattaacttgcgctattgaggtcatttcaggcttagtccattcttatcttgcatttggtaaaaccaaagaagcattgtataccgccagagaagcaatgaatgcaatgcctcaatccgcgaaggctctgaaattagttggtgatgttcatgcgtttacatcaagtggcagggaaaaggtacaaa

SEQ ID NO: 161323 - DNA, 459 bp, Arabidopsis thaliana landsberg
gtaatatatgcaattaacaacacctcgatcaagatctacagggttattgtcgagctggcatgtgcctgagctattcctccctcgatctcattcgactggacattcattggttcaaccatgtcagaatatagaccgattcacactgcaattaccggaggaggtgcaaagacaattggtaagcctgaacctgataaagagaagccatatagccttacctcgagccaggagttctagacagggctacaggagcggaagcgttgggaacgagagaaccggtttctctcaaggacggcaaacactcaggcgagccatatctacgtcgctatctttctcttttcaacctgctcctgttcggtccacacttgacagggacaatctaatgcgagagacttcccaagctaatgacaaagattttggtgaacggtcattccaacgcctcatgccagagaaaaactaatc

SEQ ID NO: 161324 - DNA, 1217 bp, Arabidopsis thaliana landsberg; identical to SEQ ID NO: 8116

SEQ ID NO: 161325 - DNA, 2013 bp, Arabidopsis thaliana landsberg
  unsure (1)..(2013): unsure at all n locations
aggtgaagagctttcaaaaatataaagatgagacgataactgtcactacaagccattgaaggtaaaaatcgagagcttgaacaatttaaccaggagacaatgaccgtcactacaagccttgaagctcaaaaccgagagcttgaacaagctataaaagagacaatgactgttaatacaagccttgaagctaaaaaccgagagcttgaacaatctaaaaaagagacaatgactgttaatacaagccttaaagcgaaaaaccgagagcttgaacaaaatctcgtccactggaagagtaaagccaaagaaatggaagaaaaatcagagttaaagaatcgaagttggagtcagaaagaactttcctatagaagctttannnnnnnnnnnnnnnnngcgctacaagtatgtttacatatgccattgagtagaatcagtcatcgtgtttttctatagtcacctaaacctgccaattttccaggagttgaggttctattctaagtctatcaaacaagaaatactaaaagttcaagataagtatacagtagagtttagtcaattaggtaagtcaggacagacatatgcttcttataaatagctcaaagtatgttatatttgtgactctgtaaattttgggggtgtttataaacaaatactgatcctcagggagggaaatggtttgaactttggagatgctgcccgaaactatcacgaagtcctaactgaaaaccaaaagctcttcaatgaacttcaggagcttaaaggtaagtaatgtggatcatgcattaacatattgatgtttcaacttctatgcaacctataagttctctagttatggcttgcaggaaacattagagtgtattgtcgagtgaggcctttcttgcgtgggcaaggtgcatcaaaaactgtggtagaacacattggtgatcatggggagttggtagttctcaatccaacaaaacctggcaaggatgctcatcgaaaatttaggttcaataaggtctacagtcctgcctctactcaaggtgttcttttgtttgcctgaggaatttttcttcaatatactttttgttggattggtgtgttcttgggactaatcaaaaaaattaatatacttatgtcattgtatcttttaattcttgcagctgaggtattttcagatataaaacctcttattcgatcagttcttgacgggtacaatgtatgtatctttgcatatggtcagacaggatcagggaaaacttacacaatggtactcattcactagtatatcacgattaagtggccagacaaatgatgccactacattcataccattatcattgtttttgtccagactggtccagatggagcaagcgaagaagagtggggagtaaactatcgtgctctcaatgacctcttcagaatctctcaatcccgtaaaagcaacatagcgtatgaagttggggtgcagatggtggagatatacaatgaacaagtgcgcgatttactctctggtgacagttctcaaaagaaatatccttttttgtgctctacttacttttttttcttttgccctttcaaatttagttcctccatatgaattttggctctgttctccaactttctgtttgtgtttccattatgttgttttccttgactttcacacactagggattctctctacaactcaacagaacggtcttgctgtacctgatgcaagcatgtatcctgtgacatccacctcggatgttcttgaattaatgagcattgggctacaaaaccgagttgttagctccactgccttgaacgaaagaagtagccgctctcacaggtgctcatattgatctctgaaacaaacatgtgtttttcttttatcattctctagatagttaggtctcctagggtatttgagaaaagacaaaaataacttggatagatgattcctaatgcagcattgtcactgttcatgttcgtggcaaggacttgaagactggttctgcgctgtatggaaatctacatttggtagatcacaggtag

SEQ ID NO: 161326 - DNA, 1227 bp, Arabidopsis thaliana landsberg
ggtttatcttatagcttctgctaagcttgaagataacatattgatcgaaactgttggtataccagttcaagatgatgagaagggcataacgcgcctcaccgcttgtgtctcttcacaggtgaatttgactttcttcttgttagagatttgtttttttttggttttgcatagttaagttttattactgatatcttcaagttctgctaggttggatgtccgcttcgttgttcgttttgtgccacgggaaaaggaggcttttcaagaaatctgcagcgccatgaaattattgagcaggtttacttctatattgcctcttgttttctgcatctgattgattatgtaaaatgaaatctattagagggaagattcttatagaatgataatgaaaaaagagcatgatacaggtttaggaattgttgttttgatgccaagatgaaacacgtaggatcagatcttaagtagaataccttatgcaataatacgaagaagactatcatcgtactgtatattgttttacatcatagagacgcataaagcagtattcagaagcagttgtgtgatcccatttaagacccggaagaagaattcttagtaaaatgttaatgtggcttgtgtttacaagtgtaattttgaatgtcaaggtgttggctatcgaggacgtgttcaagcatagggtgacaaatgtggttttcatgggaatgggtgagccgatgttgaacctaaagtcagtacttgatgctcatcgttgtttgaacaaggtaacatttgccaatagccatttcctgtttcaacatggttttgtgcagaaatgattgaagttcttgctaagtatttaggcactgtaaataaattggaaagctaagacaaagacttgaccataaaaaaaagtaatgtttgaagcattaataggatagtaagttagcaactaggatgttcaaatatatgatttatttctatgcacaaacgttagttgcatattgttaaaccaataagacatagcactcactcatggtatacttttcctttacttaggacattgaaatcggacaacgaatgattacaatatcgactgtaggtgttccaaacacaatcaagaagcttgcatctcataagcttcagtcgaccttagctgtcaggtgcgtcatcactttctgattttattcatgtgttgttcaattacttaaatgatcttttatacaaatttctctcgagtattttaatggagct

SEQ ID NO: 161327 - DNA, 515 bp, Arabidopsis thaliana landsberg
gaccagcaaataaaacgatcatgatttcagattccatccccaatgaactcatcctcgagatattgttgagattacaaagtcaattgctaggtttcattgcgtgtcgaagcaatgggcatcaatgcttagtcgtccatatttcacagaattgttcctaaccaggtcctcaactcagccgcgtctcttattcgccatcgaaaataatggcttgtgaagcttcttctcgttgcctcagcatcttactccatatgagaagtcttcatcgtcgtctcttgtagaaaccgctgaatttcatatgaagttccctccagatggtatgcagatctatcctcgtaacgaccgacggttttcatgaggctatgcgtctggtatgatgtatttctatggtatgcggatcaaagaggatgattacgatggagtgcctgtgctatgtaaccctataacgggacattatgcgaccttgcctgctattgcaaggtttagactagcgtttagctttttcgggtatgatccga

SEQ ID NO: 161328 - DNA, 830 bp, Arabidopsis thaliana landsberg; identical to SEQ ID NO: 15590

SEQ ID NO: 161329 - DNA, 3104 bp, Arabidopsis thaliana landsberg
tcgcatagcttcaatcatcataattcgtttcatcaagacgaagagagatgatgtttaaacctggatggtctgcactgtgcataaacagagttgactgagttggatcggagagatctagcgattgaacacctcttggaagtccagaaacttgagatatagctgctggatgatcgattagaggagaaacgttaccatcggaggtagatcgagtagatcggcgaacaacggagctcgcaacggagctcgcaacggacttagatcgagctgatttgagagtgactcgagctgccttcaccattttgaacgaaaaagagctcaaaagatggaagaaaccagcaagagaagaacaaaatcaaatcggagagaagaagattagaaccgtgatggctctgataccataatagtgaagacgaaaaagagggttttagagagaaagattgtagaagaagaagtttctattttctcttattgataaaatactgtacattgtgagtatatatacaagtaaactctaccaactaaacctgactaaaccggacttaaccagctaacaattacaaaatcatacaatgcctcccaatatcaagtaaaaaacatcctaacataatccttgtaaaatagaaattaaaagatattaaccatagattcggttattgtcttgttgtttggtacaatgtaaaccggttactaaaccggaacactctactatataaagagtgtttcatgtaacagaacaattaagaagaataacaaacttttctcagcttcttcgtttctttgaattcgttcatcaactattatggtaacagagcgatacatctcgaagattcgtccgattcaacctaaactctgagtatcttcgagctcttggatcttccaaactcgttgattctttgtttcttcattttttttttctgcgttttctggaaaatttcagttgtttagagcttcgttgatcttgcgatggtttccgtagagaaattgcggcgtcgtacgagaagatcgagcaaaacttcagctgagaaaactccagaacgtgttcaagcttcaccgattccaccaatttcgaatccgtttcaacaaaatttcaattcaaaactatcgatctatcctttaccacagttcgacttctcggatgctcattattcgccattcaagctcacaaatggtgacagtcctgggaatacacttgtttctgaggtacttgatggatctaatttctcttcttggaagattgtgatatttgtttctttggacgctaagaataagattgcttttgttgatggaactttaccaagacctcctgaatctgatccaagctttagagtgtggttacgatgcaacagtatggttaaatcttggatccttaattctgttacaaagcagatctataagagtatacttcgtttcaatgatgctgcagagatctggaaagacttggatactagatttcacattacgaatttgccaaggtcttatcagctaactcagcagatttggtcacttcaaagttctgctttcaatggtatctctttctcaccttcgactttatggttactatgttctctaacgtcctctaggcaagtgttatcacaaaatacatggatcatagatagtggtgctattcatcatgtttcttatgataggaatatgtttgaaagcctatctgatggtttaagtagtgaagtaacattacctactggatcaaatgtcagaattgctggaattggaataattaagttgaattcacatatcacgttacacaacgtgttgtatatccctgaatttcgacttaaccttctcagtgtgagtcaactgacaaaggatatgaaatgtagagtttattttgatgagggttgctgtgtgattcaggatcctatcaaggagcagaagattggaagaggtaaccagattggaggattatatgtcttagacactagttctgttgaatgttctagtgtagataataactcatctgttgctaagaaacagtattgtaatgttgtggttgataatgccttatggcacagtagacttggacatccatcttatgagaaaaatgatgttctacatgatgtacttggtttaacaaaaaggaataaagacgatttgattcattgtgctatttgtcaaaaggcaaaacagaaacatctctcatttccttctaagaacaacatgtctgagaacaaatttgatctgcttcatattgacacttggggtccgtttgcaactccaactactgaagggtataaatatttcctaacaatagtggatgattacagtcgggctacatgggtttatttgatgaagactaagtctgaagtgttgcagatatttccagattttttaaagatgatagagactcaatatggtgttttggtaaaagcagtgaggtcagataatgctcctgagttgcggtttgaagctttatacaaggctaaaggtatcatctcttatcattcttgccctgagacaccacaacaaaattcagtagtggagagaaaacatcaacacatattgaatgtggctagagctttgatgtttgaggcttgtataccactagagttttggggaaactgtattctttctgcagtttttctgataaatagattgcctacaccgcttctttcaaacaagtccccatttgagttacttcattcaaaggcgccggattattcttctttgaaagtcttcggttgcttgtgttatgaatctacaagttctcagcaacgacataagtttgcaccaagagcaaaagcttgtgtttttctgggatatccttcaggatataaaggctataaactcctggatttggaaactaatacgattcatatatcaagacatgtggtgttctatgaaacagtttttccatttgctgataaaaaggatattcctcaagatgtgtttgatacagttgactcaatgagtggcactaatgtttcagccacatcagaacctgcaaaagtagttcatcctaaacgagaatctcgacctccgggttatctccaggattacttctgtaatgcagttccaaatgccaagaaagatgtgaggtatcctctttcagcttacattaactatgctcaactctctgaagaatttac

SEQ ID NO: 161330 - DNA, 532 bp, Arabidopsis thaliana landsberg
  unsure (1)..(532): unsure at all n locations
caaggtgtatgcagatcgaatgtcacagccatcacgtgctgttatcatattctgcaagtaatttcgttgaacttccttgttaattccagattcagccaattttgttttctcttatacatgagaatctttgttttgtatggattttatcctttgcagggttaatggaatccannnnnnnnnnnnnnnnnnnnnnnnnnnnnnncgtcaacaattatctcctgaattcaaaggttcgtacaaataatcaacaaagtttcaaatctgagtattggtagatttatgtttagtgtatatgagatcattagtgtagattagtgtagactaaggctatatatgcttagtgttgtttcttaatgtaaatattgttaagaaatgtgtcttgttcttcagatattaacccattggggaaagttccagctattgttgatggcaggcttaagctcttccacaggccaacacaaaagttcattctctttaaggttcaagctttggtttattgaccattttttatgaatcttaaccgttgggtctt

SEQ ID NO: 161331 - DNA, 653 bp, Arabidopsis thaliana landsberg
aacggaaacagcaaagagaaagctatccttgggagctaagatccttcaaatgggatgcttagagaagatctataagcgactcttcaaggtctgcgataaagagaaactcttcaaggcgtaccaatgttacctatcgacaacagaaggttccattgcgggcctgctcttcatctcatcaaagaagattgccttctgtagcgaaagatcgatcaaggtgacttctcctcaaggagatctcactagggttcactacaaagtctcaatccccttgtgcaagatcaatggagtgaaccagagtcagaacacgaagaaaccatctcagaggtacctagaagtagtcacagtcgataactatgacttctggttcatgggattcgtgagctaccagaaagctttcaactgtctcgagaaagcgctaaacgaggatgagcaataaacggaggagctactaattagtgcatggtggaaaaagaaatatatcatttctattttcacctgtttcaatcagggaatgttaggagagaacctagtagagactgacaatattgtttgtacaaactcaattcttattttcattgtattttgctttttggtttctattgtagaaacgagaaagaaattaatatacttagccgatttcatcagttttcctt

SEQ ID NO: 161332 - DNA, 1676 bp, Arabidopsis thaliana landsberg
ggtgaggatttgttagaactgctagacatatggatttggttagaatgatcaaggcagtagactagaaaatattgggaattcctttgttttcaaacctcttccacgggtccggctttttgtgttttgcttgagggcaagcaaaagctaagtctgcgagagttgatatatccctagttttactgtttttaactatgttttaggtataggtcttagagtccttttgttatttctagagtcttttctagtctttttcaggtctttacatgtttgggattcatttggagataatgaagcattctagagaaaaatagagaatttatgcagctgaagaaatctggagacgaaaatgcacgtaggtgtcgaacgacaccacccttggtgtcgagcgacaccaatacctgacggcattttcgagacgcaacttattgatgttttgaagatttctaaattcggcccagaactttctcctatgtttaatgaaggcccatcacgtgttttagacatataattaggtttttaagatcattgtttagacctaagcttggagaggctattctctatctcttttgtactttgggagcaaaaccatgtggaaacttcctttggatctttcttactctattctcttcttggtttattcattgatttctattctaatcatgttggttacttcattcatcatgcttgagtaatctccttgttaggtttagggtttcttattagggatttagatgatttagtagatcgcccccttgctatgttatctgttaggattcttcatctttaattgatcttaatgcttgatctaaattgatcacctagaacttgaatccagacaatagatatacccaccataggtatctgtagtcggatctattatttgatgagtctggtttataggtgtgtaataagaattggcctttctactaaggtgaacaattaaactcgtttagaatgcatgtttaggttaaagatctctcggcttctccggttattcttagctataggcatagggagtttcgcggaacaccaccggttattccataattagatctactaaccaatagtttcataagaataccctaagcctgacgtttttactttcttatcttaccacctcaaatcttctattgcttcctttagtttctttttattttcattattatcttacttagcttaattcaaaaccttggtctattgtgtgatccgagagctttgtggaattcgacccttaagtgctacaatcgatctcttatttgagagagtggtcttatggcaatttgacctatatcaaatttggcgccgttgccgaagttctctacgattcaccattaaattttgtctaagcttctatttttctttttctatttatttacttagtctttctcttttctttttcttgtgtgtttcaggtgtttgtctaatcacagaaccagaaactagagagaaacatgaacgagagtaagaaaaatattgtctcagaactgatgatagcactgaattgtcaacatgctaaggaaagtcgagttatagtactagtgtcgattgacaccaccactcgcttcgatcgacacacatcactggttgaagcagagtcgtctccgatagcaacttttcaagttgggatcactcctataagtccattcactattgtcacgtcacactgcacttgtcat

SEQ ID NO: 161333 - DNA, 737 bp, Arabidopsis thaliana landsberg
  unsure (1)..(737): unsure at all n locations
aaacgtgtctcacnaaactgcaaataactcacgaaatataaatccgaatccaattctgtaaaatggagaatgacgataaaagacttggtaaaaactctaccaaatttcgttacctttgacaacgatttgatatgttaaaatcgttttttcccaaaccctaacgactctggttcttctccttctctctctttttcctttataaaacgaaaagtggctaactaaagccctaatttcgagtttccttcttttataggcacactctagggtttccaattaatccaaccgattaaaccggatgatttaaatacaaaccctaactgattttccggttcacggacgttacactaactaatgactaatctatcctttcacatttacattttacactctctttccctcagtcggaaaattcagtttctatgaaaagggaaacaatggacactaggcggcaaagatatgtatgatgcttccaaaattatgtttctgaatcatcttaaacagtatcaaattttttgtttagttaaaatgatgtaaaaaacatttaggagtttcatctataaaatgttaggcttttacgaatgtataaagagcggactttaaagatttattatattgcatgttaggaatccgtttaaaaactaggtccatttccactttttcatcgaaattgtgttcaatttattttatttgtctcaatatttatatttgaatggttgtaatataagtgatttgccgtg

SEQ ID NO: 161334 - DNA, 783 bp, Arabidopsis thaliana landsberg; identical to SEQ ID NO: 51001

SEQ ID NO: 161335 - DNA, 1153 bp, Arabidopsis thaliana landsberg; identical to SEQ ID NO: 24743
  unsure (1)..(1153): unsure at all n locations

SEQ ID NO: 161336 - DNA, 1960 bp, Arabidopsis thaliana landsberg
atgacggtgtcgatcgatacccctctagtgtcaatcgacactggatgtggactgcaccttgtgaggtgcaagtacctatgtagcccgagcccgtttacactcctcctgtcccctatcggaggaggcgtcattctaagcaggagattcacgctgctaagtgcacagccataatggagaagatcctccatactcttcctaaggatgcttcagagacatcttccgcctcactcaacaggtatgtcaagcgacttgttgacaatggaaaaagttcagatgaagctaagctgcttactagacacatcagtgcaatcatgctgcctaaggccaagaaggagaaggcatagagagtagacatagctgagtacatccgcaccattactcctggtcagaccactgcgaagcttccggatccaggtagctttgtccttgattgctctatctccacaagcagattcagccgctctttgtgtgatctgggatcaagcatcaacctcatgcccaagtctgttgttgagagactaggcatgactcactacagacctactcgcatcactctccttttcgcggatcgctccaagcgaatccctgaaggtatcattgaagatgtttttgttaaggttggctacaggaacatgttggttaggatttgattagacttgttaggcatatggacttagtttaaatgatcatggcaataagctaaagaatgttgggagttcctttgttttcaaacctcttccacgggttcggcttttgtgttttgcttgagggcaagcaaaagctaagtttcgggaagttgatatatctctatttttactgtttttaactatgttttaggtataggttttagagtctaattgttatttctagagtcttttctagtccttttcaggtttttacatgtttgggatgcattttgagattattgagtattctggaggttaaaagacaagttaagctgctgaagaaatccggagacgaaaatgcacgtaggtgtcgaacgacaccacccctggtgtcgagcgacaccaatacctgacggcaatttcgagacgcaacttattgatgttttgaagatttccaaatttggccgagaactttctcctatttctaaagaaggcccatcacgtgttttaggtcatatatatagtttttacggtcattgtttagacctaagcttggaaagactattctcctcatctcttttgtactttgggagcaaaaccctgtggagactgcctttggagaaaatcttctttactctttctcttgctattattgatttcttattcagactatgatttgtgtttctttgatcatgtctgagtaatccacttgttaggtttagggtttctcattagggattcatatggtttattaaatcgcccctctgctaggttatctgtagaattcttcatctttaattgttcttaatactagatctagagaaggtaagtagaacttgattgaataattgaatagcaaagcaacgattaaaaacatgataacagaaatgacgaaagacttaaacgaaaactgaatatcaaatacttgaaagtgaaaatacaaagttgcaggagaaacactgcggctatcaaagttgcgaaaatgtaaaagcgagataataacggataatagcggatgccctcgggaaaaccctaagaggcagtttatacactacaagaaaacagacaaacaacgactacagaaagcgacaacagatgtagtcgtcgtttttggcgactacgtcacgaccgttttacgacgcatatacgacaacatgaacattagtagtcaattagtcgttattttacgactaaatatgttagtcgacaaatactcgtatagtaacgattatttaacgattatattatataagaaaaacgtttgtcgttacatagtcgcaaatggacgactacagtttccgactgcggaagttagtcgcccaatcggcgactaa

SEQ ID NO: 161337 - DNA, 507 bp, Arabidopsis thaliana landsberg
atggaagccaagatcgtcaaggggttggatagtagtaggtgtgaagatggattctgaaaaaagaggaagcgcgcagcaagctatgctgaatatgtgactggagtttcgggtgcaacgctgataaatgtgcccccaccgaacgggcagtgccaaattcctgacaaaagaagaaggctggaaggcgaaaacaagcttagcgcttacgagaatctctctgggaaggcgctggtcatatattacacttattttaagaagactgggatcgcttaacgtgctatgatgtatgagaatggcgaatggaatgatttgcctgagcacgttatatgcgccctccagattgaaatagaacaactgagcgccggacttgagttcaagttatgcggtcacagttttattttggacttgctgcacatgcggagactagacatggatacaggagcgacaacccctcttgcatggattgacaatgcatgaaagtgcttatacctgaatctatggagtgatgaa

SEQ ID NO: 161338 - DNA, 1395 bp, Arabidopsis thaliana landsberg
taagacttctggaacttcttggggaatggtatgagaaaggaaaagttttggtttttgttcgttcgcaggaaaaatgtgatgctttgtataatgatttgatgaccaaatgtggttacgcctgtctatctcttcaggggggtaaggaacagactgatcgtgaatcagctatatctgattttaagagcgatgtctgcaatttgttgatcgccacaagtgttgcagccaggggtctagatgtgaaaaagctcgagttggttgtaaacttcgatgcaccaaaccactatgaagactatgtgcatcgtgttggtaggacaggtagggcagggcggaaaggctgtgctgtaacatttatctctgaggatgatgcaaaatatgcaccagatttagtcaaggccctggaactatctgagcagccagttcctgatgatgttaaagcagtagccgaagggttcatggcgaaagtaaaacagggtattgagcaagctcatggaactggctatggtggaagtggctttaaattcaacgaagaggaggatgaagttaggaaagcagcaaagaaagcacaagcgaaggagtatggctttgaagaagagaagtctgactcagaagatgagaatgatgtagtaagaaaggctggtggtgatatctcacagcagcagattactcttgctcagatagccgccattgcttctgctgcttctaaggctcctgtgactgctaaccaattgcttccaaatggtggtgggctagccactgagccaggtatccctcctactgatggagcaggccgcgttgcagccatgattgctgctgctaacgtgcaacagtaccttgcaaagattcaagctgatgcgatacctgaacactatgaagcagaattggaaatcaatgatttcccacagaatgctcggtggaaagttacccacaaagaaacgctgggaccaatatcagagtggagtggagctgctattaccaccaggggtcagttttatgaggcaggacgtataccgggacctggggaacggaagctgtacttattcattgaagggcctaccgaaaaatctgttaagacagcgaaagctgaactcaagcgtgttcttgaagacattacgaatcaggccatgtcctcacttcctggaggagcatccgggagatactcagtcctttaatgtaagtcgagaattctagtccaatttacaatctttggtgataaatttttgctaaatgctttgctttagccttgcatgcagactattttctttcttacataactcttttaatctcaaagttcagacttatggatctttagtttctgtcttttaacaggaaagcaacaatgaggtgtgtgattataagggattcaaatcactgagagttttattaaacaagtattat

SEQ ID NO: 161339 - DNA, 688 bp, Arabidopsis thaliana landsberg
  unsure (1)..(688): unsure at all n locations
accaattttcacttttgattgttcttccttattctcagctaaccatgaagttcggcaagagcctaagcaaccagatcgaagaaactttacctgaatggcgcgacaaattcctctcatacaaagaactcaagaagaagctcaagcttatggagccacgaagcgtcgagaatcgtccaaataaacgttcgagatccgattccaattctgtcgacacagatccaacggttggtatgaccaagaaagagcttgctttcaatagtcttcttaaagatgagcttgagaaactcaattccttcttcgttgagctagagtaagagtcatatcattggactaaaggtaaatcctccataatttatgtggatcgacgcaaaaacttacggttcgacgtaagactgataggtgtgatgatttgggatcaatgtgttagttttgattgcacatatataagcgttgcttcctgatacgtcggaagtttagttattctctcataatgaacatgtctgtcgacaattacctattactaacggcctgtctccggcgtgttttccggtgaagtccgtcnccgggatgnccggagggtggattcctcgtcgttcatctgnctcagtagtcgcgtttcgtttggnggcgtagtaaaatangaatgggcggtgttagttnnaggtttaggtccttgttgcgttctttt

SEQ ID NO: 161340 - DNA, 1049 bp, Arabidopsis thaliana landsberg
ggataaagttatagctcatgtggaagatctttctgctgaagagcttggtggagtatggaatcactgctccagtcacgaagaatccactttctcatcctcctcgccccttcaacttgatgtttcaaacttcctttggagcaagtggttcgttgatagggtgagtctttttccatgtaataattctttctttcttgagttttatttatttatttgttggtgtgtttcagttacttgcgtcctgaaactgctcaaggcagtttttgcaacttcaaggattattataatttgaatgggagaaaacttccgtttgccgtggctcaagttggtcgagtctttaggaatgaggtgaatatccttcaatattactagttgatatattgtatacgtttatctgaatctttcttttaagggatctttgtttctcacgcagatatctccacgtcaagggcttcttagaactcgtgaattcactctggcagaaattgagcactttgttcaccctgagcataagtcacattctaagttctctgatgtagcaaaacttgaattccttatgtttccaagagaagaacaagaaaaacctggccaatttgcaaaaagactttgccttggcgaagctgttgctaaggtcagtgtatttgtaatcatattcgcttacctcctttttgataagaaaaaaaaactaatactgatctctacaactgaaaatgtattagggcatgtgaacagtgagactctaggatacttcattgggagagtgtatcttttccttatccgtcttggaatagacaaggaacgcctgcgcttccgtcatcatcttgcaaatgaaatggcacactatgcaaccgattgttgggatgctgaaattgagtgttcatatggttggattgaatgtgttggaattgcagataggtctgattacgacttgcgtgctcactccgtaagaaactgaccttttacagctagatatgtatgtgttcctatttatatttacttaagtagattgtggaccctttgttgtatggcaggaaaaaagtggccatgctctt

SEQ ID NO: 161341 - DNA, 1135 bp, Arabidopsis thaliana landsberg
cggaagccatggggtcacttttgcaggtacgtatgatccagttggaagtttaatctgttctctgaaaattcgaagtttgtaacttttggaaccgaagctaattgatgggtttctttaggcgttttactaaatcactcgccatgactttcctctccgagattggtgacaaaacgttcttcgctgctgctgtaagtgaatcttaatcatcttcttcctcttcatatttggagttaaaaagagtatacttttaatggcgagatcaatattctaaaatcctcaaagcttaaagctttagcaacattcataattcaatatacgtttctttgttaattttggagccaatgtttctagttaatgctgaaatggttatgttctttgatccaactctgttgactttttgttactaaagcttcttattgttgagctaactatttatctcctcagcttcggtatatgttttcttggtgctaatatgctaaattgttactctgtaactagattttggcgatgcggtatcctaggaggcttgtattagctggttgtttatcagctttgattgtaagtttttgtttaatgtcttaatggaactgtgtagtgtagttcactgaactcttcaagatttgtaaaggtttatgtcttgcttatacttttaggtcatgactatattatctgctacacttggttgggctgctccaaatctggtatgacaattataaaatgcttgtacgtgtagtgtatgaaatctctatgaacttgcaactaagatgatgatttaaaccacacttacagatctctcggaaatggactcatcatataacaacattcttgttctttggctttgggttatggtctttgtgggatggttttaaagaaggagggtaagagattttagatgactttgtggaacactagttatttccaaataatttcaggtagcattttctcatccaatctgttatatatatatgcagaggttctgaagaattggcagaagttgaagcagaactggttggtactttctcttcttgtaaatcttttttatcatgtttagagcaatgcttttggtgttgacacttattcaatgttgtaggattctgatttgaagaagactaatgatcaatcgaaaaacagtaag

SEQ ID NO: 161342 - DNA, 1016 bp, Arabidopsis thaliana landsberg
aaaacacaactcaaacgattcacgggtttcacttggaatcgtttggttttctcatttccgaaatataaaaagatggccaaagcgccaccgtcaatctctcttctcctcctcctctgcgccgccgtattcctcaccatccccgccgtgatctccgccatcggtgttaactacggaactctcggaaacctcccaccaccgactcaggtggctaactttatcaagacacaaacttcgattgatagcgtcaagatcttcgatgtgaatcccgatatcctacgtgccttcgctggaactggtatctccgtcgttgtcaccgttcctaacggtgatattccggcgttggctaacggaagacaagctcgtcggtgggtttcggttaacattttgccgtttcatcctcagacgaagattaagtatatctctgtcggaaatgagattctgctcaccggagataataacatgatcaataatctcttaccggcgatgaggaataaaaacaacgctttggttcgtgctggtgcagagatgttaaggtcagctttctctctatttttcagatttttctattttaaggaataagtagaatttttgtttggttttggtaactaaagttaagtttgatgttcattattgtataaatttcagataaaaaacttttgaaatctcaactttgaatttgatatttgctagtgggaaagttttttttttttttttttacttaacttttttacctagttttaattttctttaactaaaagaaattgtaattattaatagtgaattgatgattggcgtgaaaaatgcactgtttttttttctttccctttttttatatcagagataatgcattgattgcgcatatgtataaagttgaaaaacaacgttgaaaaaaatatgcaaaacaaaaattgattattttgaaaaattagatttaatctctattttttcgtctgttatctaacttgaaatccaaaatttcacgcaaacgtagaatgttgcgtttgcttctttttttt

SEQ ID NO: 161343 - DNA, 472 bp, Arabidopsis thaliana landsberg; identical to SEQ ID NO: 80359
  unsure (1)..(472): unsure at all n locations

SEQ ID NO: 161344 - DNA, 481 bp, Arabidopsis thaliana landsberg
  unsure (1)..(481): unsure at all n locations
ctgaatctcttctactcacagggtttcggctactcattatcacatgtccctgcttatatctgtgaatctgctccaatgggttgatatgatgtaagtagtcccatccctgtccatggtctgcatctagtataagtccctatggtctttcacagatgcagcccttgtttcctcagtcaatcatgtatacttttattgttataggtgcgcctctgtcccatctatcagcatcgtctgctgtgctggggaacgtaggacaaggtagtcaatttgggccatcacgtgtgaggtctgtccnnnnnnnnnnnnnnnnnnnnnnnnnnnnnnnnnnnnnnnnnnnnnnnnnnnnncagtttcccacgatgaccattaatccacaatggtggtgaagtgctttggcgtgcctgccttaaaaaatgcctatgcatgaatcttggatgtatgcagcatccgcatcccatcgccacccattcctagcagattt

SEQ ID NO: 161345 - DNA, 2958 bp, Arabidopsis thaliana landsberg
atatagtgggacgaataaaaacttacgaggagcatatacttgacgaggaaggtaacattgagactttgggaaacctacttttctcaagtatgaattcacaagataggctacaaagaaatccgtggcagattcaacatacaagatcgatcaaaggaaaagacggatcaacccgatgtggtgtgtttttgatgtgttaaaatgggacactttgcttcggtgcgtcggacaagggtgggctcgcatgcccgagagagaacgagggcgcattagtaaggacggtcgggatgttacaagtggtatcacagctaaactaagacaagtatgggatcaagagggctcacactgtcggggtgacgatcttggtgtgcaatgaggatgttgcgtttggttagtggggtgaattgtaacaccacagtctcagaaatatggtagtgcacgcaaatatatttaaaagaattgatttacctacttgtattaccaaactgctcttatcattttggctaaacgtgctgaaagaaatccattgttaaaggtgcttgggctggagtaattttaggatgtgtgaccttccgacaagtgattgtcggaaccatacgagtgaggacaaagcatggagaaagatcatgtggtgatttgtagagtcggtaaacaaatattaaagtctcctggacgtagtagaccgaccatcgggcagggatggacagagtgtcaagagaggacctgggacccctagtaaggactgtcgggcgttacaaaataaatagttaaactgtattgcaaaattgaatgtgtaagatagaaaactgtatttttctaaatactatattaaatatagaaaaagcgtatgggctattatttagaattcaaaaatcattaaaagaatgtgtgtgtagaattaaaatgtataaaaaatataatccataagacttaagttttgtttaaaacaaaaattattcaattaaatatctagaaaaatttatagattactattttactattctcaattcaaatactatccataaacatttacatttatatcttacacctgtctatttaggttggccttatctagtatgatataaaattatcttgtaggatatttgaggttttcatcctttttaatatatagatttttttattattattatgtgcgttgatatacctctatttttactgcttttagctataattgaggtataggttttggagtccttttgttatttgtagagtcttttctagtctttttcaggtttttacatgtttgggatgcatttggagattatagagcattatggagcaaaccagacaacttatgctgcaaaagcaatcaagagaccaaaaattaacgtaggtgtcgatcgacaccaatacctgacgacaattaaaatacgcaatttattgaagttttgaagatttctaaatttgtcccagaacgtttctcctatttttagtcaatgccctgcacgtttttaagacatatatatatatatatatatatatatatatatatatatagtttttaggtcaatgtttcgacagcttggagaggctaatctccttatctcttttgtactttgggatcaaaaccttgtggagactccctttggagaagatctttttcactctttctcttgctattattgatttcttattcagactttgatttgtgttctattatcatatatgagaaatcaagttggttggtgaagggagtctcaatagggatttagattgattagtagatcgaaaaccccttaggattattcttagagttcttcatctttggttattcttaatgctagttctagaataattaactggaactttgatattagataataggtatacccaccataggtacctgttaccaaaaccactatttgatgggccaaagtttataggcgtctcgaataagatcggtctattcacttaggtgaacttatcaaatttgtttagatcggtctattcactttggtgagtagcacgacacatcaccgattatgcaataattacggttggagttcgagaacggttcgataacaacctatctaattctagatctactaatcatatgtttcctgagaataacctaaacctgacgttttattatcttatgttacaaccaaccaatatgctatttgcttactttgctttcttttaatttacttattacctatctagcttaatcttcacacttaagtttattgtgtgaaccaaagaactttgaggaattcagcccttaagtactatcgacgatctcttatttgagagattggttttaaggtaacttgacctatatcaaatttggcgccgttgctaaagttcttccgaatcacctttaagcttagtttagagatttcgtctagtttttatttttcttttgatactcacgcgtttcttgtttttcttcttttatgtgtttcaggtgtatgtctaggctcataagaagcactaaacagaaggacctgatcaacttatctgtacttgatttgggaatactcgaatacaccaaccaaaaaactcagaaattagcaatggttgacagagtcatcagagctgatgagcaaagagttttacgggatggcgatgggcaagcctacaatgtggctggtcagagattggatgaccatggactcatcacccctgagaacatcaatgaggatcaagcgcgcctcaatgcgcaattagcggctaaagatgcagcagggctcggtgtcaagcgacaccaactgggtttcgatcgacaccctcgggagcagcacgcagatgcaatcggtgtcgaacgacacaacagaggtgtcgatcgacaccaacactagattcctgcagctattcatcaagctttggaaccacgtcatactctcggggatttcaataggctagacatgttctatgctaatcgttcagcgattgtacccccaccctttcagaggaacgactatgagcttaagcctggct

SEQ ID NO: 161346 - DNA, 634 bp, Arabidopsis thaliana landsberg
agatcgtgatggagataaggtattggcggaggttaagaggataccaaaggctagatggttctgccaagaaggcgagctcgggccggagaaatgtaaagcgggtcaaaatggatcccacacggaagagacggttttggaagatcaagatagtgccgaagctaaggatcttgaaaaaggcatcgcctaagaagcgtttaacgtggcttcgagatgcttacgtcaacatgatgctgcgcctagcgaattctcgggtcgtcggatcatcgtacgggtacggcgaatatgggtacgggtcgggtttggcgtcgaaggagtacgatgagaaaatgcttgtggagatttacaagtcgatattgatggcgcaggcgcaggggaatctcgtgcaccgcgacacacctaataataatcttaagcttccttcagaaccagcggttgtctctgtcgtatcttctgttgttacttgttaggtaataaagaacaatcaattatcctttcttctttacgataaatttccaatgttgagaatcaaaattgttgacttgcttgatactatttcgagattgatgataggcaaaatttgtgattttgatttgtatcgaatttatatatatatattgataggaccaggaagaaa

SEQ ID NO: 161347 - DNA, 686 bp, Arabidopsis thaliana landsberg
atgcaggctatgagtgttgaatacataatattggaaggtgataatctttcatcaatgtttccaaatgctagtctaagtattggagggtttcacttagatgcgcctcgtctatttgctctgcttaccaccctcgctgttctcccaaccgtttggcttcgagatctcagcgtactaagttacatttcaggtataaaacattcaatctaaaaggaccttttaaagagtcttttttcatatatgtgaatatcttaaccttgatcttgcagctggaggggtgattgcatcagtgttggtggttttgtgcttgttttgggttggtttggttgatgatgttggtattcacagcaaaggaactccactaaacctcgcaacattaccggtttctgtaggactctatggttattgttactcaggacatggtgttttccctaatatttacacttcaatggccaaaccatctcaattttctgctgttctcttggcatcgtaagcttaaatataaagacattacacatcttaggaactctctacatttctatcttttactgacagtatcaatttttatttttttttcacagttttggaatttgtactcttatgtatgcgggtgttgctgttatgggatatagcatgtttggagaatcaacagaatcacagttcactcttaccctgcctcaagatttggt

SEQ ID NO: 161348 - DNA, 2368 bp, Arabidopsis thaliana landsberg; identical to SEQ ID NO: 7982

SEQ ID NO: 161349 - DNA, 1450 bp, Arabidopsis thaliana landsberg
  unsure (1)..(1450): unsure at all n locations
taagatatattagtatgtggttagtgacagtatnatagtttttaaactgttcttatgttcaatatattcgtcttattatgtgtagcatctttgactgcattgtttaagcacactgaggccactcttagtactgatgagcaaatccgtgaaaaggtcttacactttatagagataaggtcagagtcctttctacattttttaatcttttttttgaggttctgctatatcttagcttgacttgacttaaatgaaatttatactctcatgttagacctatatgatcttttgattcttttcgccaaatcaacttgagtaggtactgccatactggtgctgatagctagcgtatatttagtggagtcattcttattttggaatttggaaagtttgtttatcaccgaaaaatatttcttatagaacaagatgtaaaatgaaaattttctgataatgcaagttaatggtatgctaggaattccttggaaaggttttgtatatcttatcctattttaattgatttcgtatttccatgtaggtgttccctcttaaagaggaactgttaaagcctcaacaggaaatggaaagacatataaccgatttaatcaaaaaggtgagaacatatctttggctgcatggagtttttctttgtacctatttatctggatttctttttagcccttttatgacgttaacagagcctaggggatgtaactggagaagagttcaatatgtttatggatttcctgaaaagtttgagtatatttggagggaaagctcctcaagaaagaatgcaagaacttgtagaaattattgaaggacaggctgatttggattcaaagtttaatgagagtttctgggtcacattctttcgggcatgaacttaatttcttactttaatacaatggcagtaaaatgatttcattcctcgtagatgtttattgatttttaaatcacccaagtggtcgtcgttatctcggaatgaagtatgctagttttttgggtgtttgtgagattaaaaggatacttctcctggcacaggctttcaccctctcaacaaaaagcttataaaggatagataatctttagatctgcgattcttgcatgtgttgatctctgttgtttaccatgagtattttttgttgtgaacttgtgatatctcattggtagtatgtgagaaagttgcctctaaattttcatgaagtcaggattttttccgaagtccagtatactgtccactgcccagtctaggattgaacatagggaaggggttaacagttttcttgatgcaaatccataggaagtgagtcataaaatttgataacatctgttttagtcaccattaatcttattatggtgattgtaaaggttgaaatttacaattctgggtttcattttgatgattaaaaaataagccacaactactgatgttcaaatattattttcccaggtttca

SEQ ID NO: 161350 - DNA, 722 bp, Arabidopsis thaliana landsberg
aggatatagaactatgcaattactaatgctaaacactagatttacattactggttggtctgtttacactgtgatttctttagtgagggactctatagaggccaaatcatggaggtgatgtgactgttggagagctactcaagaagaaagctagtgaaggtgttaaggttattttgcttgtttggaatgacagaacatcagttgatttgctgaaaaaagatggacttatggccactcatgatgaagaaactgagaattttttcagaggaaccgacgtgaactgtattttgtgtcctcgtaaccctgatgatggtggaagcattgtccaaaacttgcaaatctcaactatgttcactcatcaccaaaagattgttgttgtagacagtgaaatgccgagtggaggatcaagatccagaagaattgtgagttttgttggtggtcttgatctttgtgatggaagatatgacactccgtttcactccttgtttagaacgttggacactgcccatcacgatgacttccatcaaccgaatttcactggtgctgcgataaccaaaggcggtcctagagagccttggcatgacattcattgtcgtcttgaaggacctattgcttgggatgtcttgtataattttgagcagagatggagtagacaaggcggtaaagatattttggttaaaatgagagaactcggcgatattatcatcccgccttctcctgttg

SEQ ID NO: 161351 - DNA, 1950 bp, Arabidopsis thaliana landsberg
  unsure (1)..(1950): unsure at all n locations
atgaggcttcagcgaagctctagccctgaacctgagatttggcttgagtatagcgacaaagtggttcctacggacgaggaacacatcgctgaagctattcgtgctgcaacagatgtgattgctggtatgttctctttctctctctctaagtgttaagtgtattttgnnnnnnnnnnnnnnnnnnnnnnnnngagaatgagacatttatctgaccacaagtgcctagaggtgttatatgagctactagtttggtctttactcatctgatttttttttcaagttttgctatttgatgaaactgttacaaagttatgagtttgaggttaacaagtattgactatgattaagtacttataaaatacatgtgctgcaggatctggtaaaggggtctcagatgctccattgaccctccatgtgaagaaggctggtgttccagaccttacgatggtcgatcttcccggtataactcgagttccagtgaatggacagccggaaaatatttatgagcagatctctgggatgattatggagtacattgagcctcaagaatcaataatcctcaatgttctgtcagctacggtcgacttcaccacatgcgaatccattcgcatgtctagaaaagttgacaaaaccggtcaacggacactagctgttgtgacaaaggcacacatggctcctgaaggtctcttgcagaaagtaactgcagatgatgtgagtattgttcttggttacgtgtgcgtcagaaaccgcattggagaagagacatatgaagaagcaaggatgcaagaagagttacttttcaggacccatccagtgctaagattgattgatgaagacatcgtgggaatccctgtgttagctcagaagctaatgcttatccaatcaagcatgattgctagatgtttgcctaaaattgtaagcaagatcaaccagaagttggacactgctgttctagagttgaacaaactgccaatggtaatggcttctaccggggaagcattgatggcattgatggacatcattggttctgccaaagagtccctcttaaggattctagtccaaggagacttctctgaatacccagatgatcagaacatgcattgtactgctcgcttggctgatatgttaagccaattctctgatagtctgcaagcaaagccaaaagaagtgaccgagttcttgatggatgagatcaagatccttgacgaatgcaagtgtgttggactgcccaatttcatccccaggtcagccttcttggctatactttcacaacatgttgatggtatacaagacaagccagttgagttcatcaacaagatatgggactacattgaagatgttctctcatccgtcattgctaagcgttctgacaatttcccacagattcaatcttccatcaaacgagccggtcgtaatctcatctgcaagatcaaagaacaatctgtgaatcgagtgatggagatcgttgagatggagaagctgactgattacacatgtaaccctgagtacatgacgtcttggactcagaagacaagtgcacaagagagcttcatcgatgctgttgtgaaaaatgagaacatacctgactacttctctgtgactggatttggaaatgtgaagatttcgcatctacgaaagtatcacgctcatttactgattccggctttcgacatgaagatgaggatcacatcttactggaagatcgtcctgcggagaatcgtagacaaccttgcactgtatcttcagctatctgtgaagtctctcgtcaacactcgatttcagaaggagattgtggcggaaatggttgatccaagagatggtggaggagttgaaaagatgttggaggagtctccgttggtggcgagcaaaagggagaagcttcagaatagtatcaagctcttgaaggagtctaaggatgctgtggccgccattgttgatcaaaattgttaa

SEQ ID NO: 161352 - DNA, 431 bp, Arabidopsis thaliana landsberg
agagctcccatactcagttacctcacaaaggcacctcttgtaccgcccggaacagcggtggttaactctctgtcgaagcagcgggcaatgctggaaaacattcttagggcatgtgttgggcttgcgccagagaacaacatgatcatggagtacaagtgaaggatgaggaagaagaagtaaaggtacctaataagaccttaggatatgaagaacactgctccattgtttcattaatatatatcattttgtatgtatattatatgaatgtgtgtgtgagagataatatggataagcttagggttattttgtgtgatatggatctggtcggtttatttggtgagaaaattagccaaggttttggatcaaatgtgtaaaagattaagtaattatgcttgtgtctccttgtaatataaccaaacttatgatctatg

SEQ ID NO: 161353 - DNA, 320 bp, Arabidopsis thaliana landsberg
tcctagcagggttcaaaaatatcaaatcaaaggtgcattttttgcttcatcctgatataacatcggatcttgttttccgctggagttaaaagtattgttgtggtccgaattttcaggtgattggttcaaggaattcatacaacaccgttaaggcagtgttgaaggccttgaatgcggtgagtgttctgagctgatgacaaaaagtcaaatcaattttagttaaaaccttattaatgtctttttctttttgtcaggtcgaaacaccaaaggatgttcaggagaagtttggccggacagttgttgagaaatatctgctgtga

SEQ ID NO: 161354 - DNA, 483 bp, Arabidopsis thaliana landsberg
gtggatgcgtacgaagcgaaaaatcaagaattgatggctgagaacactagtctaagagcattacttcgatccatgcaggtacgctcttttttcatactaagcttaacttaagctacttaacacggtcaattcataagaaaagtttctatctttggtttgttgcagaccgatatgcgtgatttcttaaatgctccaaatgggtcagctaatccttcattggctggaagtgagaaacgtgaggttgatccttcacaatctccactgggtgggaagacggtaagcataagcttagatcactgaatggctcttgcttataatcttatataatggattgcccccgtatcttactaactagtcattacacaggacgtgtttgatttaccttaccggatggctagaggtcaaatagaagaaagtttacgtactaagatggcttccataaaggttttttcttaacaacgttttgcatttacagaccaaagt

SEQ ID NO: 161355 - DNA, 1579 bp, Arabidopsis thaliana landsberg
  unsure (1)..(1579): unsure at all n locations
atgaaagaagcactttttggtttgtatcttgttcttttggtttcgagcttagaagcagcagtgacgaaaccaaattctggaaactttattgaatgccttcggtatcaggctagtccggagaatccaatcaccgatgccatctttaccgtcgataacaccaccaccttcttgtcttcttacgtgtcatacacgaaaaacacgaggttctcgaaccctaacaacaaaaacctactagccatcgtagtggcgaaagatgtatctcatgttcaggcaacggtggtctgcgcaaagtccaatggtatccagatccgtatccgaagcggtggtcatgacaacgaaggactttcttacgtgtcgtctgtgccatttgtcattcttgatatgcacaaactgagggatattactgtcgacgtgtcaagcaagaaagcatgggtccaagctggtgcgaccttgggagagctctacgtgaagatcgatgaggcaagccaaacgttagcgttccctgctggcatttgcgctacggtaggagctggaggacacataagcggtggagggtatggaaatctgatgagaaaattcggaaccacagtggatcatgtcattgatgctgaattagttgatgtcaacggcaagctcttgaatcgatctaccatgggagaagatctcttttgggcgattcgcggcggtggtggtgcgagtttcggagttatactctcttggaaaataaacctcgtggaggttccaaagatctttacagtgtttcaggttaacaaaacattggaacaaggaggcactgatgttctctacaagtggcagcttgtcgctaacaaattccctgaagatcttttcatgagagcatggcctcagatcataaatggagcagaacgtggcgatagaaccatcgcagttgtattctatgctcagttcttgggtccagctgataagctgttggcgataatgaaccagcgcttgcctgaattagggctaagacgtgaagattgtcacgaaatgagctggtttaacacgacgttgttttgggccgannnnnnnnnnnnnnnnnnnnnnnnnnnnnttctagataggccaacgaatccaggattctttaagagcaaatcagattatgtcaaaaaaccaatcccaaaagaaggattagagaagctttggaagacaatgtttaagttcaacaatattgtgtggatgcaattcaacccttatggtggagtgatggatcggattccgtcaaacgctacagcatttcctcatcgtaaaggaaacttgttcaaggttcaatactctaccacatggttggaccctaacgccacagagagtatcctgagtattatgaaggagctctacgaggttgcagaaccgtacgtgtcaagtaacccgagagaggccttctttaattacagagacattgatattggaagcaatccaagcggtgagacagacgtggatgaggctaagatctatggatacaagtatttcttggggaatttgacagagattgatggatgttaaagctaagagtgatcctgagaatttcttcaagaacgaacagagtattccccctctttta

SEQ ID NO: 161356 - DNA, 639 bp, Arabidopsis thaliana landsberg
  unsure (1)..(639): unsure at all n locations
tacttgcactcttgccctttgttccataacttcttctgagggtggaccgtgatcggagagataatcttatgcaggtttgtcaggaggatatatgttcttagttcctttgatagctagcactaacttcatgtatatatgatngttgatattacgtttataattttcaggcatttactattaccttcaacaattgcaaaccagagtcttcacttaaattagcgtgcatttcagttgttaaagatttgattatccctgtaagtaatgtttttacatgatatgtttaaaccgagtctaactttccgtgcgcattgaaatctaaatctgtttcttgtaatcttcgcagaatggagatatcctttatcccaatgatccaaccgtaaataactaccagcgcgcttgggtcaacaaacttccatcactgcttaaccagttgggtgataagcatcatgtatctaccaaggtgctaacacataactcatacaattctttgtcaatccagtaacctctcattttaccgtttttgtaatttatttacaggttgttttgcaactcttactcaaccttgcgctagttggatgtctgaatgcttcttcaacatttgaagaagagataagaaccttcttcatcccttttatttag

SEQ ID NO: 161357 - DNA, 472 bp, Arabidopsis thaliana landsberg
  unsure (1)..(472): unsure at all n locations
tacaaatcaagacccggaaacccttttcctctgtttttaggtgaagggaacattaaaaattatgcaaaagccctctgtttctttcttcgttgtaagcacataccttaactaaaacttttttttgaattaaaaattgcaggactaattggaccagcttgtgaagatctagactctgtactgcaacaaagctgccaagaatccgtcgttccacgttctctacccaacggaaaactagaaagagtttactggaaaggtgcagcgaagaagccagtcagtgttgtgtacagtttatgtgatcgtgtctactcatgaacaccatctttgcgtcaacaatgacttctctctaaaaaagctattttatccggaattttaacatggnnnnnnnnnnnnnnnnnnggagagagaaggcaatgagtttgtacagtttgaagattggcttttcttaagattatgaagtagaagatgaacacta

SEQ ID NO: 161358 - DNA, 477 bp, Arabidopsis thaliana landsberg; identical to SEQ ID NO: 14308

SEQ ID NO: 161359 - DNA, 304 bp, Arabidopsis thaliana landsberg
tatggatgttatggacaaagttgttgaggtaatgtataaggctactagaccttccatgtttatcataatattctatcaacttaaaggcttatgttttgacttttgagaatacgtgcgagctaaacaggttagtagtgaggattctgtaaacatggctagagagttggcagtgaaagaaggtctcatggtgagtgttttgaatatataaatgagataattagttagtttttgttggttttttttactttcactaagggaacctgacttgtaggttgggatatcatcgggggataacaccgatgta

SEQ ID NO: 161360 - DNA, 1273 bp, Arabidopsis thaliana landsberg
tcaaaaattcgttgagtcttcttgtacttctaatgatactaccctccaataggtcgagtcttctaggattttggaagactcataaagaggcctgaggactttaggaacacttgagacctaccaaaccaaagaaacttatcaatcaacataaatagaaggcttctaagggacataatgttttattatcattccaatatacttacatccaagtcaacatgatcaacgatgtgaataatggaaccaccaccatcacaaggacggataagaaacccgcttgacagcattttggctctcacaaagcttgaagagaacggaccattggggccaacagttgcagaagtgagtgacctctcacaaacctgaaggcaaaaagcaaatataaggcaaatctaataaacataatcatagatgaacaaaaccaggagtgagtgctcctaataaatcggttcttttgtctattcacaagtgtcaaaacatgatataggcacctgcaacagcatagaagctttggcacagaggacaccacttccaaaacttggaagaaatgagctaccgtattgggagccaccaaatttagcaggggacaagtttatcattacagtaacatcctctgcaccatcgctacccattggagaccatccatcatcgacaaaaccatttacagcatcattgaaacccctgaaagttcatccatattgaacaattagaataagaataaaagaaactcttggtgataaagctattaagtaaagtagatacttaccgacagagtctttgactgaaggttcttaaaaccgcaggttggcgccctccaccatactgaacttcttcacttgtttcttgtgcaatttgtcttagatggctcaaagcctgaaataagactccgaacttaagaaacattgcagcataccaagtcgttcaggtcatatacagtttggataaaggtatttgaacttacagcaacagtcattttctgagcaagaatcttcgatgattcatagagaggcctcatgacttcagggacactccaggccttgcaaaaccgaaaaaacaaagtcatgatcatattataaagagagaactgaagtgttatgaaccgattcgagttgtcacttacatccagatcaacatgatcaacaatgtggagaatggaaccaccaccatcgcaaggacggatgagaaacccgcttggtttcatttcagctctcacaaagtttgaagaaggtggcccagtggggccaccagttgcagaagtaagcgacctttcacaaac

SEQ ID NO: 161361 - DNA, 408 bp, Arabidopsis thaliana landsberg
agtttagctccatcgaccatagcctctccaatcgaagaagagttgctccatctcgaagcctcctcggattcggactcgtcatcgtcgtcgtcgatgaaagacgaattaggatctacggaacggagcgtgagcaacaacaaaccaaaaccgatgaagaaaaccacagatgataagagaatcgtcttcccgaacaaccgcttccgtcttgttccaccgcgtttcatctcttcctcatcgtttcttttctccgtcgtgggaaactcgaacaagtgtagagtttcttacatcagagctttggatgcgattgacgcggtgccgttttggattcgttcgtgtcggtggccgttaaactacgtcaaacggtatcgtattaacactaaactgggcctaactaactatatctattaa

SEQ ID NO: 161362 - DNA, 327 bp, Arabidopsis thaliana landsberg
gaatgacctttttacccttacttttcctcttcttcttcctcacatcaataccctttcccgccttttcccagttcaacgaccggtcaacgctgcgaaacctgaaacgcgatctcggcgacccattgtctctccggctatggaacgacacatcttcaccgtgcaattggccgaggattacctgcaccgctcggaaacgtcaccgagataaacttccagaaccagaacttcaccgggacagttccaacgacgatttgcaacttcccgaatctcaaatccttaaatttgtcgtttacttacttcgccggtgagttcccaacggttctttac

SEQ ID NO: 161363 - DNA, 154 bp, Arabidopsis thaliana landsberg
tgtgatgctaacaatcaagatgtgatcagaagtcactaagtcaagccaagcaataacaggttttggtgtgttctaacagtgaacatgcagaaaacagaaaatcaagcagaaacaataaaacactcgaccaacacagctctttgcagagcactag

SEQ ID NO: 161364 - DNA, 306 bp, Arabidopsis thaliana landsberg
gtgcatccatcatctgtattgagtgccgacaatgacggaatgatgcctaactacgtagtgtaccatgagctgatttccaccacacgtccgttcatgcggaatgtttgtgcagtagatatggcatgggtggctcccatcaaaagaaagatcgagaaattaaatgtcagaaaattgaggtaaaaacaaacattactctttactagttcaatccagtcttgttctagctttttctagtctggtcttggattcagtaattgatcggtatcatttaatctgccatgtagcggtggaccggctccctctttc

SEQ ID NO: 161365 - DNA, 548 bp, Arabidopsis thaliana landsberg
  unsure (1)..(548): unsure at all n locations
tacatattgacatcntgtttatctctttgtgtttcagtgtgagaagactggagaaaaaaactcctgatttccttgagctgctagatgagacacacagaaaagcggatggaagcttcatcgatgggaagtcagaggagatctacaagaaagtgacatctaggattgaagaggaagagtctcatatgggttcaggggacaatccggagagcactggatcaggtggactttctgttcatgccaagaacaagatatttattgaggtaaattttatgtgctctttcttttgtgcttgttgtgtctttagtttcaagtccttgtgttgtgtatggtgtctgaaatcctgcagcttattgtgttgtgtatggtgtcattcttcttggcagcttattattgtgtatggtgtctgaaatcttggcagtttattgtgttgtgtatggtgtctgaaatattggcagcttattttgttgtgtatggtgtctgaaatcttggcagcttattgtgttccgtatggtgtctgaaatcttgacagcttcttgtgttgtctgaaa

SEQ ID NO: 161366 - DNA, 784 bp, Arabidopsis thaliana landsberg
atgttcactcgttatcttgtcttgtatgttgttacgagcagtgcacacacagactgcattgtgacagaggatcacgaagttgcagagctattccttcgccaagtggataggtaaagtactgaatctttaacttgcttattatctgtctttgatttttcttggaaactgactgtaagatgttgcgaccttgaacagcgctgctgtgttccacaacgccagcacaagattctcagatggtttccgatttggacttggtgcagaggtaagtcagagacatacacataagtctatagattaaaaacaaattaaaagaggaagagtgagtgataaaaaagtattggttgtggtatataggtgggggtaagcacgggcaggatccatgctcgtggtccagtcggggtcgaaggattacttacaacgagatggtacaattttagttactcaaagcaccattgttatgtcaataaagacccacaataagccttttttcctatgcttcttttaattttcatggtgaaatggttgcaggataatgagaggaaaaggacaagttgtcgacggagacaatggaattgtttacacccatcaggacattcccatccaagcttaaacaagacttccgagtgtgtgtttgtgtatttggttgagacttgaggagagacacagaggaggatgggcttttttgtttcctctctgcttagtactcatatcctatcattattattattactactacttattattgaaacctcgcttatgtagtggttttgatttagggttagga

SEQ ID NO: 161367 - DNA, 360 bp, Arabidopsis thaliana landsberg
gtcgtgcgatacagttctgggtttgctgaagaagactctggaaaaaagttcatccatcacaattgattcgtgttcttgaaacgaatctatcgattcaaacacatgtatgtattagacaatcttattcccttcttgtgaatcgttactcttcaatttcatctttcgatttctcgcttttttctgatcaggaaacattcggtgaatcggcctccgacaccagatgaagacgatgtggcggatggtttcgagaaagacaaggtcacgcttcaagaaatcatcaacgtcaaggtttcagattttgtaaaaagaaatcgatttcagttactgttgtggacttttgattgaaaggtctttgggaat

SEQ ID NO: 161368 - DNA, 828 bp, Arabidopsis thaliana landsberg
atgggaccagaatctaaaggacgagcatggtttagtaaaatctacaacaagttggaaaatttgcttgttgaggttgactctttcacttctcaggttagtccattgtttgattgtcattatcaattttagctaataatgtctaaagaatagagagaatgagtgatggttttcttatgttggcacagagcacgctttgtttgaaatcaagtgaacctccgttcgtgccatatgttagaggagaatcaaaggaagttgcagaggaccattcttctaatgtacaaggacgtcatgatcgtgttgcttcaccaagttgtaatagtccttctgattcaccgccatgtcagaactttgacattttaggacatgtgggggttgaggaacgagttcaaggtgacattttagtggagaatatagctcacggagagaattcatcagcctcctccttggatggtgaagaaacactctccacatctccgttgcttgaagagctttgtgatgctaatctgacgtcaaccagtactcttggtggtgaagaaccaatagttaccgatgatgagtctcagatcactaacactttaacacctcagaaattttctgctgaaaactcttctgtctttccaggcgaggaaagtgtacaagaagttagagttgaatcctccttgtctgacgaagaaatactctctaagtctccattgctcgaagagcattgtgatgctaatctgacatcaaccagtactcttggtggtgaaggaccaatagttaccgatgatgagtctcaaatcactaacacttttaaccctcagaaattttctgaagaagaaatactct

SEQ ID NO: 161369 - DNA, 272 bp, Arabidopsis thaliana landsberg
gtctcttcactgtgtgtcttgcgtggtcgtcgttgacaagtgtgcgaatgcaccttagtattggagattgcaatcgtacatggtgacgattatagaatcgaataaacttcaagatgttcatgaagaacataagattgagagtctgaagttgcctctcttgcaggataatcaaagaccaaagaggttgccatggattcagcttggagttttggtcataatgggcgtgtcttacttcgcagtttatgttcttcgtgcgaaccaatatggcgagg

SEQ ID NO: 161370 - DNA, 511 bp, Arabidopsis thaliana landsberg
tgactctagtctatctccaatggctgaacgagtctatcccgccgattcaccaccacaaagcggacaattctccggcaacttcagctccggcgaattccccaaaaaaccagcaccaccaccatcaacatacgtaatccaagtcccaaaagatcaaatctaccgtatcccaccgccggaaaacgcacaccgctttgaacaactctctcgtaaaaaaaccaaccgcagtaactgtagatgctgcttctgctcattcctcgccacgattttcatcttaatcgtcctcgccggaatatccttcgcggttctctacctaatctaccgtcccgaagctcctaaatactccatcgaaggattctctgtttccggtatcaatctgaattcaacatctccgatttcgccgagttttaacgttaccgttagatcacgtaacggtcacggtaaaatcggggtttactacgagaaagaaagctctgttgatgagtattacaaccaccgttgatataagtaaccg

SEQ ID NO: 161371 - DNA, 426 bp, Arabidopsis thaliana landsberg
gcagtgatgaagcagagtgacgacgacggggataccggcgaagagagtggtttcgatccagagaagcacgttgacgcttacttgcctgttcgagtcaacgagcagagagtgagcaacctgttgcaatcattgctagtgataggtgcagtgtttgctctaccggtcattaagctcataccgacttcacttctatggggatattttgcttacatggccattgatagcctcccagacaatcaattcttcgaacgaacagtacttctcttcgtcccaccaacccggagattcaagtatgtgctctgaaaatgctctgttttttttgttaaaggtttccttcaaagactgatcatgtgattgttttttgttgttagggtcttggaaggagcgcatgcatcgttcgtggagaaagttccgcataagtcaatc

SEQ ID NO: 161372 - DNA, 723 bp, Arabidopsis thaliana landsberg
gtacaaccgagcagaaattgtgcgtgatttggcatggagagtaggacttgaacttctcgaccttccctctgaaatccaagagaagctcactacactagagaaggaatacttcaaaaaccattcggtagctctgaaatcatacatgggaaaagttggaatcgagttgaatgtcgtaagtcctctttccaccaccctggctttcttaattaattggattttacttgtttggtggacttgtaacttgtaatctcctcttgatccatttcttgaaggatatggtccctcctaaagatccttatatcaaggtcagaattttggatgatattgatgaaggaatcgtgctgagtgacaaaacaacaaattttgcccgtcattctatgcatttcctcaaacgtactgatgcggaaccatacattgctcgggtcagtctttttcgttatcccttccctaaaactagaatgatctaaagcccataaacttccacgaactgagaaattcaaagaatgagccttgctcaaattcgcagagatgtagatagaaccttgattacagccttccctagcaggtttaataggaaaaaagaagactgcttaagatagattataactgaaaaaacgaaactatagaattcctgaaagatctgaatagtgatgcaaatagaagtttaggtttagaattaagttttaaaaatgatgcgtgaagtgtaatctgaagaatagattt

SEQ ID NO: 161373 - DNA, 646 bp, Arabidopsis thaliana landsberg
tcaccatacgtgtacagctccccaccaccaccgtactactctccttctcctaaggtatactacaagtccccacctctcaccgtacgtctacagttccccaccaccaccgtactactctccttctccaaaggtttactacaagtccccaccaccaccgtacgtctacagctccccacccccaccgtactactcaccatctccaaatgtatactacaagtccccaccaccaccgtacgtgtacagttccccaccaccaccatactactctccttctcctaaagttcactacaagtccccacctccaccatacgtctacagctccccaccaccaccctattactctccttctcctaaggttcactacaagtctccaccaccaccatacgtctacagctccccacctcctccatactactctccttctcctaaagtcacttacaagtctccaccaccaccatatgtctacaagacgccttattattgattttgaattgtttctttaagaagaagcatgagtgcaataatttctttttatgattggttttttttattcttctgattttgttctttgttgatttatcttgttaagctttttttatgtaataaaatttggctatctttttaaatgcacttttttgttcctatt

SEQ ID NO: 161374 - DNA, 497 bp, Arabidopsis thaliana landsberg
  unsure (1)..(497): unsure at all n locations
gagtcgattgaaattttactccttttgaacagagacgtatcttgaatctagacatgggatctcatgagcaatcgcctgagaataacggttcgagcactgtatcgaagaaagttgctgatatttggcaacgaatgaacgaaggagttccaaataaacgtgtcaatttcgtctcaaccgctttgcccgctaaaaactcagctaatagcgtnnnnnnnnnnnnnnnnnnnnnnnnnntttgattcttttcttacgtttgggattttgaatgtgtttttcaaaaaaaatttgcagaattggaaaagttatctcggtgtgaatgtgaagaagaaggatacttgtgtttctgatgtacagaagagtgttttgaatcatagctgtagtgaggaggctaagagtattgctgcagccgctttagctgcggtgcgaaacgcaactgtaacggctgcagctgcatcgagccggggcaagattgaggttagaaaagttttatgtttgaa

SEQ ID NO: 161375 - DNA, 2646 bp, Arabidopsis thaliana landsberg
tcttatctatcatttcctttgccagctccatctctctctctctctctaaaaccagtctgcaactttctctctctcaaaatcagaaacaaaaaaaacgatgtcgtccgatgacgaaggaggagaagagtatctattcaagatagtgataatcggcgactctgccgtcgggaaatcgaaccttctctctcgctatgctcgtaacgagttcaacgctcattccaaggccacgatcggcgtcgagttccagacgcagaatatggaaatcgaaggtaaagaagttaaagctcagatttgggatactgctggtcaagaacggtttcgtgccgtcacttccgcttattatcgcggcgccgtcggagctctcgtcgtttacgatataagtcgtcgatccacgtttgagagtgttggtcgttggcttgatgagctcaagagtaagtctgtattgattttgattgcgatttgattgagctaagattagtatttcctcaatttgaatagtggatttagtcaattaggtcttgaaactgcaaattaggaagctggatttggtggaattgtggactttattctccagatttggtagattgtgttgattgattaggagtttgaatggttgtggcgatcatggcggacaaatgtatatgcggtttggactgctttttatttaccattcataaactataatccgtagtagtgcggatcgaaaaaaatagaacaagtctgcagcggactaactacgtaccgcttttaggtagaagtaaactttgtccaccacggtttgttatccgctccaaaaatagagggttgtctagtccgctaacggtttagatcttcaagattttctggtgacttattctttacttaggccaaatgtgaagtctatatgttcaagtttgatttgatactggtttgttgattcatttgtggtttttgttttattttgccagcacattgggatacaccggttgcgaggatgctggtgggaaacaaatgcgatctagaaagcataagagcggtgagcgtggaagaaggcaaagcactagctgaaaccgaaggactatttttcatggaaacatcagctctcgattcaacaaatgttaaaacagctttcgagatggtgatacttgatatctacaataacgtgagccgtaagcaactcaactcagatacttataaagacgaactcaccgtgaatcgggtaagtcttgttaaggatgataactctgcctccaaacaaagctctggtttctcttgttgttcttccacttgatgatataccacaccaaaataatccttttttatttctcacaactgtaactttattatataaatttttgtttttttctttgactcatggaagaaaagaaattcatgaactgtaatttatttggtcacattaattttccttttataattttggcaaacattcaaaagatctattcattctacttgggttatttcctattttaaagaaactaaatttgattggttggttttgtgatttttgtcattatttgggaaaagcgagggaaaataaatccaaataggggaagaaaaaaagagatggcttttcaccgagttttctctgcttttgtaacaacgaacatgaaccaagaataatcttttctttccctttttttgtttgtcccacaattcttcaaattttcttctctctatctaattctcacggtggcgatgtctttacctccgtttacttgccgccttctcgcggcggcggcggctctctatctgataggtctgctgtgcgtcggggctgacacgaaagatgttaccgctcccaaaattcctggttgctccaatgaatttcaaatggtaacaggtttcccaattcgagttcctaatcatcaattttatggaatttcacttttaaccttaaaccggaatcgtttttgcctttgtctaacggaccctacgtatatatctcattgattgatttgaatcttcattggaattgcattcaaccacaaatgcagcttttgttaaatttcaataggtttaggttaaatccgttattgaaatcgattgatgatgaggatggggtagtttgttcattgattttgataaaaattgattgatatgatataaagcattgttccttttccccacaatatctatgtgatcaatattgaggtttctctgtttctgtttattaccagttgtctataaatagattcatgtacaacaaaacttctctacattatcagatcgctcatgcaactactgattattgaacattgtccaggtcaaagttgagaattgggtcaacggagaaaacggtgagacttttaccgccatgactgcacagtttggcaccatgctcccgtctgataaagacaaagctgttaaacttccggttgctcttaccactcctttggacagttgctccaatttaacttcaaaggtcttcctttttcttttccatcttatatcgtacagtcctagctaggactcaaataccactgttgtgaagatgagcttttttgttgttgtgatgttttccttttgcagctatctgggtctatagcgttatctgtacctgccgagtgtgctttcacagttaaggctcaagttgcacaggcaggagcagctgcagctttggtgttaattaaccacaaacaaggttga

SEQ ID NO: 161376 - DNA, 372 bp, Arabidopsis thaliana landsberg
aatggtgaatttgcttttaattttcttttcagggtgttggtgttctagcaaagagtaccacttttgctaagaatccaaggcaactgcaatttgaagccgacattaacaaattgtttatgtttacaaggttggtatttttttggtatagattaagagcttttgaacaagatttataatgttcaaggatgtaggattatcaagtatcaacttgtctatttattgactaagcaaagagtcagtctctgtaattgttggagattttttccactatatggctcacggagtttctctgtgatatagctataatcgtttgggacgagatgctgaggaggctgatgctgaagagattattgagatggctggtaaagccac

SEQ ID NO: 161377 - DNA, 607 bp, Arabidopsis thaliana landsberg
gactggtttaacttgagggtctctattgtggtggcacttagatttggttatcgaacttgttgtctagggataatttattgagcatgtcaatcaccagtaaacaaacctactcgattatcccatcctcgggaattctttatctaattgatttctttgtttactctgctgttgcttactgcatcttgttacatgttgcttagtttttgaatttctttcctgttactcaacctgatactcgaccacccagttgtctggcaatagactgtgctgtcgagtatccctgttacattttttgtctgttacttaacctatcactcgaccacacccaatgcttgggaacaagctgttttggtcgagtgtttttactttttctgcttgaatttttgtttccggcatgttcacttaggactgctacaaaccccaaaacctgttattgtttggcttaactgtgttttttttttttgttttcttgatccaggtacacctttgctgtatgcgaactcgatcaacaggcaaccagaacctcttttccaacaataacatcgaccgcatagctcgcgaactcagagaaaagagaaacacagtcgaccttgtacaacaccaataa

SEQ ID NO: 161378 - DNA, 661 bp, Arabidopsis thaliana landsberg
aaacggatatatcgcgatgcagaattataaaacagtgaggtacgattttattcgcttttcttttcttcaaacttgtatctttctggtttcatacggtgtgattaaaaattgcaggcaatcttgaagagctccacagaagctacaaaggattcacgagtcttggattttgtacacatggtaaggcaatgaggacataagtgatatattcactatgtttggtcattggtgggtgaagatagtaataaaaatttattttgggttgcagattagttgtcttcagtataagaaactagactttgaagagttttgcgcttcagctttaagtgtatatcagctagaagcaatggagacttgggagcaacatgcacgccgtgcatatgagttgtatgagaaggatgggaacagagtcatcatgatcgaagaacttgccacggtataaaacttctcttcgagatgtgatatcaccgatgtctttggttggtgcttgatgcgtttgtgcatatgtgttgttttgttgtgacaggaactcggactaggtccatcggtgcctgttcatgttgttcttcaagattggataagacattctgatgggaagctaagtttcttgggttttgtcagactcttacacggcgtctcctctcgtacattgcagaaagcgtag

SEQ ID NO: 161379 - DNA, 837 bp, Arabidopsis thaliana landsberg
tatgagaggcagtagtgatggttggtgcagtatatggattaattctttttattgatattgctcttaacaggaggcctacttcactccatgatcgtagtagagatagtgatgatgatgattaccacgatagagattatgatgtggcagccctagcaaacaatttgagccaggcttttcgatatggaatttacagcaatgatgacatggatgaggtgatgttctcgtgtttccttttcatagctgctacgtgtgacttttctttggaaattagtattatccaagattttggccgcatatttcaataagttttggaatgtcatgggtgtagactgtttagtcaaaggagggaattgattcaggaattttcttggaattcatttttatttatgttagccatcctgtgataggtcctgaaatacatagtgaaattggatgcaatactgtctaaagttttgctaatgtattggaccactggggtggatccagttaccaaatctctgtatttggtggatagttaaaccgtcatttctttcttcaatcattctgcttggttgaccactggatagatatagcattgggggtttcagaccatcttctcttcctttattatctttaatgtagcctagaagtagcttggataaagtcggttaacctgagcaactaaattccgtcagagcttttgatttcattgcattgttttcctcatatcacattgttctaccattaacatatctatattatccactgcaggcccaaggctctatggaacgcgatgatgaggtattgttcgtcttttccttatatttaggaattgaggctcgacttcatttgtggaaa

SEQ ID NO: 161380 - DNA, 973 bp, Arabidopsis thaliana landsberg; identical to SEQ ID NO: 8793

SEQ ID NO: 161381 - DNA, 665 bp, Arabidopsis thaliana landsberg
gtaaagaattatgacgtccaaagccgcatgggaacctgaacacgacgaagtatttgtggacttatgcgtcgagcaaaagatgttggggaatcaacctgaaatgcaacatatattggaagcttttcaagaaatgggtgtgcggttcaccatagaccagcttataaatcattgggatacaatgatcaagcagtggaagatttggtgtagacttgttcaatgcaaagatatcaaatgggattccttgacaaacacgtttggtgccactgatcaagagtgggccaactatttagaggtacaaattaacaacgttttttgtgtgttgattttgattgtttatgaaggctaatatgtaataaaaagagcttgattggaattgtcataggtgaatcctgaggctgggcagtatcggtgtaatccccccttgttcctcgagaaactagagattatctttgcaggtatgaacttagatggtgaaggttcttcaggtagcaaaatgaagcaaatatgtgagcatcgtgatgaagaaaatgttactggatatgtacctaggctaagcgcgtctgatatcgcgactcgtcgtcattataagtggtcaccatcctcacatgcgattgttgtggacacgtgtttccaagagtctttaaaaggaatcagaccaatcaaac

SEQ ID NO: 161382 - DNA, 544 bp, Arabidopsis thaliana landsberg
acgggaaagatagagttggatcatgcagccgaacgggaagtagggcttcacatgcttcagtatgctgaggtaagacatatactcattagattgtacgttgatattcttggtaacaagaagatgaacagttgttgtgtactatctacttgcagacggtggaggaagcgtgcaccacattgctaccgaatgtgctttgcaagtacctttactacttatccgtagagttcaccacattgaactcgtattgtcaggtgagcattccatattggtatggatgactagactgtaggcaaacaaacctcagcattgttctgatctttctctatacaggtgaatggttcggccgatgagacgagccgtttcttactttgcgaagcaacggctatagtcagagcggaaatgctgccaccttgttggaatcacccctgtgtacaagctttgatgcttgacaatgaacctaaccaaaggcattaggatttgttttctgtttcgacgaattttgtacttgagcgtttgaacactgttttggttcatatgatgttgg

SEQ ID NO: 161383 - DNA, 752 bp, Arabidopsis thaliana landsberg
tcaaatctcatatagttgggaatgccagtacgggtcgacatttggtccagaggtttcaaatctcataaaatttttggttaagccaaaagcttctgataggtttgacaacacatctgaagctttataagctgcagctaaagttgctggagggacattcaagcaaaggtcaacgagattttttgaaagctatttgtgaaggtgaagccttagatgtggctgatccaaaagcttggaaatgtgatcaaattatttcaatggtaaagtgggactatacacgaggagcattcccaacaacggagttccctttgttcttacagcaacaaatacaatctcatttgtgaaacataaatcttgcttgcagtttaccttttctacaagtttccttttccagttagggttttctccgatgggatatatatatatgtatatatatatatgttggccgcttggcctgtaaaatttaaacaagaaaacatcacgtactcttgaattgtcataaatacattcagcacaatcttacattacattcagtgccacgttaggccgccgtccgtgtctgtagagatcaatcatgctaaccgatcttcataacgatttggtagatgagatactgtgtgtctgtgtcgcgttccggcgaggaatctgaaacggttacgatctaccagcaaacgatggaaccgtttattcaaagatgataggagattcgcaagagagcacatgcataaagccccaaaggagtatctacctctcat

SEQ ID NO: 161384 - DNA, 1374 bp, Arabidopsis thaliana landsberg
  unsure (1)..(1374): unsure at all n locations
atgcttctctagggaatcctttaacctgacatgtggtangatattccatcaaaccgctgggactgggctgttcttagagatatgatatcaaagaatggagtgaggaactctcttttagtagcaccaatgccaactgcttcaaccagtcagatcctcgggaacaatgaatgttttgagccctatacatcaaacatctacagccgcagagtcttgaggtgtgtgattaaataaattgacaatgtatgtttctggttttccccatttgctgcctactcattgggtcgtcttggtttgtgcagtggtgaattcgtagtggtaaataagcatcttctccatgacttaactgatatgggactttggactccaacgttgaaaaacaaattaattaatgagaatggttctatagttaatgttgctgagatacctgatgacttgaaggcgatttacaggtatagcttccacttattttgtgttttcactccctgtctagatacagagtttgacttgttttttctgcaaaacaatacagaactgtctgggaaatcaaacagagaacagtggtagacatggctgctgatcgtggatgctacatagatcaaagccaaagcttaaacatacacatggacaaacccaacttcgcaaaactcacttccttgcacttttatgcttggaaaaaggtacaaaccttaatcatctaaactcttcgtatgataattgtgaaataggttagagattctaaagagtatctgatccttcactcatctgacaattactcttaatctcacttatgttgttgtgaatctaccttaagggtctgaaaaccgggatgtactacctgcgatcgcgtgcggcagctgatgcgataaagttcaccgttgacacagccatgctcaaggtagaaaaaacaatgcaaactctttacgctgattcatcttgtgaattcagacattttacatgtgagttgttgtcgttgggcttaatgtaggagaagccgagtgtagcagaaggagacaaagaagtagaggaagaggataatgaaactaagttggcgcagatggtatgttccttgacaaaccctgaagagtgtttggcctgcggaagttgaagctctaagttatagtttgggtcttaaaaagttagaaagtaaaagcatgtctcttggacggtcttttttatttacttgcttatctgggtgtattttgttaatagtttcctaatgcttaatgttgcttgagtttttgtgtaatccagtttcgtttttacctttgctcttgaaacaataagaatttgtaacgagaattatgtataggcaccaccaccaccaccaccacttacggtagattttactatccatatataaatattggtaccata

SEQ ID NO: 161385 - DNA, 437 bp, Arabidopsis thaliana landsberg
atggtctatgggtaagctgtactatgatgaactcagattcaagttcctttttcattcaaatgttaatagtaattgatcatcctggtaattcttccaacatgtttgcaggagaaacatatctggccaggagtttggaggaatgtactgcttggtcctgatggtgaagtatgtctggtgttcttgatgcatttatctttctctctgtattgttgttttaccatctctcaatctttctaattgttttttgctgcgtttttagttccctagttgtttctgccgcgctgcttaggatatttggtcagaaagttgcagaacttcctattgtagctacaagccgagagtatcagggaagggtaagcttttggacatccaatgtttctttgctgggtcggattcgcttgtttgtttataacttgtgacaaacccaatttgttaat

SEQ ID NO: 161386 - DNA, 604 bp, Arabidopsis thaliana landsberg
ctctaccatatcatctgccttctcctcctcctatcccgatggagctagcggtctttcaccagtacgttgttgacagcttcaaaagcgtttggaacgctatagctacactttctcgctacggttgtgttgctcctactcgtagacgtcatcgctctcccgcacccacctccggctctaagcataagaattaagccatcctccatatctatgctttgtactctaacttttcttttcttttctttgagacgatttgttgtttgcttcaaaacttgttgcacttattatcctatgctttgttggacctattgatgtgtgtattagtgatttaacagttgaactgaaggatccatgtgaaaacactaacctgaactctacaacactgagctgaattcgcaaagctctgtaaaaggaccagagtgtcgatcgacaccacactggtatcgatcgacaccacttcacagaaaaggtggcaactcacgtttctctatcttttaacttttgattatttttattttggttcctctatcttgataactttgaggacagtgttatctaagtatgggggagttagtgacttactttatcttttcctttcgtatgagtc

SEQ ID NO: 161387 - DNA, 412 bp, Arabidopsis thaliana landsberg
  unsure (1)..(412): unsure at all n locations
tgaccctccgagctctttggngaaccgggatggtttgagtcactacaacatgaatggaattgcagaggtattttccatcaccattttgtctgaagtcattgatatgttgttcccgagtggtcgtgaattttgataacaaaatactattttaaaaatgtttcaggtattgttggccctggaaaggattgaacatgatgaagagcttacatatgaggtataaagcagcttggtattttgatatgaacaagttttgtctgagcttatggttttcctgacgatgctaatttctgttctgcttcttttcccatagcaactggcttctatagagaccaatctattctcaagtggtatgttcagattctacgatcagcatagagatatgaggcttgacatcgataacatgtcatatgag

SEQ ID NO: 161388 - DNA, 314 bp, Arabidopsis thaliana landsberg
ttccctcataaaccatattaagaactagcttatagataaggatatggcctttacgaacgtttgcctatggacgctactcgccttcatgctgacttggacagtgttctacgtcacaaacagggggaagaaggcgacgcagttggcggatgcggtggttgaagagcgagaagacggtgctactgacgttatcatcgttggggctggagtaggcggctcggctctcgcatatgctcttgctaaggtatgtaaagtggcgtcacagtttaacagatttgcgtcttagtattaaaatgattctttgttgttttttggaa

SEQ ID NO: 161389 - DNA, 835 bp, Arabidopsis thaliana landsberg; identical to SEQ ID NO: 8772

SEQ ID NO: 161390 - DNA, 737 bp, Arabidopsis thaliana landsberg
catggctttcgagaagacccgccaatttcttcctccgcttcactttgttctcttccctttcatggctcaaggccacatgatccccatggtggatattgcaaggatcttggctcagcgcggggtgactattaccattgtcacgacgcctcacaacgcagccaggttcaaagatgtcctaaaccgggccatccagtcaggcttgcacattagggttgagcatgtgaagtttccttttcaagaagctggtttgcaagaaggacaagagaatgttgattttcttgagtcaatggagttaatggtacatttctttaaagcggttaacatgcttgaaaatccggtcatgaagctcatggaagagatgaaacctaaaccaagctgcctaatttctgatttttgtttgccttatacaggcaaaatcgctaagaggttcaatatcccagagatcgttttccatggcgtgtcttgcttttgtcttttgagtatgcatattttacaccgaaaccacaatatcttacatgctttaaagtcggacaaagagtatttcttggttcctagttttccagatagagttgaatttacaaagcttcaagttactgtgaaaacaaactttagtggagattggaaagagatcatggacgaacaggtggatgctgatgacacgtcctatggtgtaattgtcaacacatttcaggatttggagtctgcctatgtgaaaaactacacggaggctagggctg

SEQ ID NO: 161391 - DNA, 289 bp, Arabidopsis thaliana landsberg
ttaagatgctattcttttaggtctagttgataggtcatggatttgttgttatatggagtctagacattttgccactgctttagtgttcttagcttctaagggtttcgttgatatattgtactgggtttatcgtttccaggcatctagtatggctttctgcactaaacttggcggtcactggaaacaaggggtaaatgttccagtgtcatcaatgctcggttctcttcgctacatgtccacaaaactttatattggtggtaagtataacttcctatcagattgtttcatt

SEQ ID NO: 161392 - DNA, 364 bp, Arabidopsis thaliana landsberg
caaaggaaatggaatgagtactgagcatgtgatgcaggagtgcaagttgttctatttcgccgggcaagagacaacttcggtacttctggtctgggcaatggtgctgttaagccaccaccaagattggcaggctcgtgcacgagaggaagtgaagcaagtttttggcgataaagaacctgatacagaatgtcttagccagctcaaagttgtaagtataaaccaaatcataaaccttcaggtgactttagtacttttattgtgtttagatggttttgctgaatgtttccaacagatgacaatgatattatatgaggttctcaggctatatcctcctgtaactcacctgacccgagcgattgacaaa

SEQ ID NO: 161393 - DNA, 243 bp, Arabidopsis thaliana landsberg
caccttctcggtgggggagaagaagagtaagagaagatgagggtgtgcatgtggtgcgattcacatctagtagcgccttcgattctccatccatggacttctcctgggataaggtagctaggtttggtaccagtcgttcgccgttttccgtctagtgcgtctgtcaaggcttcggcggtggattcacctgagagttcttcggatgtcggcaagcgtatggatcaagcgtgggttgtctcgcag

SEQ ID NO: 161394 - DNA, 1579 bp, Arabidopsis thaliana landsberg
atgcaactctcattcttcaatattttcaattaccagcttctggatgctacaaccaacggtaaaatctttaatctttaggtcttgctgttgttactcaagttttctcctttgactcaatatttcatttttcttaggttcaaaggattccaggaaatcaaaggataaactgttaggagggcttttaacagctgattttgatgaagattcttgcttgagtaggtatgagtcttccttgtatcgcaagccttcaccatacaaaccatccagatatctcgtctctaagcttagaagctatgagatgcttcacaagcgttgcggtccaggcacagaagcttacaagaaagcaacggagattcttggtcatgatgatgagaatcattcaaccaaatctgttggtgaatgcagatacattgtgtggattgctgtttatgggctaggaaacagaatacttactcttgcttctctgtttctctatgctctcttgactgacagaatcatgcttgttgaccaacgtacggacataagtgacctcttctgtgagccttttccaggtactttctggctactccctctggattttccactaacagatcaattagatagcttcaacaaggaatctccgcgctgttacggaacaatgttgaagaatcatgccattaactcaactacaacagaaagcatcatcccctccgacctctgtctttatcttattcacgattacgacgattatgataagatggtcttctgtgaaagtgaccaaattctcatcaggcaagtcccttggttggtcttcaactcgaatctttactttatcccatctctatggttgatcccttcttttcagtcagaattaagcaagctattcccacagaaagaaaccgtctttcaccatttggctcgctatctttttcacccgactaaccaagtttggggcatgatcacaagatcctataatggttatttatcaagagctgatgagagacttgggattcaagtacgagtttttagcaagccggctggatatttccaacatgtcatggaccagatcttagcctgtacacaaagagagaaactattacctgaagtgtttgtcttagaaacacaagtcactaacacatcaagaagctcgaaacttaaagctgttcttgtcacttctctttacccagagtactcggagattctaaggcaaatgtattggaaaggcccgagttcaacaggagagataatacaaatttaccaaccaagtcaagaaatatatcagcaaacagacaataagcttcatgaccaaaaggcactcgctgagatatatctcttaagtttaacggattacattgtcacgagcgactcgtctacgttcggatacgttgctcaaggtcttggaggattaaagccatggatactctacaagccaaagaaccacacagctcctgagccaccatgtgttcgtgccgtgtcaatggagccatgtttccttagagctccactctatggttgtcaagctaagaaagtgaacatcaccccttttgttatgtattgtgaggatcggatcacgggtcttaagctagttgattcaaattag

SEQ ID NO: 161395 - DNA, 1068 bp, Arabidopsis thaliana landsberg
agctagctatacccgatatggaaccactacctccttatttctctagagctaaacctccatgtcgtctttccgatccggctcagccccacatgctttgccgacggcgacggccatctcatcctccactttctatctgcttttcttgcaaaggcaagcaattaaagcgcaataattattattattactgtgctacttgcaatttggaattccatagaggctgtcacatctttctgccggagataagacatccttttcatccctctcaccccgtcaccttcaccgccttagatcctgaatttaatgcttctatcatacaccaaaactggagggacagctccgcttcagaggaatcttccgaagaattgataaacgaagttgttgactatggtcatgaagacgatggtgatgatgacgattatggggatggaaatggcggtggcggtggcagtcgcagtggcagtggcgatgtttatgatgtcgcttataatgaggaaccctatatgttcttccatggaaatcacctgaaatgcaaatgttgtgcttctcctttagaaaagctatattatcattgttctatctgcaagttcaatcttaacttgacttgctcgatgagaccaccacccaccactatctcacacttgaaatgtcatgagcacaccctcagcctcttccttatacgaatccacttgccatgtgatgtttgtggcttgcttctaaacaacgacagcaaagatcttgtttacgcatgtctcccttgcagccttatggtccacagaacatgtatctatctacctcgtgtcattaagatcacccgacacccacatcgtctctctctcacttcctcccttcaacctggtgttttctcttgtggagtttgtcgccaaactgttgacgtcaactgcgggcaatactcttgtgataagggatgccaatatgctatccattcgagatgtgccacatggagagacgtgtgggatggaaaagatcttgatggagtgcctgaagaacccgaggagtatatcgaaccgccattcctgaagattgatgaggagacaattcaacatttca

SEQ ID NO: 161396 - DNA, 948 bp, Arabidopsis thaliana landsberg
ctttcttcttcaaaagttcgaaacttttttttttccggcaatggagggactagttccggtacagagacttccaattaaagtggcttcaccttctctgtatcggtgtaacaattctgtctcaatcagacgttcaatttcaggttttgccatggacaggaagataaactttagggctccgtcgcaattctcgatccgagctcaacaggtgcgaccaaatttttctcctttttttgattctatgaacaccctccattaaagttcgagtctttcgtttgattctgtgtgatttatgttgtccacggttgttagattgaactttgtgattgccttgagtctaaaaccctatctggaacaaaattgggggtttctgattataatgttatcaatctgttgctgaaagtgtttgcctttttgttttggataagtcggatttgaaggaaagcttagctgtgtcttcttcatcagtagaggataaaggaaatgttcttagaatcaaggaatgggaagtagagatgtatcaggaggaattagctattagtcaaggtattaggataaggagaaaaccaccaagtaaggctcctttgggatactctggaccatttgagttgagattgcataacaatgatgctgattctcctcgtaatatcttggaggagatcacatggtacaaagacgtagaagtttcccgggtaaagactttcttttacaagacttttctttcagagctttgtgtgagtttttcttaatggtggttgtcttttggttcttcagatgaaggagctaaatccgcttgacgtgctgaagaaagctgtagaggatgctcctcctactagggattttgttggggctcttaggatggctcataaaagaactggcttccctggcttgatagctgaggttaagaaggcttctccaagtagaggaatcttaaaagagaattttgacccg

SEQ ID NO: 161397 - DNA, 912 bp, Arabidopsis thaliana landsberg
ataaggacaaaaaaaaaattaacaacctaaaacaatggaagagccatttcttccgcaagatgagcagatagtcccctgtaaagccacatggaaaagtggtcagctcaatgtcgagctgaagaaagtgagccgcttggctgttcctatggccaccgtgaccattgcacagtacttattgccagtcatctcagtcatggtcgctggccacaacggcgagctccagctctccggtgtcgctcttgctacctccttcacaaatgtctccggtttcagcattatggtaattatgttatgactactctctcctcttatgttcaaaatcaagttgactctgaaatcttgataaatacttcaattctttgtgcagtttgggttagtgggttcactagaaactctttgtggccaagcttatggagccaaacaatacgaaaaaatgggaacctatacatactccgcaatttcctctaacatccctatatgtgtcctcatatcaattctctggatatacatggaaaaactcttgatctctctcggacaagaccctgacatctccagagtctctggctcctacgccttgcggctcataccgactttgtttgcccatgcgattgtcttaccactgacccggtttctgctagcacaagggttggttcttccactgctttactttgccctgaccacccttttgttccacattgtggtttgctggactttggtttccgcacttggtttgggaagcaatggagctgccttggctattagtgtgtctttctggtttttcgctatgacactctcatgttatgttagattctccagctcttgcgagaagactcgccgatttgtatcccaagatttcttgtcttctgtcaagcagttcttccgttatggagtcccatcagcggcaatgctttg

SEQ ID NO: 161398 - DNA, 375 bp, Arabidopsis thaliana landsberg
atcaatagaccaacgagaggaaacccagggagtcgattctccgggcagagtttgctaatgcaattgactttataaacaaagatctgccggaagaaaatcggcttagattcctccactgggacttgcacaaacattttcacaggtatccttttaatttgcgttccagctgcttcaaataatgttatctatcaatacatttttagataagaaccagttttctctcttctttgtctttatttcagcaaaacagaaaatgtattggcacttcttggaaaagtagctgcctgtgctttgatgctaacaggtttcttttattatcaacttacaccagcaatgaagcttgagggttatatgagcttgtcttcgtcggagtaa

SEQ ID NO: 161399 - DNA, 3323 bp, Arabidopsis thaliana landsberg
gttagtatggacccgaagatgagagccaatgcattttcagcacttggagctttaagtaaatatgctactggagggcaacgtgagggatttgttgagcaggtgacacaaacccttttcgattccttttcaataatgtcgaggaaagaagtttttttcagttttaatctcattggatgaaaatgtctaatatcagattcattccacccttccacgcttggtagtgcatctccatgacgatgatcctagcataagacaggcttgtcgggtattttttctttatagcctattgctcctttttttgctttgaggtatctttcagtttacatatccctttttattgaataggtaaccctcaagcggtttgctccactcgtggacataataaactattctaccctctatgattcacgtgcttttggttctgaagataggtatgtctcgccgtcctatgagtaccaaatctattttgtgcacaatgaccactgttatctctaaaatggtttgtattttcagaactgactatgaaaacttcgtaagggatctctcaaagcacttggttcaagagtcggaaagagttgatacttacatggcctcaaccatccaggttcggctctcctcgaataagcatcatagttgccaaattcataaactatatatatacaagaaaaactgaagtgagtactacccgttgcaggcttttgatgcaccgtggccagtaattcaggcgaatgcaatacacttctccaccaccatgttgtcactctcagaggatcagcacataatctctctctactacccacaggtatattagagaaactacatataacatgcacataagtctttattagttctcaagcctgtcatcttgttcaggtgtttgaaacgctggttagcaagatgacccggtcgcaagattcagttgtgagagcagcatgctcatcagccttcgggttactgctaagatcaagcaagtcaacactgtggagaggagctcgacttgacgggaccgactcaggtagaaaagccaatgatctcgaatctgttaagaaataacatgtgcattacggtctgtgtgaataccaaccagttactgccgaaaactttgggggggtttgcgatatatatccataggtacagtgtgcaatgagaaaccatccaggtttttgtgcttgttgtaaagtgtattatgttttcatcttgtaaaggatattgtcacttgtgtgtcatctctattaccaaactcaggaaagaaaaatccacacgaaattgttgtaggctgtggtcctctctttattgattataatttttgaggctagtgttggatatacttgtcttgacagagtccaacgtttgatttatcttcagttagtgtttcatatcagagtttaaacggtctttgaagtttcaaacacacattagattttggtaacattggtaatttatttatgtggcctctatgtttattttgatttttgagacttgacgatagatgtagctatcactatcagtgagccctccaagttgttgttttgtgtatgtgaattatcttcgttttctttatgaagatatgtttctaaacttttcctgagaaggaaggtcactacgatggtcacatacggacaaactaagtagcaagcacaatctgtggacttaaaaagaggtgtttggcaagtaaaaaactgtttacgtcatctgttacgtcttctgttcactttatgttttactctccacgcatcttatcctttataagctcgcacaaatcttaaccaaaaccaaaaaaaaacttgagagtttcttactaaggttgaatcatggtttccgaaacaaccaaatcttctgcacttcactttattcttttccctttcatggctcagggccacatgattcccatgattgatatagcaaggctcttggctcagcgcggtgcgacagtaactattgtcacgacacgttataatgcagggaggttcgagaatgtcttaagtcgtgccatggagtctggtttacccatcaacatagtgcatgtgaattttccatatcaagaatttggtttgccagaaggaaaagagaatatagattcgtatgactcaatggagctgatggtacctttctttcaatcagttaacatgctcgaagatccggtcatgaagctcatggaagagatgaaacctagacctagctgtattatttctgatttgctcttgccttatacaagcaaaatcgcaaggaaattcagtataccaaagatagttttccacggcacgggttgctttaatcttttgtgtatgcatgttctacgcagaaacctcgagatcttgaagaacttaaagtcggataaagattatttcctggttcctagttttcctgatagagttgaatttacaaagcctcaagttccagtggaaacaactgcaagtggagattggaaagcgttcttggacgaaatggtagaagcagaatacacatcctatggtgtgatcgtcaacacatttcaggagttggagcctgcttatgtcaaagactacacgaaggctagggctggaaaagtatggtccattggacctgtttccttgtgcaacaaggcaggtgctgataaagctgagaggggaaaccaggccgccattgatcaagatgagtgtcttcaatggcttgattctaaagaagatggttcggtgctatatgtttgccttggaagtatctgtaatctacctttgtctcagctcaaggagctggggctaggccttgaaaaatcccaaagatcttttatttgggtcataagaggttgggaaaagtataatgaactatatgagtggatgatggagagcggttttgaagaaagaatcaaagagagaggacttcttattaaagggtggtcacctcaagtccttatcctttcacatccttccgttggaggattcctgacacactgtggatggaactcgactctcgaaggaatcacctcaggcattccactgatcacttggccgctgtttggagaccaattctgcaaccaaaaactggtcgttcaagtactaaaagccggtgtaagtgccggggttgaagaagtcatgaaatggggagaagaggagaaaataggagtgttagtggataaagaaggagtaaagaaggcagtggaagagttaatgggtgagagtgatgatgcaaaagagaggagaagaagagtcaaagagcttggagaatcagctcacaaggctgtggaagaaggaggctcttctcattctaacatcacatacttgctacaagacataatggaacaagtgaaatccaagactgattacatcatttttagtacattacgataa

SEQ ID NO: 161400 - DNA, 1112 bp, Arabidopsis thaliana landsberg
gctgaagattttgtgaattctttggtgactttggctatggagaggaaggcaaagatgaattcatgcgagcctatggcggatttcagtgagtttcaggttagaaagaataatgccttttttatattttgcgtctaatattgttatgcttagttctttgggcaaaggagacttcaatagctgtatttgttttgcattggtcgtttaaactctgcatagattattaatcggttttagcaaatgtgaccatcaatcggtaaccattctctgcgttctgtatagttctgaatgtgaaatcattagctatataacagacactatcaagaaagaaaagaaaatgctataatgtagtttctgtttttaagattgtcttggatgcaatgtaggtattttttattgttcatggtggagttctattaagtttgatgcttgaaaaacggttttcttaactatttgacaggagtggcttgaaaagcatggagattacgaagctatactagatggagcaaatattgggctctaccaacaaaattttgcagatggtggtttcagtctaccacaggttctcatagatttttcttcctttgcatttctgaatacatattcctgcaaatactgacacagtgaaacattgtgaaaaagagcagcttgaagctgtagtgaaggaactttacaataaaagtggtagcaaaaaacagccgctaattctcttgcacaagaaacgggtcaatgcgcttttagaaaacccgaatcaccggaatcttgtggaagaatggattaataacaatgtcctgtatgcgactccaccaggttccaatgatgattggtatggactgactctgacttaagcttattttatactcccacaaacatggtttggtttggttatactcaaatcttggtttttttaaatttttggtttcaggtattggctctacgctgctgctaaactcaagtgtttacttgtgactaatgatgagatgagagatcacatttttgaactattaagtaacagtttcttccaaaaatggaaagaaagacatcaagttcggtttacctttgtgaaaggctgtctcaagcttgaaatgccacctcctttttcagttgtgatccag

SEQ ID NO: 161401 - DNA, 494 bp, Arabidopsis thaliana landsberg
gcctttccattctaagagaacatacttaaaataatatttagttcaaaactgattacctgaaaatgctgttacaggtaacgactccgttgctattcaagttaataccgagtgcaatgaacctcggtgtcctgcttcgatggttcccttctgagaacagttctccgaacgaggtcattctcttttccagatctatttatatttaagaactgagataagaaatgacataaaaatgaaaatagatgtattgattataggaaactgacttgtgaggtcgtgactgagagttttgtttgtagagtttgcaggagaaagcatcattgatagaagtacataacagaaccaagtgatctctcttttgtacattgactgaagatttaagaagaaaaaacagattttgatccgatatactcaactaggaggcagaaaaaacatttgaaactgaccaaatcagatccaagacttgctttttgtattttcttaacgctttatctttt

SEQ ID NO: 161402 - DNA, 441 bp, Arabidopsis thaliana landsberg
atttttgtctatgtgctgagtatattggatggtaggctcttcgaagatgaaggaggaaaggaaggtgacgttagccgcaagcaaatgtatgattcgtctatgttgatgattagacaaatgcaagcgctcggaccggaattcattgagtaatcttaaaggaaatattaggaatgttcatagaatttatctttgttgattatgttaaaacttaaagagattttcggttctattaagaattcttgggtgaaattcatctaaaccacaatttcattcatatgacaaactaatttgtcatcaaaaaatgtttttcccccttttattgcttaaggcatatctagagaaagagtagtcacacataatttattttttaattaaaaaaaaattataaacaaataaataaataatctcaggaaaagcatagaatacataaaaaattaagac

SEQ ID NO: 161403 - DNA, 450 bp, Arabidopsis thaliana landsberg
aaaacacattgaacttttatttggtctgaatgtatgttcttgtatgtgacataagatgttgttatggtggttatagtacttttggaccagttcaagatgtgaggataccatatcagcaaaagagaatgtttggttttgtgacatttgtgtaccctgagactgttaagagcattctcgccaaagggaatcctcactttgtgtgtgattccagagttcttgtcaagccttacaaggagaaaggcaaagtccctgacaaatacaggtacttatattgctagtattagtaactcttatactttggcctgattgttccttgaatcccttgtgtttactgcggtttgttgtgcagaactaaccaaacaacagagcgagaactgtccccaacaagccttgattctagccctagggacgttctaggtaaacaaacactaaagcacttgtctcttttct

SEQ ID NO: 161404 - DNA, 968 bp, Arabidopsis thaliana landsberg
cagacccgcctaagaatccgagagagaagaagagataatgcagatcttcgtcaaaaccctcaccggcaaaactataaccctagaggttgagagcagcgacaccatcgacaatgttaaagccaaaatccaggtttaatttagggtttcttctcttctttatcccctcaaacgattccttagttcctctgaatctctacttgttcttaccttgaattgtataattaagaattgtttcgagtaggaatctctagtaatcttgaagaacatggatttgatttacttgagaatagctaaaaagtgtttgtgaggattgatagtttgtttaacgatctttatctgagctcgcttttgtttgaatctttggtaaatcattttggggtttcaggacaaagagggcataccacctgatcaacagaggctgatttttgctggtaagcaattggaagatggccggaccttagctgactacaacatccagaaagagtctactcttcatcttgtccttcgtctccgtggtggtatgcaaatctttgtgaagactctcacgggtaaaacaatcacccttgaggttgagagctcagacaccattgacaatgtcaaagctaagatccaagataaagagggaatcccaccggaccagcagaggcttatctttgccggtaagcagctagaggatggtcgcactcttgctgattacaacatccaaaaagagtcaacccttcatttggtgcttcgtctgagaggtggtatgcagatttttgtgaagaccttaactggcaagactatcactttggaggttgagagctcagacacaatcgataatgtcaaggcaaagattcaagacaaggaagggattccaccagatcagcagagactcatatttgctggaaaacagcttgaagatggacgcacactcgctgattacaacatccaaaaggagtctaccctccatcttgtgattcgtctcc

SEQ ID NO: 161405 - DNA, 268 bp, Arabidopsis thaliana landsberg
ctgtgaccaacttcaaatgcgagtttgtttgtcaggtctgcctgaccgatgattgttttgtagatgtgcaagaggctgatattcaatttggtgggacatgagctttcagacttggatgtagctgatattaagccatgggtcatgcatgctgaagtcgccgagaaattcatgtgctatgagaacagagttatacttgctggtgatgctgctcaccggttcccgcctgctggaggttttggtaagtgttccaatattttttaaaatgggg

SEQ ID NO: 161406 - DNA, 870 bp, Arabidopsis thaliana landsberg
atggtgaggataatcgcgttcatagtccttgaattgttcccatgctttgtagaaagattcaaccaatccttgttcaaatccttgtagcttgttcctaagagagttggatcttgactttgtgtagaagcgatttaagaaggctggcctacatccttcccatgaagtaatcgacccgggaggcagagactttaaccatctagtcgccttgtcaaacaaagagaaaggaaaaagcttacagttcaaatagcctcgaagaggtcgatataatccatcgggtgctccttgttgaaaccatggaattggttttgcttcacaaggccaatgatttgaggttgatctcaaaatcatgtcttggactaggtactcgtatagcatctcgatcttgtggtaccggttaggcgcgtacgtaatcgactatagtacgttgaggacggcccgtcttagcgtggaacataagcagactgcctagcagcaacattaggtggtcgtggaagaggaggatatacctcgattttcactgcttttagctatgatttaggtatagttattagagtctttttgttatttgtagagtcttttctactctttttcaggtctttacatgtttgggatgcatttggagattatggagcattctggagtaacatagacaacttaagctacacaagcaattcagagaccaaactttgcgtaggtgtcgatcgacacaaccctaggtgtagcgcgacaccgagatctgacggcaattcaattgcgcaacttattgaagttttgaagattttcaaattcggctcagaactctctcttatatccaaaaaaggcccaaacgtttttaggacttatatattgatttttatggtcattgtttag

SEQ ID NO: 161407 - DNA, 1439 bp, Arabidopsis thaliana landsberg
  unsure (1)..(1439): unsure at all n locations
cccctgattntgttgttgaccagggcatgtattacnccgttgatgccagttatggctattactgtacaggtaattataacttggattccttgtatcaattatactctcggccttaatgcgacaagttctctaattttcttaagtttcaggttatgagtcacccggtgattggnnnnnnnnnnnnnnnnnntttggtgtagatggttcagaagtccaatacacagtactaatctcggacataaagacttctcattaatcgttgatttgttcttatacattttgtatttgttgacatgatatcctttttttgtttctccagggtgggcagaatgaaaattctccctatatatgctatacacctagttatggatatgcacagtctccttataatccattcaatccttacatacctggcgcttcaattggcgttgattctgcttttgttgctcctcaacaattttactctattcctccttaccagagtgttgcaacgtcgcctacttttgttccatatgcaattcaacctgagattgtctcgaatagctctacaaactctttgggtgagactggttcacctaataggggtccatctgatgggagagggtcaaggcagagaagtggcaccgctactgccgtactccaaaggaatgatccgaaacttcctgcagggaactctttgggcaagatctcggagaaaccaaggcctaattctggacaaagcagacagacagaaatggacaagagtgattctacttcatcatcaggacaagctcgccaggtataatttcgtattactaatgtctggttttactttattttggatattggtgatacgaaggtgatgagttagaaaaagattagcggaatgattgtgattctaatttcagacattgatatgcttacctgtgtagttctaggagtactgtagtttgttgatcactacagccacagatatcattctgattttgactctggacttgtgtaatcatctttgcagggaagagttacctccgtcagtgctcaacctgttgacgtggtttccagtagcagagtatcgtcttttgggcaattagacattgctccacctcaacttaatgatttttcaaaaattgcaacaaacaataacaatgttcggcccaagctgtatggtggccatgcaaatataattcctgatacagtccgtgaacaaaatcgaggtcgaagatcgagagcattgggaaatcaacttattgttaaagcttatacaacaaaagctggaaatgctgatgccgagggaaatattgtgatcaatccttctcagtataataaagaggatctccgaatcgattacagcaatgccaagttttttgtgattaaatcgtatagtgaagatgacgttcacaagagcatcaaatacaatgtttggtcatcaactttgcatgggaacaagaaattgcaga

SEQ ID NO: 161408 - DNA, 3128 bp, Arabidopsis thaliana landsberg
ttatatgttcgtttcttagttattagagaaaaaaaaatacacatggggaagaagaggatcgtgttgctcttatttataagttttagctatgcagagataccaaaagagagccctttgtctataggacaaactctcagctcctccaatggagtttatgaactgggcttcttcagttttaataactcccaaaatcagtatgtcggaatctccttcaagggtatcattccccgggtggttgtgtgggtggcaaatagagaaaagcctgttacagactctgcggcaaatctggttatcagcagcaacggaagtcttcagttatttaatggcaaacatggtgttgtgtggtccagtggaaaagctcttgcatctaacgggtctcgtgtagagcttttagacagtggaaatctagttgtcatagaaaaagtttcgggaagaactctatgggaaagttttgagcatcttggagatactctgctccctcactcaactatcatgtataatgtccacaccggtgagaactgagggttgacttcttggaaaagttacactgatccatcggctggtgactatgtcgttctgattacaccgcaagtgccatcacaggggtttgttttgagaggctcgaccccttattttagatctggtccatgggctaaaacaaagttcaccgggttacctcaaatggatgaatcatacacaagtccattcagcttaacacaggatgtaaatgggtcaggatactattcgtattttgatagagacaacaaacgttcacgtattaggctaacaccagatggatcaatgaaggcgttacggtataatggaatggactgggacacaacctacgagggtcctgccaattcatgtgatatttatggcgtatgtggaccttttggtttttgtgttatctcagttcctccaaagtgtaaatgcttcaaaggttttattcctaaatccattgaggagtggaaaacaggaaactggactagtggttgtgtgaggcgtagcgaactacattgtcaaggaaactctactggcaaagatgcaaatgtcttccatactgttcccaacataaagcctccagacttttacgaatacgcagattctgtggatgcggaagaatgccaacaaaattgcctcaacaaattgttcttgcttggccttcgcttatattcctggaatagggtgcttaatgtggagcaaggacctaatggacacagttcaatttgctgcaggaggagaacttctttccattcgtcttgcacgttctgagctaggtatgacttggaatataattcaaggaccttctgtatattttgcaattatattgatattgatgttttcgatagatgcatgacttattgtttaattcttatgctaaattcctcagacgtaaataagcgcaagaagaccatcattgctattacagtgagccttaccctttttgtgatcttgggctttactgcgtttggtttctggagacgcagagtggaacaaaatggtaacacattaatgactttactatcgaaaagatctaatcatttggttgtcaataaaattgatctgttacatttattatgagatatcgttaaataaaaggttgtttttccactacatcagacctatactaaattgatcgactcatatatgttctcttggtacattggttttggctggttttaaatactcttaatatgctcatttggcactgactcacaaattctaacccaaatttcagctcatatatcagaagatgcatggaggaatgatttgcaatcacaagacgtcccaggtttagaattttttgagatgaataccatacaaactgccaccagtaatttcagtctatcaaacaaactcggacatggtggctttggttccgtttacaaggcgagaaacgttttatccttcgctctttttcttttctgttttttctgaagatgacatttgcaacttttttcagggaaaactgcaagatggaagggaaattgcggtaaaacgcctttctagcagctctgagcagggcaaacaggagttcatgaatgaaatagtactgatatcaaaactccaacacagaaacttggtacgggttttgggatgctgtgttgaaggaaaagaaaagctattgatttatgagtttatgaaaaacaaaagccttgatacctttgtttttggtgggttacatcttgcctctttcttgtagcattcctctctctatatgtcgaactgcttattttatagtttttacatggtatttttgcttagattcaaaaaaaaggcttgagatagattggccaaagagatttgatatcattcaaggtattgcacgtggacttctctatctccatcgtgactcacgcctcagaataattccccgagacctgaaggttagcaacattcttctggacgagaaaatgaacccgaaaatatcagattttgggttggctcggatgtttcatggaaccgaatatcaggataaaactctcagggttgtgggaactctgtaagaaccattcttcaataacatattaaactagattggtaagtcatatactaaaatgggtacaactatttgattttttgaacagaggatatatgtctcctgagtatgcatgggctggagtattctctgagaaatcagacatctacagcttcggagttctactgctagaaatcatcagcggagagaagatctcgaggttcagctatggcgaagaaggaaaaacacttcttgcatatgtaagtaagagtgtaagactctatgttttcatacacttgcagagggtttaaaagggtcgctgccctcccattcttaagatctgaaactaacacaggcatgggaatcttggtgtgaaactggaggagttgatcttttggataaagatgttgctgattcatgtcgcccattagaagttgagagatgtattcagattggtcttctctgtgttcaacaccaacctgcagacagaccaaacacacttgagttgatgtctatgctcacgacaacatcagatcttccatcaccaaaacaatccacatttgtagtgcactggagagatgacgaatcatcgtctaaggatttgatcactgtgaatgagatgacaaagtctgtgatcttagggcgttga

SEQ ID NO: 161409 - DNA, 527 bp, Arabidopsis thaliana landsberg
gttttattcttggacttttgtgtttggtttgatcttgtttgtcttaaagaatctttcgatttgtagttgttttgtcgacaataactatatccttattatttgtttatgaattgtctaaagagttcaagttctttaactctcttgtcatttcaatttttatttcttgtctttgttcgttttgtctttgtttagcccaaaatcttttgtaatcgtctttttgtggtattctaacttaaacgattgttgcatgtttttgtcatgtgtattctaatttttttttttggatgtgtttttattacttgtttgtgtgcagcttgttgatttgggaggaatgttacaatgaaaccgaatcgagctcgaatcctagaagactttgtggacttggtgttgatacacaagggaatgagaaagttcagttgcttacaaaccgaatgatgttgtacaatcgaatcattttggtaggtgaaggtctagttggcataacagcattatctgggcatcatcaatggattatagctaacagtttt

SEQ ID NO: 161410 - DNA, 500 bp, Arabidopsis thaliana landsberg
  unsure (1)..(500): unsure at all n locations
tcgtgtaactataccaatagctaacgcaatagagttgtttaaggatgatgactcttggtccggtgaacttcatttcatgtcgggagaaccaaataatnnctgtggttctgatgatatgaaagaacttttggactctaaggatgctactgtgataccaggtagtttagttgattctccttggcaagcagtggctagtgttgctagttgtattatgtccggttctgcagaggagcaacagagtttattcagtcccgaggttttcgaagcggtttccaatgcccttcacaaggctggtgaccaaggtctaagcattgaagaagtccactttcttattaatattccaagtaagcatccggctaacctcttcaacacgttagcatgtgctcatgacttccttcagttttgtattttaagttttaacctcggtttattcatgggcaggccaagaaacttgtgactgcattgtagaagtacttcaaacatttggagtagctttgaag

SEQ ID NO: 161411 - DNA, 1887 bp, Arabidopsis thaliana landsberg
attcatttagataagaaggtgcctaccggggctggactcggtggtggaagtagtaatgctgcaactgcactctgggcggcaaatgagctcaatggaggtcttgtcactgagaacgaactccaggattggtcaagtgaaattgggtcagatattcctttcttcttctcgcatggagctgcctattgtaccgggagaggtgaggtatgttttgcttagagtttacggtctattttgcggcattctactagttagcaaatccttgttctgattcagttcttttacacccatattaattttgggctttgtgggttgtaaacatgctccagtttattttgctgaattctaatctaaaggctaatgcagattgtccaagaccttcctccaccttttcctcttgatcttccgatggtgctcataaagccccgagaagcatgttccactgctgaagtttacaaagtaatcaactgaaactgattgatggatattttgattctagaagcttttcaggattttgtgacttacgcttttattttttagcgtcttcgtttagatcagacgagcaatattaatcccttgacattactagagaatgtgaccagcaatggtgtgtctcaaagcatatgcgtaaacgatttgggtacgatctatatgcatatgtcgcatctcccttcctttgccaagaagatagccacatctttaaaattcaagattcagtctgatacatggaccatgaattacatttacgcttttgacttttccagaaccgccagcgttttcagttcttccatctctaaaacgcttgaagcaacggataatagcatctggacgtggggaatacgatgctgtgtttatgtctgggaggtataccttttctacagctttttttgttatttccacttcattgagaaatttcacaaaatactgtgcatcacataggagctcatctaatggaaacagtgtgctactactgtagttgtcttcccaaattcatcttaacaagctagtataagatcatatataatgagctgagtactgtttactagaataagagattataaatgagttgagtaattgtgctaattttggtgggatgaatgcataacagtggaagcactattatcggtattggttcaccagatcctcctcaatttatatatgatgatgaagaatacaagaacgtgttcttgtctggtatgctcttcgtacaagtagtgtggtttctactcttctgaatcttgtacatgtaaggaactaattccaagtaaaattgttgcagaagcaaactttatgacgcgtgaggctaatgaatggtacaaagaacctgcttctgcaaatgctactacctcatccgccgaatctcgcatggatttccaatgagatgttacaaacatgtaattttttgaaaggattgatttgagattcctacttgtgtttcgaatagtgagtggttaactaaaggagaagatgctttaaatataaattaaaagttttttaaaaagacatattcacgaatgataatcaaagagagaagcaaccacacataagtcatgaaaccattttctgtcttctttttttcttgttttattactttcatttccatatgaaactcctatgctcttacagagaaggagacacatattgtctagacaagctaaagatatcttttccttcaaatggtgaagtccaatctggagaggtagctgcttgttgtgtttccacgataacaccagcacctgaattctccatagatacaccgttgctgttgttgagtctacctcccatggaaccatttagactgtaccggttcatgttctcatcatatatttggctgctgctctttaacccggaccagtttccattgactctactattttgtgataaactttg

SEQ ID NO: 161412 - DNA, 892 bp, Arabidopsis thaliana landsberg
agatggaccacactctttctcttcttccatttctcttcatcataatcatttcttcctcccatgttttgcctgtttcacccacaccttcacacaaactaaaatccgccactaccatcagaaaactcaaccgcggaggaccttacatcggtcttgtgacggtcattgccaccgaagaaaatgcttttctccgcagtgtcgatttcagacctgaccctactcatcccttcttggatctctctggtatccacttgaatcaaataactttttcaagttttctaacgtaaatagagtcttttgttttgcttaaatggaagttagtacttttgagatgaaattgttagtagttactgatttaataaccttacgaatacagggagacgttttcgaattgggaagattcatggaaagaaggttgtgtatgttagatgtgggagaggaatggtgagtaaccacaacattaaattatccaaaacagaacaaaagaaactacaacaaaataaagaagtttatatggctcttatttcttatctaaaagtagtatacaaaaagggaatgggcacacaccaaaatatcctgatccgtatacaataattgaaatgatgaattgatgataaaacttatattaagttttaatatagttagtaagtagtatagtatattaaagatgcatattagtaaatgtaatccatatgaaaagtagcaaacgaacacttatattaagacaaaaaaattgcaggtgaatggagcagcagcaacacaacagatgatagatgtgttcaatgtgaaagggatagtgcattttgggattgctggaaatatgaacaactcaatgtccataggagatgtgagcatccctaagcaaattacgaatgctggcttgtgggattggctg

SEQ ID NO: 161413 - DNA, 4172 bp, Arabidopsis thaliana landsberg
  unsure (1)..(4172): unsure at all n locations
atggtatatgtaggcattgaagctagcacagattcaagcattgtggttttgcccgtagtagacaagaagcgagaagaccagctcaaagagcgctgccgtattctttcaatgatctggttcaacagatctctctttctcctacaaaacatctcaggtaagcccaaatactttcctagctctctgtaagttgtatgccaaggatttgctgagcttccaatttgatggcatggggtgttttcccagaaaaagtgatagctgactttgccttgttaatcatttgaccagagtctgatcgacagaaaaatatcgtgtcgtcaacaaaaagaagatgattgattttgggactgccttttaaaactcgaagaccaattagcactccatcctgttgggctttcttgcataaccaagaaagtacttcactacaaataatgaagaggtaaggtgagagaggatctccctnnnnnnnnnnnnnnnnnnnnnnnnnnnnnnnttgggccgctctgttgaggagaaaagagtaagtaacagtagttacacattgcatgatccagcttatccatgcttggtagtggagtgcttcatgtgtaataaggacattatcattaatcgctctttttggcacaaaagctgattgggtttctgagattatatcttgcaggaccggttgcagacgccttgagagcaacttggagataattttgtagaaaactttgcacaatgctataggtctgtaatcaaccatcctttcggggctttggattttaggtataagcctgatatttgtttggttgattgttgggtgcagattggcagatgaaaagaacgactgaatctctagcacaatgtttggacctcagtctcccagtgagattgaaagaagcttggggaaaccatcagggacatgggccttatgagcatgaatagagaaacaagatctttttatttcctccctgaaggcattttgatgagaagttggttcctttcagggtatatacatggtttaatggcttcttttatagtcgcaacatggtctccgtcttttgcagtgaacagggtttggaaatacttagagataaccttcagaattcctgcctcttcatagataggtgccccatcctctctctctagaactgagaacttattagtgagtgttcttcctttagtaattgcatggaagtaacccgaatttttgtcccctaaagcaagccataattgtctacttctctatttccaatactcttcccctctcttgtaagccaggaaaagattgttattgatggtagagatcaggtcatggttgtgttcttgactagccattgcttcctcaaattttgcggttttccttaataagtctttgactgttctggtgcttttcttgggtccaggtaatgatgtccaagcggcatcgattaatttattccttcacatccccagtatcacataggttccaagccgcttgtataagggctgttacttcttcattattctctaagcgtctgtcatatttgaacactccttttttctttttctttgatagatcaaagtgagtgagaagtcgtatatggtcagatccttcaaagcgaaggtaagcacaacaacttgcagggtaagtttcagcccatgctccatttgacatagctcgatttagacagcagtgcaccacatgatcatgcctctttccacgccaagagaagaaatttcctgagtgtcttaagtcatataagtcacattccgccataaaggaagtgccttcatgtcttattgggcctctaaaaggccccgatccagactacctaagtctggacaagatctctcgacccaaatcactaagtgacctgaccccaaccatttctgaggttcattcgctagtgtaatccgtttcatatgattctgactcaatatttgagacaaatagagtaaacaaacaataagatactttattaattgagtaaaagattcgatacaacttatgagtttgcaaataagctattacaagtcatataatcgacccctacactatccgaactatcacaacccatcatcccggccttgagtctcttgcgcctaagccaagtccttcccacaatcaccgttagttcctgaaagtcatagagccataagtactctcgttcacttagtaatatgcaagtccatgcaatgctctctaatccttacactactcgatccgcagagaggaatcagagtggggaagattgcaatgatctctaagacccgccaatcctccgccgagccgcatccccgcctcagccgatgcctcgcccgaactgagtcttatgtaggttgcacatgacccgaatactaccaagccctctagtcgatcctttcaaggatcccgactcctatatcgcatcctagaatccttactctcaaagtctaggattccttaccttccttcacgattttcagttatgccgagcccttcttctccttcgccggccatagtccggctaccgattccttcgacgatttattctcccaagagggcgagagtttaatggtgagttttggtgttttctgtgtgttgtggtgattccaaaggtcttggacgccctcccttatatagggtacgatgggatgcttcccgaagcatcacatccgttccttgcacccttccgaaagatcacatccgttccttgcatccttccaaaaggtcacatccgttccttgcatctaataggcgatgcaaccgttcattggtacccgctcgaccttacaccttttggctcgagtgtcagctgaccggaccacccagctgggtcagtacacgatcagctcaccgagttcagtcgagctgtcggtcagctcatctagctgagctagctagtcttccagctggtttagctcacctagcttagctagctagttcatcctagcttgtctagctcacctagctggttcagcttgaactttctcgtttatccgactaagtattttagtccgtttcttgaccatggtctagttttctcctaaaacaacctggcctctttatgaacgcgggacgcggtcgttacagatcccctgttactgaagcctattctgtaagggaccctctttgtctcttgacctttcaccttagccaaatgagttctttgatgatgcattgcttgattcacgttccataactaatgaatgttaaacggattggtagatttgaaaacatgtgtaggtcgagcataagagtcggattgattgattgatgagacatggctactgtttttaagtagaattcgatcttgcagctgagaactttcaacttggacattgatttcatctagtctatctggtgctttggctctgagtccccgctttcaaacctcacttccagcttgttcttgattgtttgcttgagggcaagcaaagtctaagttcgggggagttgataagtgtgtattttgcatgttttgagcatccatttttcatcattttagcatcatatcatcactgttttataccatttcacatcatttatcatcactttgcatggttaggatagttttgcatgcatgttacatatttgtgttgttttcaggtgatttggagctgtcgacgagctaactggaagaagcggacctgatcatgacaaaccactcgacccagaggtcgagtaggagcttcaagatctcaagagaccactcgacccccaggtcgagtagaagacaccaccactctatcacatcactcgacccccaggtcgagtgtcttcatcttcatctcttaacgtccactcgatcacatcactcgacccccaggtcgagtgacttcatcccattgtcagacctctactcgacctcatcactctacctggaagtcgagtatcaccatcacaccactcgactgcatactcgatgacaagcttcagagccttcttcattccgcactcaaccagacactggagcacaaggaagaaaagaagactccagctattcactcgaccactcactcgaccacatgggtcgagtactgttcttaatccgtcccaatacttcgtcgttttgagtattagggtttcggaatatttggctataagtagcatgtacttcacattttcgcagacaagaagtttttatctagttttatttccgcagaccttgtgttctagactttttgtaatccggatttctctttatctattcagtattcagtattcagtt

SEQ ID NO: 161414 - DNA, 2491 bp, Arabidopsis thaliana landsberg
catttgtagtgaacatggaagccacatcagttttttggccaaaacatggatctcagatttttcttagctcttcgaccaatttatgtccgttaagcaaactctatggctttcacctgacgtcattccccggtaaaccattaaagcatattcgtttgaaggccactaatactctgacatttgatgatcaagaacgttttcgcaagttcaaaaaattgccaacttctgaatggactcattatttccactcgattccccttgatatctcggtacgtccatatatataatacatatgtaaaagttagtgtatattgatgtggagaagattaatgcatgtgtacatacatattttaccttttaggaaatggatgcacttaggaaagagatcgatgaactaaagccgaaagttaaaaacacattcatgtcttcccaaggcattgactctacaaagaagagaatccttatgatatatttgtttgtgagccttggccttgcatatcacttcgaggaagagatatatgagactctaaaagagggtttcgaaaatatagagaagatgatggacggtgaagatgatttgtacacaacttcgatcatcttttgggttttcagaagatacggtcaccacatatctttttgtaatttagtctctctacctaagctttcgttcatcattgacgttggaacaagtgttttttttttaatctccatattgttatgtataatgacttttatctacattttggtcaatagatgtattccaaagattcaaagggagcaatggaaacttcaaagaatctcttactggagatgccaagggtatgttgagcttgtatgaagctgcgaatttggggacaacgaaagattatatactggacgaagcattgagcttcacatcgagccacttggagtcactaggtgcaagtggtacatgcccgcctcatctctcagtgcgcatacgaaatgctcttggtctatctcagcattggaacatggagatgttagtcccagtggaattcatcccattctatgaacaagaaattgaccatgacgagatgctactcaagtttgccaagcttagcttcaagttaggacaactacaataccttcaagaactcaaaatccttacaaagtatgtatacttaatctatatggcttaacttaattacaatcttttaaaagattaattctgactacatatctatatctttggatgcaagatggtacaaggagctagattttgcaactaatttgccaccttacttcagagacagaatagtcgaacatcatttccttgtgcaagcagtgttcttcgcgccacaactctcacgtgaaaggattatgatgattcagtacttcaccggtttagcacttctagatgacacattcgatagatatgcatctcttcatgaggctgaaagccttgccaacagcctgttaaggtatactatatgacgttaaacacacgcgaaaaacagtatacaaccttattatcaaaacttcagataaacaatgatcatgatgatgatgtacaggtgggctcctgatcaagcaatggataaacaacctgattatttgagatttgtgttgaactttattttggatacttttgaagagtttaaaagagaacttgggccagaagaaagaccctacagtgtgaatgccacaatagaagaggtacccaatcaaattattctttctaagtatacaactttatacattaatcaaggcaatatgttcatggctccaaaagaccttttaactgagactttaaataaagaagttgtgggtgtttcaatattttagaattttttttgaaacataacatttttgtagtcctaacggatatataattttgaacatgcccagttcaaggcagctgcgaaagcgaacattgatctcgaaaaatgggcacaagcagatcacattcctagctttgaggagtatatggaggttggtgaggtggaggtcacagtgtatgcgtccttggcaggtattttcatgtctatgggaaagatggcgacaaaggaagcttttgagtggctgaaatccagaccaaaactcgtccaatatttgtctatcaaaggtcgtcttatgaatgatttaatgggttatgaggtacaaatacataaatattttctttacatctcgcgtataactgctttcttgtaaatcttacccacttacacaaatattgagtaggacgacatgagtagaggatatgtcacgaacgcggtcaactgttatatgaagcaatatggggttaccaaagaggaagcttttagggagcttacaaattcatcgtagaggctgagaagatattaatgaagagttcctgacaacggtgggtgtgcgacattgcgttcttaaagcaacctttgatcttgcacgtatgatcttcatcacctacaatggatatgaaggatttacctatccccaaggaaagatcaaggagtatatgacttctctgtttgtcgatcgtatcggtctttga

SEQ ID NO: 161415 - DNA, 496 bp, Arabidopsis thaliana landsberg
atagaccatcctttattttctctcaaaccttctcacaaaaaccaacggaaattctttctatatattaaaaaaaaatcaacacaaaggaaaaaaaaatggattacgttttgattgttttgccacttgcattgtttctcatagcttacaaattcttattctcatccaaaacgcagggcttcaatctcccaccaggaccaactccgtttcctatcgtcggccatcttcacctagtgaaaccaccggtccaccgtctcttccgccgcttcgctgaaaaatacggcgacatcttctccctccgttacggctctcgccaagtcgtagtgatctcttcattgcctctcgtaagagaatccttcaccggtcaaaacgacgtcattttaacaaacagaccgcattttctgaccgcgaaatacgtcgcttacgattacaccactataggaaccgccgcttacggtgaccattggcgtaatctccgccgtatttgctctctagaaat

SEQ ID NO: 161416 - DNA, 85 bp, Arabidopsis thaliana landsberg
ttacatctcattttctttgagttgcgtgaggctttcattcttttgctcgtccaacttaatgctcacatcctataaacaaaagagg

SEQ ID NO: 161417 - DNA, 761 bp, Arabidopsis thaliana landsberg
  unsure (1)..(761): unsure at all n locations
atgcccggagcatatcaccggagtctgggagaacccgagagaacgcacatctcgcacaaatgtgagatcttggcagctaaaatcgcaagagcgcactctcttggatttataactaactagcttctcatggattagtagagtctgataacttctgagctcgacataggaacgatggggaaaagaggaagggcttgcgtagtggannnnnnnnnnnnnnnnnnnnnnnnnnnnnnnnnnnnnnnnnnnnnnaatctcgcacgtcttggtttgtccccacttttgcattcgatcaagtgcctcttgaatcgaccagttcctctaaagacataaaccggcgagcatatcacaagtggacatctgtgcatatggaggtgcggattccttgataaattttcttgtgaatcacacaatgcattgctgaagtgtttttaaaaaaaaatcatgaacaggttctataccccatgaagctgttctaaatcacccatcaatccacatccataccatggtatgctacgatgaaatcttctatataaactactagcaactctgtagatttatgatcatcactttctaattcttttggggggtgctaaaacaggctcagcctcgattcattcagtactttccaaagatactttatcctgtaactctcttgctcaaggcatttattcagtttacaatgcttctctggtttcttttcgttaaagtaccagcgcctgacattttcctggtccaggtaaaaagtctttattcttgtcact

SEQ ID NO: 161418 - DNA, 403 bp, Arabidopsis thaliana landsberg
tatgaatacaataactccaaatttataaaaatgttaaattacttcttacaaatcttaaataaataacacaagactttaacatacttttaataaatcttaattgaataacaacagattttatataacattttaaaccagtaaaactcttttgaaatcgtaaactaatagcgtcccttttgaaaacagtggcagatggcaaaaaaacaaggccattttaaggaaaactggcaaacggcgtcctgttgcactgttgcagtcccaaaagcgacatcgttttgggataaagatgagggtatatagggtttggcatggggctttgtgagtttcgcgaacattctcagagcttctctctacgcggcgattgcgattgcgactacgactgtctcctgattatcgtctctct

SEQ ID NO: 161419 - DNA, 611 bp, Arabidopsis thaliana landsberg
atcaaaaagaggaaaaatcgattcaagtgttattgcttttggtgcagcatggtgccaacggtcttaatcttctagaagcacagcatgttattctggtggagccacttctaaatccagctgcggaagcgcaagctgttgggcgtgttcaccgaattggacaagagaagcctactctagttcatcggtttctggttagtgtatctgctttgtttgccaccttggtcttgtacagcttcaagatcctgccttatgtgattcactttgatcttgacctctcttttttggggaaccaggtatcgggcacagtggaagagagcatctacaaactgaacaggaataagaatacaaacttaagttcatttagcagcaggaatacaaagaatcaagatcaacagttcttgacactaaaagatcttgaatctctatttgcttcaccaacagcagaaacagcagagatggaacaaaacccaggagagagacaggagaatctgagagatctaccaccctcagtcgctgcagcattagcagccgagaggagaatgaaggaaagtaatgcatcctcatcaactacaaacgcatcatgactatggaaaaggttgcagacagattgg

SEQ ID NO: 161420 - DNA, 421 bp, Arabidopsis thaliana landsberg
catcctcacccaattctctcctcactactctctctttgactctctcaccaacaattgtcatcttcatccccaagccaagcttctctgtggtcgtctctactatctattgccccaggagactacctcaatcaagcgcatgaagaagacgatgaagaaagtcaggtttgcaaatccagaggtggaaaaagaagaacaagaagaagatagattaacagattgttgtgacaataccaaggagaagtctaatggtgttgtgcgggtgaagatggttgtgagtaagcaagagctggagaaactgcttcaaggaggttctgtacatgagatggtttataggaccctagctaaggcaacatctgtgatgttgatcatcatgatcatgctgatgatgatgagtgtcatagagtctggaaacctttgttag

SEQ ID NO: 161421 - DNA, 170 bp, Arabidopsis thaliana landsberg
gttttctaaaaatccgttccccaaaaagttggtcgtaactagagctaggacgagcattaacagtgatcatgaagccgcaaatcgtccgttatttcagtttccaccttccctattggatgatcgcttcctttccatttccgccaaccagtcggtatgcaaagatatgacct

SEQ ID NO: 161422 - DNA, 1654 bp, Arabidopsis thaliana landsberg
  unsure (1)..(1654): unsure at all n locations
atggatcctttttctttcaagtaagttatctgtcgagaaactggaacaataagagagaatctgccatggaaatttcgccaatgcactaccattgcttgcaaagctagaatctaaattttaaaatacttatcttttatttttccctccacattatggggatgttacaggccggagctcttgttcatgtttacactgacgggactgttttagtgactcatggtggtgtggagatgggtcaaggattgcatacaaagnnnnnnnnnnnnnnnnnnnnnnnnnnnaacattccacttagctcagttttcgtgtcggaggcaagcactgacaaggtacatctaagctcacttacaaagctgcacactttgggccgagacataatcagacaaaaatgtttttcctctcttatcgttttgatggtctcttgataggttcctaatgcgtcaccaactgctgcttctgcgagctctgatatgtatggtgctgcagttttagacgcttgtgagcagattatagcaagaatggaacctgttgcatctaagcacaatttcaacacatttactgaggtattttttttatcttgcaacgtgatataaactcagaagagttagatgcctattttgatgaaaaaaatgtccttctctctgagtatatgtagctagtaagtgcctgctactttcaacggatagacctatcagctcatggttttcacatagttcctgatcttgggtttgactggatatctggaaaagggaacgcctttagatattacacatatggagctgcctttgcggaagttgagatagatacattgactggtgatttccacacaagagcagctgatataatgttggacctcggatattctcttaacccagccattgatgttggacaagtgcgtgttcttcccttaccctcctatactttcttatcttttagaagaatagtgttgtatctgaaatgactatttacagatagaaggagcgtttgtacaaggactgggttgggtagctttagaagaactcaaatggggagatgcagctcataaatggattaaaccaggaagtttactcacttgcggacccggaaactacaaaataccttccatcaacgacatgccgttcaacctcaatgtttcgcttctcaaggtttgtaactatgagaccaagctttaaattggtagtagcaacacatttgaaactgaacctgaggttatactgtattaaatcaggggaatccgaatacaaaggcaatacattcatctaaagcagtgggtgagccaccattctttcttgcatcatcggttttctttgcgataaaggaagctattaaagcggctaaaaccgaggtgggtctcacagactggttccctctagagagtccagccactccagagcgtatcaggatggcttgtttcgacgaattttcagctccttttgtaaattcagatttctaccctaatcttagtgtttgagctttgaacatcatcagaggggaaacagatcgatcaatctattgtgagaaagtcatatctgtaacttattttcagtctccatataaatgtaacatatctgtaaagatacatttaccaagcagtatacactatatatatttataaagatatgtttctcacaagcaacaactttatagactacaa

SEQ ID NO: 161423 - DNA, 774 bp, Arabidopsis thaliana landsberg
ctctctcctccgactgcgcatctaatcagtgcgtcgatgttcgtgataaacctcagatcgttaaaggttttcctcttatttcctgttgcactttgttagatatgacattgatggatcggtttttggtatctagaaaatgctatgggggagtgtttggctatttgagattttcgggttctgatttgagttttggtgtgactgttttgttccttgcagttaccgagggttcctatgttgtattttacatgggagctactgatttacgttcccatgattactttgactgctacaaggttatagttcaaggtaaagttcttagtcacttcaagatggtttaccattatattagttaaacttgggtggttaatcgatttctcgtataggtacaagaaatgtgatttctgcctgtcgtgagtctggagtcagaaaacttatctacaacagtacagctgatgttgtttttgatggttcccaacctatacgtgatggtgatgaatccttgagacgtcctttgaaggtaatccttgagcatgtttgtttagttggtttttgtcgttggtctttttcagagatgatatctgttttgctctgattctcttgcagttccaatctatgttgacagacttcaaagctcaagcagaagcgttgatcaaattggctaacaaccgagatggtctcttaacttgtgcacttcgctctagcattgtatttggacctggtgacacagagtttgtaccttttttggtgaatctagccaagtccggatatgcaaag

SEQ ID NO: 161424 - DNA, 339 bp, Arabidopsis thaliana landsberg
ggattttgatacagtcgtgcacaaaggtagctgttgattttgtttcccctgaaaacatcgatgagtgtctccgtttgactgatgagtttcgacaactccctaagaaccataaagccagagaagacaaacttgaggtgattctttttctgatattttcaattttggattagcaacttctgtcaatggatacagttttgtttgtagttgaatcttgttttaatctttgccatgtgaacagataaaaaagatggtgatctatgcagttgaacaagctctgaaagaagtggagacattattgcaagatcgcagctaaaagctctatagctttgttgttgtagg

SEQ ID NO: 161425 - DNA, 494 bp, Arabidopsis thaliana landsberg
atggctgacaaagatgaagcagcgacgcgtggaaatgattgggaagttgtttctcttactgcttcagcttacgctgctgctcctggtcctaaaccagtagtggacttgaaagatgatgatcacaaggaagttactccttgttacgaagctgagacatctcatcccttatacatgtctcgccactttgttttcccaccaactggtcagcttgagaatactagtgaccttaccgaggctagcttaacagggtctcattgcaaggaagggagtgatttgagtctgaaagggttggatttatcagatgatttcggaggacttgagttttccgaggataaaggcaagaaagaagaaaacatttacactacagctatgagttctctggacgatgaaagagctattggtggctcacacgtgtatgaacctgttgaagaaccgaccgagcctgtttcttcttctgatgttacacttgatctgaatcctattaaagatgatga

SEQ ID NO: 161426 - DNA, 1230 bp, Arabidopsis thaliana landsberg
atgcaccatcgtagagaagggtacccatttggatcgttggtagattttgcacctgatccgctggggcgtaagtctttcccttgactatgtctctttgtatgtttagtttatgtgtttgacggtggcttcttcttctttgtgtttctagacccaatattttcattttcaccgttggctattcacactcggaatatcttagctgaacctagatgcaccctcgttgttcaggtacaacattatcaatcgtgcttaaactatacaaacatattggtgtttactcccttttttgttctctgtgaatttggtattttcagataccaggatggagttgcttatcgaatgcaagagtaacattattcggcgatgtctacccattgccagaagagcagcaagtgagtgtcaatatggaacaacacagaatgagtaatacatgacctgttcaacactgttattcctgtttctagttcattggttctcttgttctggatttctaggaatgggcccataagcagtatatgttgaagcatcaccaaggaccttcccaacaatggggaaactttcactattttagaatgcagaacataaggtttttgtgttcttcttgaatttcagccattccatagtgtacttatcagaaaataataccaagcttgattttttctcagtgatatatatttcattggaggttttggcactgtcgcgtggatcaatgtcaatgagtacgagactcttcagccagataagatagctgttgatggaggtgagcaaaatctgaaggtgagttttcttttcctgaaaccctttaaatgattgacgagcctgctcagtgattctatgtggagttgtaatttcatactaaattatgataggaacttaatgcaatcttctcaaagccacttagagagttattgtctagtgaagccgagctagacgatgctgctatcatttctatagatagcaaagggattgatataagggttcgtcaaggtgctcaggtaataaatctgtaacaacctaagaacatttctactactattctgaaacagaagctctctctgagtttgtttgtgtgttcaatatgtgatttgtgcagtttaagatacaaaggctagcctttgaggaaagtcatggtgttgagactttagaagaagccaaatctgcactgtggaaagtgatagagaagggcaagttgcacaatttgcagaaatgacccaaacgtttcatggattt

SEQ ID NO: 161427 - DNA, 831 bp, Arabidopsis thaliana landsberg
atgaacgactcaaagcaacaatttgctaagatgccttctcagtgctccaaacacaaacgcaggctatatcacacgaatccgactaaaagcttagagacgattttacgccataacgatgacgggtcagcttctaatcgttagcaggtctgttttattctgggttcaagacaaaactgaatttcaataggatgctaaatcttggttacattatgaggaaatgtaggctgtggcgtgtttacgaagtaagaactaaagaagcttgatttatcggcgtttgtggaaacacagacgttgtcgttttcataaattagaaagtctcttcgtcagatctcagatgggcctcacgctgtacaagaagccttcaacgttacacgttctacttaatcaaacggtgtcgttttagcgaagcagaaactagaaagtgttttcttcttcttcggcggccagacacaagtccacgaacaaagacgactgcgacgacaatgaaagaagagaagaaacaagaaaacgttacagtgacaacaaagaagatagcttcatcgtgcgatgtggaagcgttgaagaaatgcttagaagaaaacaaaggagatcattcaaagtgtaagtctcaggtagaagcttttagatcttcttgtgctcttcctcaacccaacaagaaataaaccctaaaattcgatttggaagtttatgagaattcctctgtaataaaactcagaccaatgtggtctgttgtatgatgattgtaatgaacaactgttttttttacacaatacaatatcattcacatatatagattgagtagagaacatgaatcttgatcattgaggtaaa

SEQ ID NO: 161428 - DNA, 2020 bp, Arabidopsis thaliana landsberg
ggtaaaacaacaaaaaaggaagcagaagacatcggttgttgtcggcgccggaggaaatgagtggggcaggtgtaccggactttttctacagagaagctcaacgtcttggctatgttgctcgctctgctttcaaggtcaatattacattcatacccttctgagcttcgtctccttcttcttacattgactcttctctctgtctgtctctgcaactacagcttctacagattcaaaaacagtacaagctcatcaaaccaggctcctctgttcttgacctaggttgcgcgcctggtgcttggcttcaggtctttttttgagattccataagttacaagtttcgaattctgtgtaaagaggcctaaacttgaattttgttgctatgattcggtgcaggttgcttgccaaagcttaggcccacttagaagtggtggaattgtcgttggtatggatataaaggtcagaggaagcttcaaaaatgtaatctttttgctctaaactgtgtgaatccatgagctttttcaatttcagagcagaaggtgaaggttcctccacagtgtgattctcgagtgcaaaccattgctgctgatgttttaaactttcccagacaaaagattcgggagttatcacctcaggttctgaaactgtctctgtgactttattagacttggttctaagcatggttgatgtttttgttttctataaaactgttgtaacacaagttatggactgctttgtggtgcagcaattgggattttcagtcattctttcagatatgtgtcactcagtatctggaataaccactagagatgcagctctgtctgctgaattgggaatgcgagcacttgatttggctgttggtcaagctgccatctctcagtcacctaatgatgatgatggaggcccaaacgaaagtcgtcctggtgtacttaggcatggtggccatcttgtgatcaagcttctagaaagcgaggatgctcaaggtactactggaaagaactgtataacattgctatacaattgaaaaatgcttcttcttccttacattaacactttgtttgtcttttcgtttagattttgctcgaatttgcaagcctatcttcaacaaggcatcttggttgaggccaaaagctacaagaccatcatctcgagaaatttacttgatttgccagggatttcgataatttaagctttcatatacaatggaaatccgatggtaactcttttgtttttatagatgtattcagtattttcttggattgtgtagtttacaaaggaaaagaacaaatgaaataaatagaatgcaggttttgcgtgttacattccagcttctctgtctgtctctctgtgcagttgtgtatgtctccctgttattatcggatctgtgtcctccccaatgaccagagacctgtgtctttcactggtgtctgtaaacagaaaaattgtcattaatcaactgagcataaagagtcagaagatctgattctggtctgaaggaatttataaactcgaaaaaagaatacaaacctgcatttttactgaaggaaagacgttccaaaaccgcagggtctcatctcctgctccggtcactatagtctggccatcaggtgacgtagccaagtaaagtactctcatactgtggcccgtaagtgttgcaacctacatcagttgatgcgtcagttatacatattgaagatgagagaaagatcaagaaaatgagctttcaagtgtgaacaaaactatgtacctttgacatggatgggtacttccagagcatgatttggttttgagagtatccatgagtactcactatctcgttaacattcttgctccacgccagattgcagacctggctcccagtgtcgatgctgtttaactgatttccgtttgtcgtgttccagaatctaatgcatctgtctgcggttccacctcccgaagcaaggaggctgctctgatgaggagaccatgtaattgccttaaccgctgctgtatgctcagtcagcttcagaataggttgctgtga

SEQ ID NO: 161429 - DNA, 3788 bp, Arabidopsis thaliana landsberg
taacgattttggctttattgttctctttgaaactaacctattgatattggaattttgacttctaagtcttttgcatgataatcatgagtaattacagtggcagttcttcagttgatcctgactacaacatggatgagaaagagtcatcgtcttcaaggccagagagagaacaaagagaatatgatagtttcagaagaaacgctgagatagcctgtgggaagcaataacagagaggtatgacagagatgtatgagcttatagatgaggatctggaagacgagtacatgcctgagcttgctcgcagagctaccaaacttctgcacaaacctgatgtattgcccgctgaggaatatattaggctcttcaaattaaatgagttttgtagcacaaggtatccatgctcgaccacgcttgcacaacttggattgttggaggatgttcaacacctataccatagtagcatatgaagaagagacaattcaattcctataccacactcgaccttctctgcgctgccaaaatcgagttccccgcctcgttcaccgtcgaagtctcaagaactactcggttacaaacgcaagagtcgaccaccaaattgtggttccatcctcaccaattctgactcgccgaagaagtactcgatcacaaattttcacttgaccacaagttttcactcgacctcctgcaacagagccactcaacttcaccgacattttactcgaccgacggagctctactcgacctcttgtactcgacctcagcctgattcaatctaagccactctattcaacccgtgaaagagaaacttggaaagggttaaggttactcgagtacttgattgtacttgtccgtttaggtctatattgtctgttgctaacgattttggctttattgttctctttgaaactaacctattgatattggaattttgacttctaagtcttttgcatgataatcatgagtaattacagtggcagttcttcagttgatcctgactacaacatggatgagaaagagtcatcgtcttcaaggccagagagagaacaaagagaatatgatagtttcagaagaaacgctgagatagcctgtgggaagcaataacagagaggtatgacagagatgtatgagcttatagatgaggatctggaagacgagtacatgcctgagcttgctcgcagagctaccaaacttctgcacaaacctgatgtattgcccgctgaggaatatattaggctcttcaaattaaatgagttttgtagcacaaggtatccatgctcgaccacgcttgcacaacttggattgttggaggatgttcaacacctataccatagtagcatatgaagaagagacaattcaattcctctccacactgcaagtggagctctaccaaggtatgacctctgatgagttgaattgtgaaggattgggattcttgagattctaggtgtatggtcatgagtataggttatcaatcaagcgcttggaaggattgtttggtttccccagtggaacgggtactatgcccaagtatgatagagaagagttgaaagatttagggatcaccattggcaactctgtaccggtgaattcttctaggtcaaagagcaatcatatacgtagccctgtcatcaggtacttccggcgttctatagccaatgtcctctactcccgagagatcatagggattgttaccaattctgatatggagatgatcgatatggctctcaaaggcactctccgccaaaccaagaacaaaatgtctctccaaggtgaaatcaatgacacacctctctctatacttcttctgatccacatgtgtggattcaaaagataggctgtcagcaataaccacaagagagcacgaggtgctctatgcatcggtggtgttgtgacaccgattcttatcgcttgtggagtcccaatcacatctgatggactcgagccacaggcaatgggtatcgagcatctacgtcactgcgaattcctggagttcgcaatggttggcgacttgcaccagttcaggtttgagcactctacagataagagagctagcatccttctccctagccctgaggttacacggataatagagggagataacattgattttcggcctgagattggaaacctctactatgagaacgctccgccattggatgaggatgatcttatagaagaagctgctgaggatgggatggatgaagacagagtagtggagttcgacactagcatgtatcattttgatgaacatgtacctccagcgagggagagcaaatgctttagtgaggctcataggaacaacagtaagctgcagaggtggtgcaagaagcaggataagctgctcgccaagtgtttcaagactatcaagtttctgacagataagttgagctgttcctcttctactacaactattttgcagggacatcctcctctagagatgccatcgaggagatttgatgagcctgagcacacgcctgagcacacgcctgagcttagtgagcagagagtctcacttgtcccggctaggcattcgtcattcgactcccgggagcactagagaagaaggatggctacactcactcgatctagcagcagatcacgcctaattcactcgaggagatcactagaccgcggtgctggccgcagcagaagaagagaggtcgagtatcctcagagcggtgctggccgccaaagagctgatgaggtcgagtacccacctactgaagctgataaaaaacagggcggcttgtctatgtccttgagagcaatcacaagcagccattgatgaccaactccgttcactcttcgactgaggtaagcgtctcactttaccattgtattatatcatctcttgtaatttgttctttattttttttttatgattggatttgtcctgagtactgtcttgcaagtttattcacacaatatactgtgtgatttaagtttgggggagggctcaggaagtgtgataagtgtgtattttgcatgttttgagcatccatttgtcatcactttagcatcatatcatcactgttttataccatttctgatcatttgacatcactttgcatgtttaggatagttttgcatgcatgttgcataattgtgttgtttttaggtgattcagagctgttgacaagctaattggatgatgcggacctgatcatgtcaaaccactcgacccgcaggtcgagtagacgcttcatgacctcaacagaacactcgaccccctgttcgagtagaggccttcaccatttcacctcataactcgcccccgtggcgagtgtctttacctccaccacctgaccatcactcgatctcatcactcgaccccgaggtcgagtgtcttcacctccaccacctgaccgtcactcgatctcatcactcaacccctaggacgagtgtcttcacctacaccacctgaccatcactcgatcacgtcactccacctagaagtcgtgtatctccatcaccaccactcgactacatactcgatggcgagctccagagtcttctccattccgaactcaactataccctcgagcacaaggaagaaaagaagactccagctaatcactcgacctctcacttgaccacctgggtcgagtactgatcttaatccgtcccaatactgcgtcgttttgagtattagggtttcggaaatatttcgctataagtagcatgtactttatattttcgtgaatgtaagttttattccgcagacactgtgttcttgacattttgtaatctgaatttctcttaatctattcagtatttagtattcagta

SEQ ID NO: 161430 - DNA, 253 bp, Arabidopsis thaliana landsberg; identical to SEQ ID NO: 79362

SEQ ID NO: 161431 - DNA, 295 bp, Arabidopsis thaliana landsberg; identical to SEQ ID NO: 47818

SEQ ID NO: 161432 - DNA, 863 bp, Arabidopsis thaliana landsberg
  unsure (1)..(863): unsure at all n locations
ttctgcttgatcgtaacaataatctcaagattggtgattttggtctttctaatttttaccggngccaacgaaagcagcctctgactagccgtgttgtgacattgtggtaccgcccacctgaacttctgcttgggtcaactgactatggagttacggttgatctatggagcacaggatgcatacttgctgaactctttactggaaagcctcttctacctggaagaaccgaggtatagttttcttcgtgaaacacaatttcctttttaagatttggcatgttggctttgattacgctaaacaagttaatcgttttatgttatcttaggtaggcatatagacaagtcaatacagaaaatgaaattcaaaagaaccttttgtttcttatatgaacaggtagaacaaatgcacaagatctttaaactctgcggatcaccttctgaggagtattggagaagatcacggttgcggcatgcaaccatctttaaacctcaacatccctacaagcgatgtgtagctgatacatttaaggatcttccttcttcagctttggccctccttgaggttcttctagctgtagaaccagatgcacgtggaaccgcatcttcggcccttcaaagcgaggttgacctatgaactttactccggtactagattagggcttcaataccttttacccacttttcgcctacttttcatgttttagctgagaaatcattagcattgtagcttagacatatatgttgatattactctctctttcagttctttacgacaaaaccttttccaagtgagccatcaagtttaccgagatatcagccaaggaaagaatttgatgccaagcttctagaagaggaagcaagacg

SEQ ID NO: 161433 - DNA, 782 bp, Arabidopsis thaliana landsberg
atgacagcagaacagaataatacatcagaactgaacgaccatgtatctagcaatgcatgtcgaaatggtaaaatcccggtattgattgacccaaaccataaactaacataatatttacataatatactcgatagggatgctggcccctaacgaggtgataaggaagtacggtccataccattaaccgacctcaataccactaataggctaacaaaatacataatacatctgttggcgatgtcggccgccacagattgcccaatagagctagctaaattagagtgccatgctgaaaccggtcttaatagaataaacatatcttattatcataatcatattcaaaattaattatcgaatcaaacaaataaattttcggaaattaaccttcaaataatttaattgaatatttaaactcacacctaacatattatacgaatgtaccagtcttaacagaaaaccatattttatttctaaatagaataaaatatcttattaccaaaaattatattcatattagtttatctagatacccaaatcaatctttacaacttatcatgcaactaatttatttaattaattttcccacttctaaaatattatacaattgtataatatttaaaagggagttagaactcacctgacaaagatattcatatcttcagatcgaacgagtggtcaacggtaattccggacacattccaaaccaccaaacaatttacttaaattcaaccgttaatcagaaaatacctaaactacaccatcgcaaagatactcttaagtga

SEQ ID NO: 161434 - DNA, 3841 bp, Arabidopsis thaliana landsberg
  unsure (1)..(3841): unsure at all n locations
atgtgggatacgaaaggtgtctcaaatttggccggagagatagctctggcggccggacttgtgatgtgggccaccacatatccgaagataaggagaagattcttcgaagtcttcttctacactcactatctctacatcgtcttcatgctcttctttgtcctccacgtcggcataagtttctccttcatcgctctccctggtttctacatcttcttagtcgatcgtttccttcggtttcttcagtcacgtgaaaatgttcgcttgctcgctgctcggattcttccttccgacactatggagctcactttctccaaaaactctagtgagtaccttttgtccaattggctaattgtatatgaaaagttcacccttactggatattgatctaattctaaactattctttttgttttatagagttggtttatagcccgacgagcataatgtttnnnnnnnnnnnnnnnnnnnnnnnnctgcaatggcatccgtttacgataacttccagtagcaaactcgaaccagagaagctaagtattgttatcaagaaagaaggcaaatggtcaactaagcttcaccagaggctttcttcttctgatcagatcgaccgacgtgctgtttctgtagaaggtccttacggccctgcttccgccgatttcttaaggtgatttgtttatatacactttctcaatcacctatctaataactttatattcagatttgttaagagtcctggaaacttgattgacttgcatttcaagaaacattgatttcatacttttttttttttttgctttctaggcatgaagctttggttatggtgtgcggaggaagcgggataactccgtttatctctgttattcgtgatttgatcgccacaagccaaaaggaaacatgcaaaatcccaaaaataactctcatttgtgcgtttaagaagtcttcagagatctccatgctcgatcttgtcttgccattatccggtcttgagactgaactatcctccgacattaacatcaaaatcgaagccttcataacccgagataatgatgcaggagatgaagcaaaagctgggaaaatcaaaactctctggttcaaaccaagtctttcagaccaatccatctcatcaatcctcggaccaaactcatggctttggctcggtgcaattctcgcatcttcgttcttgatcttcatgataattattggtatcatcactaggtattacatttacccgatcgaccacaacaccaacaagatctattctttgacttcaaaaaccatcatatatatcttggtcatctccgtgagcataatggcgacttgtagtgcggctatgttgtggaacaagaagaagtatggtaaagttgaaagtaaacaggtccaaaacgtcgaccgtccatctccaacatcttctcctacctcatcatggggttacaattccttgagagaaatcgaaagtacgccacaagaatcgctcgtgcaacgcaccaatctgcattttggagaaagacctaatctcaagagtaatatatacatgaccttcttttaatttctctatctctatcttatatataaggaattgttattctaattatgttttttgttggtttatatgagcagaacttctacttgatgtggaaggttcgagtgtgggagttcttgtttgtggtcctaagaagatgagacaaaaggttgcggaaatatgttcctctggtttggctgagaatcttcattttgaatctatcagtttcagctggtgattgcgtatataactctgttttcactatgtgttgtgcaatttgcttgagttgcaagttaataaggtggccctgtgatttgacctatctttgtgtgctttacattgactnttcctgtttcttgtttttctttatcctcttctaggaatattcagtgttaaaaaaaaaacttcctttcaaaagttccggaatatcctttttttgtttgtaacacaaggcatacagcttttgtaaattgtaaatgttgaaatataatactcatgttgggtcatatatatgattttatctctatttttcagttaaacatacttacgaaaaagtcaatttgctcgaaacgagttgggttatacacagatgtgagctacatgtaaattaatatttggatctatcagaatttatctgtcaaatacagaaatactatcttgcagatagcacaaattacctaattgttggttaaaaagacaagaagaagttacgtgaacataaaaaaaaaaaaccgtttcaattgacatgtcactaattattcgatttaagtaagaggaagtacaagaacaaattaaagaactcacctatatatacatccgtttatttaaaatctgtgttattgtgtaactctgctacaatttagtgggtaactaacaaaaaatatcatggttaaatttggtgttctgaggaaatttaatgtaaaattcataaatttacgtgtgattttttgataattgattattcaaaactcagtacaaggaataaaatcgaaaaagaaaaaaaaacgaaaagataatagaaatatacgtctacacgcatcggcgtacaaactcaatgattctgctttccgttgaatttgctaattttaagcccaaaactatagaattgcgttttcaatgtgaaatgaggaaattacacactttacctagactcttccacgagtcaagcctgttttgtaagtcagcagtaaaatgaagctgtaaatcacaaattaattataaaaagattcaattataatttctctggataatattattattttaaaataataataaaataatttcttattggtttattcaccagaccatattttcatataaatttaattattattttaagaaaataatattatgcatagaaaaatgacttaaatatcatttcttttatataagagtatattattttatatatatactctatatctttaaacatctcaagttctcaacatatttaattattggatcttttctgcatttagcataaaactactaattacattggtgtaattagcatatatatatgctggaaaaaaatatctttctatatatatgctggaaacaaatatagcacatatatatgggttttgtaaaattcattgcaaactccatttcgctttgttttttcttctcatttcttgaaagttcatctctggtcccatgggagtaggagaaataaataagaaagtgattgataaggtgattaagttcttgatgatggtgattttgatggggactatagtgatctggattatgatgccaacttctacctacaaggaaatctggttaacctctatgcgtgccaagctcggcaaatcgatatactatgggagaccaggtaatttcactcgatacagatctaaaattatttatacgaatccgttacatataatggttttcttatattataggagtgaatcttttggtttacatgttcccgatgattctactggcttttctgggatgtatctaccttcacttgaagaaatcaacaactgttaatcaatttaacaggtaattaaaagctaacgactgctcactctttagttaacagcttttagttttttttgttaatattagattctttttattagtttattttattttcatttttttgtaaaatttaaagcggagtggagaagaagagagccaagtttggtgcattgagaagaccaatgttagtgaacggaccgttaggaatagtgacagtaactgaggttatgttcttgacgatgttcatggctcttcttctttggagcttagctaattacatgtacaggacgtttgtcaacgtcacttctgaatcagcagcaactgacggaaataacct

SEQ ID NO: 161435 - DNA, 569 bp, Arabidopsis thaliana landsberg
gataagaagactgaagcagcatttgttaacacagttacccccaaaacgtaggcaaatcgtaaccatcttgctaaagaagtctgatatagctatagcaatggctattgtcagcgaggctaataaacaaaaggatggtgctatagtgagatgtctataatttgcatgttttacacatccttttaccaccattttgagtctagtttcatccatctttcatagcattcaccatgatttttgtacattttgcatctttagtcgaatctaggactagtcttgcatacattctgcattctcgagttgtttcaggtgttttggagctattggtgctcagaaagaggaaaaacataaccgaaagtcacatttccaccaacatactcgatcaccagtagcagagagggaagcagtcagctcagcagtccatcaagatacttatactcgatcgcagaggagaggaggcagtccattctgcagttctactcgatcgtagaggtgagcaggcagtccactttgccagtccattagttctactcgatcgcagaggagaagaactagtccatcctgacagctga

SEQ ID NO: 161436 - DNA, 388 bp, Arabidopsis thaliana landsberg
atggctgacggaggaaaaatggtttgcgtcactggagcgtccggttacgttgcgtcttggattgttaagcttttgctcctccgtggctacactgttagggccaccgttcgagacccaagtttgttccttcttctctcctttctatctttttttttctagactttataatcggtaactactaactagaaactctttttaactattctgtatacatttgtgttgttgttgtataggtgatgaaaagaaaacagaacatcttcttgcactagagggtgcaaaagaaaaactcaaactgttcaaagcagatcttctggaagaaggttctttcgagcaagctattgaaggttgtgacgctgtcttccataccgcttctccagaatcactaccc

SEQ ID NO: 161437 - DNA, 1873 bp, Arabidopsis thaliana landsberg
attatacgcacacggctttcaacattaggaaggacaacaatggaagagccctttcttctgcaagatgagcaccttgtcccctgtaaagccacatggaaaagtggtcaggttaccgtcgagctgaagaaagtgagcagcttggccgctcctatggccgccgtgaccattgctcagtacttattgcctgtcatttcagtcatggtcgctggccacaatggtgagctccagctctccggcgtcgctcttgcaacctccttcacaaacgtttccgggttcagtgttttggtaatgatatgctataactactctctcctcttaagttcaagatcaagttgcctctcaaatcttgataacactatattaattctttgtgcagtttgggttagcgggtgcactagaaactctttgtggccaagcttatggagccaaacaatacgaaaaaatcggaacctacacatactctgcaactgcctctaacatccctatatgtgtcctcatatcagttctctggatttacatcgaaaagctcttaatctctctcggtcaagaccctgacatctctagagtcgctggctcctatgccttgtggctcataccggctttgttcgcccatgcgtttttcatcccactgactcggtttctgctagcacaagggttggctcttgcactgctctactgtaccctgaccactcttttgttccacatccctgtttgctgggcttttgtttacgcgtttggtctgggaagcaatggagctgccatggctattagtgtgcctttctggttctatgttgtgattctctcatgttatgtgaggtactccagctcctgcgacaagactcgcgtatttgtatccagtgatttcgtgtcttgtatcaagcagttcttccacttcggagtcccatcagcggcaatggtttggtaagtcgtttttaagtttcttgttggtcaagttacatacaacaaccaatgcttttttttatcttgcttgcgttttcttggtcttcctttaatagcctagaatggtggctatttgagctactcatactctgttcaggtcttctcccaaacccaaaactcgagacatctgttctctcgatttggtaagtatcatattacttctttttatcctatgtgttctctttaccaaaatgtattaatcttatgtctttcatgttatcagtcttacaataggaactttacactatgtgattccatctggagtcgcggcggctgtgaggtatgatctcaactctcaaaccagaacaagtgttcaacaattcctttctcaacattagtcatttggtttcttgaagcacacgagtgtcaaacaaattgggagctggaaatcctcaagttgctagggtttccgtattggcagggctttgtctctggcttgtagagtcagctttctttagcacacttctcttcacctgccgaaacatcataggctacacattcagcaacagcaaagaagttgttgactatgttgctgacatatctcctttgctctgtctctccttcatcctcgacggatttaccgcagttctaaatggagtggctaggggatgtgggtggcaacacattggagctttgatcaacgtggtagcttattatcttgtaggagctcctgttggagtttacttagctttcagtcgtgagtggaatggaaaaggactctggtgcggtgttatggttggatccgcggtgcaagccactttactggctatcgtcacagcctccatgaactggaaggaacaggttagagtttgttacattctagttttttgaatgctctgaagtaactagactctattatttgcaggctgagaaggcaaggaagagaataatctcaactgaaaatggattggtt

SEQ ID NO: 161438 - DNA, 316 bp, Arabidopsis thaliana landsberg
ggcgtatgatcgaactgctgtcaaataccgcggtctggaagctgacatcaatttcgttattggcgattatgaagaggatctcaagcaggttttgattacagatgtacaaatgaagacatgtacgctttgatttgttcttatctggttttcaaactttacagatggcgaatctttccaaagaggaagttgtgcaagtacttcggcgacagagctctggtttctcaaggaataattctagatatcaaggagttgctttgcaaaagattggcgggtggggagctcaaatggagcagcttcatggaaacatgtaattaac

SEQ ID NO: 161439 - DNA, 1584 bp, Arabidopsis thaliana landsberg
gacactgttgagcgtacatctattgaggctcttgtgacaattcaaggtcagtccaactcacggattaaagaaagaagaaatggaaaaataatagatgaaatgctggatatgggtgtttcctacatcataggaggtcccaagtcttgtaaagaaaacgaaaggtagaatactaattggactttattgttcttgaacttctcttagtagctttcatatattcaaacacaatgtagattgatgtaggaacttaaagatgttgtattgcttttcagaccatttggtgtgtcgacagggacttctatcaacttacctggctgcagcttgactttgagcctatcgttgaatgtgactggttcgatgccaatcgaagctgattgatgaagtcgtcactagacaactactgtctcacttcaaaagacaaaacagagtatggtctttactctctgtttctccctttactgtacacacttgtatgctcaatttctagatttttgtcgaacaactggtccaaaaggctccattgtttcataaagtgtttctcaaataatgctctggaaattgaagggaaacatgaagaagttgccggagagatcccatttcttgggtgataaggagacatataggcttagatatatgtcttagatttgctgttccataatggatgaaaaaattgtgcattacgttgtatagatgatattatttgggtaaaagtttttggtttgaagcaaaaggaccaacgatgagcagaagttttgttcttagctatatattttttgggtaaaaaaattgtgcattacgtgctttctccgcgagacaacgttctttattaggttgattcgatccaaactcatggacgagaatttccgaacaaaacactttaacctctaataggctctaaatttattgtttgatttataattttattctaaagatagaaattttctccgtcaagagattaatctgaagatcaagttaaagggtccttgattatcattttatttcaattctttgcctacaggcttaagacctttgggtttagaaaagttgctgagtctgaacaagaatgcgaatatgcaaacgatgattttgtgagaggtaaacctgagcttacgttggatattgaaatcacgggattgaaaagttttgtcacaggacaacccccggagactatgatagcttattttatggctattaaggagaaatacaaagctttatttagcaaaggatctataaaaactcactttatgaattattgctctttttatcttttatctttggactaatgatttattttcttgttgttgttctgttcctcgactaatttatcccttcgtggctttgtgagattatgagattttggacttttttttacgtgttagtttgataatcttaaagaacgaagcattgttgtgttactatgtctattactaaaatttcatctttgttttggtttgttagacgaaaactccccatctatctttgatcagttttgtgaacgcaagttccaatgaaaaagcttctaaaatccaaacatggatgattgaagaaaatgataatctgaagatcaagttaaaggctccttaa

SEQ ID NO: 161440 - DNA, 329 bp, Arabidopsis thaliana landsberg
gctagaccccaagacattggccatctccttcaaggccttatatggtgcttttatatccgcacattttggagtcgaagtcatgaggaaagcctttgagcttgttgaggtcaaggcacgcgaacagatttctcgcctccataaggtcaaacccgggatgcaatacctcatcgtgcttcgcaagaactgatccaaatatattgttaatatgatttcattgttgattctcttctttcgtcgaacttatggtgctttgtcgtcttttcttcttgttgttttgtaatattctccactatcctacaaatgaataaaacttcactttatgcttatac

SEQ ID NO: 161441 - DNA, 801 bp, Arabidopsis thaliana landsberg
atgttacggtgagctaattaacggcccgcatacggaccgaaatacggatacgattagatgattggtcatgcggcttgagcttctctagaaaaatattgggcctactgggaatatggataaagcccataagagtccgtgacataacgtactacggaaaagaagatttcaacgatttgatctgtgattgtttttctctcaatcaacttcaaaatttgttgattcaccatttttttccacagaaccaatccttctacaatgcctgtattcctctcttctcgttttctcttcttctgcatcatcgtccccttactcatctctatcactctctaccaactcgacacgtttgacccagctcatcatcccgctgactcactcatctcctctactgcttcaatcccgcctctaataaacgaaagatttctcaccggagctgagtttatcggagtcggtcttctcaatagccccgaagtacatcgcctaccatgaagactctggtttcatctacactggttgcgttgatggatgggtcaaacgagtcaaggtcgccgagtcggttaatgactcattcgttgaagatttggtcaacaccggtggtagaccgctcggaatcgctttcggaatccacggcgaagtcatcgtcgctgacgcttacaaggtttgggttcgtgacttttttgaaatcgaagtttgaaaattttcaattaataggttggtttctgtctgggtagggactgttgaatataagcggtgacgggaagaagacggaattgttaacggaagaagcggacggcgttagattta

SEQ ID NO: 161442 - DNA, 444 bp, Arabidopsis thaliana landsberg
atgtaagcttgcagagaagtacatgttagttaggatttgattagactttctatgcatatggatttggttaggatgatcatggcaattgactagagaatgttgggaattcctgtgttttcaaaccccttccaagggttcggcttttgtgttttgcttgagggcaagcaaaaactaagtctgggggagttgatatatccatatttttaccgattttaactatgttttaggtataggttttaaagtctaattgttatttctaaagtcttttctagtccttttcaggtctttacatgttttcgaacgacacccacctcatatcgagcgacaccaatacctgacgggaattcgaagacgcaacttattgatcttttgaagatttctaaatttggcccagaactttctcctatgtttaatgaaggcccatcacatgttttagacatataa

SEQ ID NO: 161443 - DNA, 1017 bp, Arabidopsis thaliana landsberg
cacacacacaaaactcgttaaaacaaagatggcgaattactcaagtattcacattctcttcttggtcttcatcacaagtaaagagcaatcacactctgtttctgtttctgtttctcctctgttttatctgtttctaaatgagaataatttcgatactatttcttaaaactatatttttttatgttcattcgtcttcaaatcacaacataattctccaaaacatatcgtgttttttcttcggatttaacagtttttattgttgttgtttgttttgaaattgcaggcggcattgctgtttccgccgccaccgtcttcactttacagaacagttgtccttacaccgtttggcctggaattctctccggcaacgacaacaccctcggcgacggcggatttcccttaacaccaggcgcttccgtacagctcacggctcctgcaggatggtcaggacggttctgggctcgtaccggctgcaacttcgacgcctccggccacggtaactgcggcaccggagactgcggcggtgttcttaaatgtaacggcggcggagttccaccagtcactctggctgaattcacacttgtaggcgacggcggcaaggatttctacgacgtgagtctcgtcgacggttacaatgtcgagatggggattaaacctcaaggaggttccggtgattgccattacgccggctgcgtcgccgacgtcaacgcggtttgccctaacgagcttcggctcatggatccacatacaggaatcatcgcggcgtgtaaaagcgcttgtgcggcgtttaattctgaggagttctgttgtaccggtgctcacgcgacgccgcaaacttgttctccgactcattactcggcgatgtttaaaagcgcttgccctggtgcttacagttacgcctacgacgacgccacgagcaccttcacttgtaccggctctaactacttgatctctttctgccccacccggaactaaaaaacaggagctccggttcagatttcacgtttcttttgctta

SEQ ID NO: 161444 - DNA, 488 bp, Arabidopsis thaliana landsberg
atgaaagcctggtgagtatagttgtggaacttaggtatggaatctagaatattgtgtaagctttcagagaagtacattttggttaggatttggttagacttgttacgcatatggacttagtttgaatgatcatggcaataggctagagaatgttgggagttcctttgttttcaaaacctcttccacgggttcggcttttgtgttttgcttgagggcaagccaaagctaagtctgggagagttgatataacccgattttcaccgattttatctatgttttaggtataggattttgagtctttatgttatttctcgagtctttttagtgtcttttcaggtattctatgcaatggtacaacaatggagataaggagacattttggagcaaaatctatggaaaaggaagcgaaggacgattttggttcaggaatcagtgaggagtgtcgatcgacacactcttggtgtcgagctacaccagttgcggcctag

SEQ ID NO: 161445 - DNA, 821 bp, Arabidopsis thaliana landsberg
tcacaggtcctggaaggtttcacagctactcttgtattgattcattgattgtttctctaagcctgtacgggaaatgtggtagattttaacacaatatgcatttgaatgttaagagttttcttgaacaagctgctgtttgtcccactcattgtcctaggtatttccctcatcgacctagaacctcctttttgacagctcaatacttgtttgcactaccaattccagagttagtattaggcagagattttttagtgagtgtgtgcatatataatcttagcctcgtaaccactttaaacaacacactagttttgattctgtggcatatcagtgttagggcctcaagttaaagaagtgttttggtagctaaaatcccattgtcccctacttgaatatgcacaccaaacttttagttttgagaacaatcgatgattgctaaaattagtttgtgaaatcacaaagatgacaaagaagacttgatccagagattcaaaggtctgaaaatccccttttgtcatctatatatatgtgtgtatagagaattagagatgtttcaacagatagaaaagtggaaaggatgtgtattgagtttgatagtggaaatcatttggcattgcttcatgctcaaaagagttatgtggcccttaaagttgatactcatagcaaaacagactttggaaaatgataacaaactagccaaaaagtcgaaacataccaaaaataagttgcgtcgttgaaacattaccaaaataagtactgataaaacgtaaaacgacacgatccacaaaacaaacgacaccatcccagagaaagggtccaccata

SEQ ID NO: 161446 - DNA, 855 bp, Arabidopsis thaliana landsberg
atgagaaaatttctgagtttggcctccatcgtcggaattcgaacaagaatcctgagtttcggcaaggttccacaaatcctgttgagaatccataaacctcgtagtctctccgttcgcctttatcatcagaatcatcatctcttcctcttcctacgttctctgtcgctcatcctctgctttggcttcgctcatctcgtcctgtgtccaccatgaccactcaggacatagaatgggttattgtttcacattggttgtcaaaaattgaaacagagagttatactatagatgaaactatgatatgcttgttcagatcctagactctttttattggttaaatgttggcgatttaaactttcatacttgaagagtctgagaccatcaaaaaggttgagttagatgcaattctataaccgaagtacatctgcatatttgatatatatatctacaactaagtttcgttggaatcttcatgctcgttctgttcttctttatccccatttatcagctattcaagcgaaatgttcctttgcgtgatgaacatgctgattggctttagatgtctactaaatattcaaagttgggtgcaggtgagggtggcaataaagggaaaaattacaggaagtgtgttacaggaactggactgttgagaacgctgagcagcttggggtatagggatgggtcaggaaccgcagggatggttcaatggaagcactcttttcaggatcacctgaagctgttgatgagatgcatcagaggtgccgccgtggtcctcctgcagccatggttaccggtttggaggctttcccttccactgaagaaccgggatcaagttttgaatacagatcaaccgtctga

SEQ ID NO: 161447 - DNA, 667 bp, Arabidopsis thaliana landsberg
aaagttttttccagttctcattttcgtttgttttgcgttgatatagttaggggcgaggcttctacacattctcaagagattgcttccaatttctgtatatcttcttcaggtaggtactgttttctttggtttgacggtatcatactcatgatccctttccagcaaattttttgatgtatgttctaaatttgaatagaaagaaggtgaatatttaagtgggcatgaggtgtttctcaagcgggttgcttcagcattcaacagttttgtggagtccacagaaaaatcatgtcgtgacaagtaattctatttccaattcctgttcttaccatgtcggtgcctcctacctgtgttctagtgagctttagtgattgatcaccctttggattttatattgtttgcagatgtatggaggatttagcaagtacaactcgctatgttacatggtctcttcacaacaaggtcattgctacagccctatagctctgtttcaatccaattgagttgtgtacataccatcaagtatccgtttctgattgagtagttttcgtttctcaatgttatgtagaaccgagctggtctacgtcaattcttggactcatttggtggaacagagcataatacgacatcaggtaatgccataggatttagtcttccccaagatgcatta

SEQ ID NO: 161448 - DNA, 806 bp, Arabidopsis thaliana landsberg
gattctccagtttttcaatatattaatgatctctctccaatagagccagtgaagccaggacgcccagagaatatcttgcactcactggtttttacatctccatcatcatcatcatctctattttgttccccgcagttaaactcttaccgagattccagattttttatcaaaaggttacttgattactccttttacttgtcttattgatagtaagaaagatttgttgttggttgctgacaatggtattgttgtgtggttatgttccttgtttaggcatcgttctctagatctatcgagtccagtagtcctcatcggtgagactctaaaaaactcaccagatgctttatgggaggagaagctaaagtgtaggcctgagaagttggaaaatgtttctgaacccaagccatttaaggagcagataagcttagcaattgagttggcgaattcattgaaacacggaagagatggatgtgatattcagatggtttcttgtgatgaagtacctatggatgctgatgatgaaataggaagcggtggtggatccagagagctgtctgatgagttatgtagacagtcttttgatccacttgactttgatgctgattcagatggagtacttcacactgatgaaatggaagctgagagtgggtttggtaaagaagtaataatgtttgatgttgctgatatccagaactatgagcaacagattccaaggaccacagatcctagattttattctcttgcttctgagcctcaacagttttctatctactgtaataactcaaattatgtcgaagagcgggaag

SEQ ID NO: 161449 - DNA, 161 bp, Arabidopsis thaliana landsberg
tgtgatgttaacaatcaagatgtgatcagaagtcactaagtcaagtcaagcaataacaggttttggtgcgttctagcagtcctaagtgaacatgcagaatacagaaaatcaagcagaaataaataaacactcgaccaacgcagctcggtgcagagcactgg

SEQ ID NO: 161450 - DNA, 1092 bp, Arabidopsis thaliana landsberg
gcacgacttttggagaggaccccatctctcagtgatctaaatgagcttgtgtatggacaggtctgaaaatatttttgaataaatagctgtaggagcttcagtagttcattcctgttacttggaacataggttgacatatcatacttttgaatttactgcaggaacatttaggcactgatgattcgtcattcatattttcgttcaaggtactcttaccatttctttatgcccctttaatttttttttagtgtcagatatccactagtcatgtaaaatctaacacgaggcaaatcaaaattatctgtcaggtagcagatgatgcgacattgtatggtgtttgcttacatgtctcggagattgttcagagaccccctggtgtattaagcactgcgtcacccttgcattcatctggaggaggcagtcgttttttggtttctgcacctcgatgctactgcttgttgaccagagtccctttttttgaactacactttgagatgttaaacaggtacataagatgcccctactcttagtagtgctttttccttgcattaaacagagaccgcaaaacatatgctgaaggtcattcacttgttgatgcagtatgattgcacaagagcgtctaaaacgaataaccgaatttgttagtgagatgtctcttgctgctgcatgctatcttccatcaatatccaggaggaatgatcaaattgatagccgtgtttcatcacctcgtagcaaccctgatgattggatggcttctgcaatacctgttgatggagtcatggcactcactgccgcagctgcaggactgataacggatagtgacattgcgaattttgcagaacctcaatctccagatagtgttgtcaccagtgatacttcagatgttagccagatcaaggaaatagaaagagacggaagaaaagttttccattgttacgatgaaaattctcctgaagtatttgagaaccacttggatacccccgaaagaacgtcccagagctatgacaacggccacacttctccagaggttacatgttctgatcctaggacccaaccgatagagcgtaatgaaagctgtgagtctgtgttcag

SEQ ID NO: 161451 - DNA, 7866 bp, Arabidopsis thaliana landsberg
acaacctgagcatccgaaagagaagagaagagaaggcccattcgaagcccattcgaaacccattcgaagcccatcaggaagcccactttgagtcgacactcttgatcacgccgtccatgggccgttaagtgggctcgaagcccgctttcttattttagtataaataagtctctaagggtttcgccctaagacatgcactttgtagaaacgaatttcgcactactattcagcagccgcttttcattcctgcaaatttgtattttgatttttctcctaagttattcagattttgctttcattgcttggtcatctttcgtttctatgatattgtctttaagcatgttgtctgagtagtgattaggatttctgaggatgggatagagtagttatggaacccctggtcgaatctgttggttaagtgtagatttattgaatcccttctggattagttgtgtttactgcttattcctttctgatcaactggaatccgatcccagacgttccagcgcccagaaggcgtttaatggaacgttggatctactaattctagtgataatcgtctctttcccaagggattggccgtttagagcggttattggctttaacagttggttattattgcctacttagttagagatcgctaatgggaattaggttagtgtctagctatgcttgagggtttctatcacgggagtgaattaatctgttgttgaacctgttgtctagggatagcttaattgagatttgttaaccaactgaattgattagggagaccacactattcgattaccccatccttaggaatttctcatccaattgatttctctgtttacttacctgcttcattcagtttctattgaatttttgtatttttctgttttcaaccgttctactcgatcacacgagtctactaacagtgggactgcgtgatagagtaaactggtccatttctgcattttcactctctgtcatcctgttgtactcgatcacagggtcccttctggcagttgaccctgcgatagagtatatcagtcatttctgtgactttttactgttttctcgaccagcaactcgacctatcttcccagcaggatcaccaactgctccaaaaccagttgctgtcaaaaacaaagaaaaggtctttgtccctcctccctacaaaccgcagcttccatttcctacccgtcacaagaaagcgttgacagataaatatagagctatgtttgccaagaatattaaggaggttgagttgcggatacctcttgttgacgctctagcgctaatcccagactctcacaagtttctgaaagacttgatcgtggagcgaattcaagaagtgcaagggatggtggtattgagtcatgaatgcagtgctatcatacagaagaagaccattcctaagaagcttattgatcctggttcattcactctaccatcctatttaggtccattggctttcaacagatgcctatgtgatttaggagcatcagtcagtctcatgccactctctattgccataagattggggttcactctatacaaatcttgcaacatatccctaatcctagctgacagatcagtaaggatctttcatggtttactcgaaaacctaccaatcaggattggagctatagagatacccactgactttgtagtcctagagatggatgaagagcccaaggaccctttgatcttgggaagacctttcttagaaactacaggttctatgattgatgtcaagaaagggaagattgatctaaaccttggcaaagactttaggatgacctttgacgtcaaagatgcaatgaagaagcctaccatagaagggaaactcttttggatcgaagaaatggatcatttagctgacgagttactggaagaacttgcagaagaagatcatcttaacagtgctttaaccaaaagtggtgaagatgggtttctgcatttggaaacattgggataccagaagctgttagactcccataaagcgatggaagaatcagaaccctttgagaaattgaatggaccagcaacggaggtaatggtaatgagcgaagaagggtcaactcgagttcaacctgcactctcgaggacgtactcgaccagccactcgaccttgtctgccaacgaatctggggagccgatcattccaacttcagatgactggtctgaacttaaggcaccgaaggttgatctcaaaccacttcctaaaggtctaaggtacacattccttggtccaaactccacttaccctgtgatcattaatgctgagttaaatagtgatgaagtgaacctgctattatttgagcttagaaagtataggagagcgattggttattcattatccgacattaagggaatttcacctagtttatgcaaccataggatccatcttgaaaacgaatcctattctagcattgaaccacagaggaggttaaatcccaatttgaaagaagtagtgaaaaaagaaattttgaaactgctggatgctggtgtcatttaccctatctctgatagtacttgggtttctccagtgcattgcgtccctaaaaagggtggaatgactgttgttaaaaatgaaaaggatgaactgatccctactagaactataactggtcatagaatgtgcattgattatatgacgttgaatgctgcatctaggaaagatcattttcctttaccattcattgaccaaatgcttgaacgtttggctaatcatccatattattgctttcttgatggatacagtggtttctttcaaataccaattcaccctaatgatcaagaaaaaaccactttcacgtgtccttatggaacttttgcctataagagaatgccatttggtttatgcaatgctcctgcaacatttcaaaggtgtatgacctctatattttcagacttaatcgaggagatggtggaggttttcatggatgatttttcggtctatggcccctctttctcctcatgtttgttgaatcttggcagggtattgaccaggtgcgaagagacgaatcttgttctcaattgggaaaagtgtcatttcatggtgaaggaaggcatagtgttgggtcacaagatatcagagaagggtatagaggttgacaaaggaaaagttgaagtggtgatgcagttgcagccaccaaaaacggtgaaggacatcagaagtttccttggtcatgctgggttccacagaagatttattaaagacttctccaagatagccaggccgttaaccagactattgtgcaaggaaaccaaatttgaattcgatgaggactgcctaaaatcatttcacaccatcaaagatgctttggtatatgctcccgttgttcgagcgcctaattgggactacccatttgagatcatgtgtgatgcattagattacgcagtaggagctgttttaggccagaaaatagataagaagcttcatgtcatatattacgccagccgaacgttggatgaagcttagggaagatatgcaacaactgagaaggagcttctagctgttgtattcgcatttgagaagttcagaagctatttggttggatcaaaggtcactgtgtatacagaccatgcagctttgaggcatctgtatgccaagaaggatactaaaccaagactgttgagatggatacttttattgcaagagtttgacatggagatagtagataagaaaggctttgaaaatggtgcagctgaccatctttcaaggatgagaattgaagaaccccttccgatagacgattcaatgccagaagagcagctcatggttgtagagttcttcggaaggagctacagtgggaaagagttccaccaactgaatgctattgaaggagaatctccatggtatgctgatcacgtcaattacttggcatgcggagtaaagcctcccaacctgacaagttatgaaaggaagaagttttttagagacatacaccattactactgggatgagccttatctttacactctttgtaaagataagatctacaggagatgtgtcttagaagatgaagtggaaggtatcctgctgcattgccatggctcagcatatggtggtcacttcgcgacgttcatgacagtgtccaagattcttcaagtaggcttttggtggccaacaatgtttaaggacgctcaggagtttgtttcaaattgtgattcatgccaagaaaaggcaacatcagcagtttgtttcaagtaggcttttggtggccaacaatgtttaaggacgctcaggagtttgtttcaaaatgtgatgcctcataatccaatcttggaagttgagatctttgatgtatggagaattgattttatgggtccattcccatcttcatagtgtaacaagtatatactggtcgccgtagactacgtatcaaactgggtcgtagctattgctagtcctaccaacgatgcaaatgttgtgctgaagctgttcaagaccataatcttcccgagatttggagttcccagagtagtaataagtgctggtggaaagcatttcatcaacaaggtccgtttgatccaactcagtgaccttgacgagatccgtttagaagcttatgagagctctaaaatctacaaggagagaacaaagcttttccatgacaaaaagatcatcaccaaggattttcaggttggtgatcaggtgctgctattcaactctcgtttgaaactctttccaggaaagcttaatccagatggtctggccccatctgtatcactgaggtccgtccttatggagcagtcactctagctggtaagagtggagacttcacagtaaatggtcaaaggctcaagaaatacttagcagatcaaatccttccagaggtgacgttggttcatttccaggaacttcttgatgattaaaggagtaaaggagtcaagctaatgactttaaacaagctcacttgggaggaaaataaatttttcttctcttgttatttttgatttgtcttagttgtgtttgtggttctcaggagcaaaggaacaacgtggagatagagtaaaaattcaaaacttttactctatagaaagcctatagatcgagtatatagtccagtggactagacttttttttgttgcagttggagaccttgcactcgagtacattggtcgagtatgagtgatgtttaaagcctaaaaaaatttaaatcatcattttactagaccgacagaagctacagagttttacagggagtttatcaagtttacagtagattttctgcagttttcccagtcaacagagtgtggaccacacgctgaggacaagatggagagagaatctcaaactcaatctccaccactccttttgaaatttcactcgacctctgaaacctaagcggaactcgacctcgccgaaaccactcgaccgcttctgaaagaattactccgccgcctcattcgagtttcacgactcactcgaccaccgattccaattcaccgtgaatcactcgaccacgtatcgccatctctcaccaaagagttactcgactcaatttcactcgagttcctcgctatactcgactgtttcacttcgccgctcgccatcactttgttctcaccacactcgaccttctctgcgctgccaaaatcgagttccccgcctcgttcaccgtcgaagtctcaagaactactcggttacaaacgcaagagtcgaccaccaaattgtggttccatcctcaccaattctgactcgccgaagaagtactcgatcacaaattttcacttgaccacaagttttcactcgacctcctgcaacagagccactcaacttcaccgacattttactcgaccgacggagctctactcgacctcttgtactcgacctcagcctgattcaatctaagccactctattcaacccgtgaaagagaaacttggaaagggttaaggttactcgagtacttgattgtacttgtccgtttaggtctatattgtctgttgctaacgattttggctttattgttctctttgaaactaacctattgatattggaattttgacttctaagtcttttgcatgataatcatgagtaattacagtggcagttcttcagttgatcctgactacaacatggatgagaaagagtcatcgtcttcaaggccagagagagaacaaagagaatatgatagtttcagaagaaacgctgagatagcctgtgggaagcaataacagagaggtatgacagagatgtatgagcttatagatgaggatctggaagacgagtacatgcctgagcttgctcgcagagctaccaaacttctgcacaaacctgatgtattgcccgctgaggaatatattaggctcttcaaattaaatgagttttgtagcacaaggtatccatgctcgaccacgcttgcacaacttggattgttggaggatgttcaacacctataccatagtagcatatgaagaagagacaattcaattcctctccacactgcaagtggagctctaccaaggtatgacctctgatgagttgaattgtgaaggattgggattcttgagattctaggtgtatggtcatgagtataggttatcaatcaagcgcttggaaggattgtttggtttccccagtggaacgggtactatgcccaagtatgatagagaagagttgaaagacttgtggatcaccattggcagctctgtaccggtgaattcttctaggtcaaagagcaatctgatacgtagccctgtcatcaggtacttccggcgttctatagccaatgtactctactcccgagagatcacagggattgttactagttctgatatcaagatgatcgctatggctctcaaaggcactctccgtcaaactaagaaaaacatgtctctcgaaggtgaaatcaatgacacacctctctctgtacttcttctgatccacctgtgtggatacaagagctaggctgtcagcaataaccacaagagagcacgaggtgctctatgcatcggtggtgttgtgacaccgattcttatcgcttgtggaatcccaatcacatctgatggactcgagccacaggcaatgggtatcgagcatctacgtcactgcgaattcctggagttcgcaatggttggcgacttgcaccagttcaggtttgagcactctacagataagagagctagcatccttctccctagccctgaggttacacggataatagagggagataacattgattttcggcctgagattggaaacctctactatgagaacgctccgccattggatgaggatgatcttatagaagaagctgctgaggatgggatggatgaagacagagcattggagttcgacactagcatgtatgattttgatgaacatgtacctccagcgagggagagcaagagcttgagtgaggctcataggaacaacagtaagctgcagaggtggtgcaagaagcaggacaagctgctcgccaagtgtttcaagactatcaagtttctgacagataagctgagctgttcctcttctactacagctattccgcagggacagcctcctctagagatgccatcgaggagatttgatgagcctgagtacaggcctgagcttagtgagcaaagagtctcatatgtcccggctaggcagtcctcattcgagtcctgggagcacaagagaagaaggaaggttacactcactcgatctagcaggagatcatgcctaattcgctcgaggagatcactcgaccgcggtgttggccgcagtagaagaagagaggtcgagtatcctccgagcggtgctggccgccatagagctgatgaggtcgagtacccacctgctgtacctgatacagaacagggcgtctcgtctatggcctgggagcaatcacaggcagccaatgacgaccaacttcgttcattcttcaac

SEQ ID NO: 161452 - DNA, 976 bp, Arabidopsis thaliana landsberg
atgaagaacatcgatagcaaggaaaaggcttaccagtgttacgaagcatcaaatagcaatgataataaggtaacatgaaaacaaggagcactatcaaacaaaagagatccaccttccagtttaccatccttgccctgcaaacaaagataaacctcaatagaaagtactaatggtgtcatgataaaaagaaattattggtgtctaaaatcaaaatgatgcaattcccgaagctcaatgactgtattcacaacactttcatattatgtaaaatgacaaattccatctataaaccaaaacttgctactcgaatttgaaagcttactctctagataaaacagggatgatttcgaagagaacaagctgtaaaaggttgcaagagaaggcgaagacgacgctgaaaatgatttgaaccaaagctcgcttctcttcgtactctttgtaaagcctccggttgagaaaccatagaccagccgatcctaagagacacagagatccaatcaccaacattccctcgaagatcccccatccgtaacccatctctctctaataaggaaacaaaactcagatctctttctctctaccccaacactctcatcagagtctcaagcttccgctattcgactgaatttgccgacgaacggtggttcctttgcttttcatcagaatcccaaatttggtttttgtattaaaccacactaaaccgtatctccgtaccaattatttattatttagttttgcgcgactgatttccggttcaaccacccgaatcatgcctcgttcccgccaaataggatttagttcccacttcccattaacaaagctaaaactattaaactcttgccgtttcgcaacggcccagaaagaccaacaaatatataacctaatctgttgcgccatcttccagagtaaaacaccttccctaaagaacaagtacaagaaatggagaagacaacgactacgacgtcgtcgaacatga

SEQ ID NO: 161453 - DNA, 272 bp, Arabidopsis thaliana landsberg
aaatttgaagaattacactaaaataaatatatgtcctttttagtcatttggtacattatgcattcagatgcagatgcacattgttaaaaaacaattcaaacgaacacatctgcattcaaatgattcatccagatgcactatcaacttcagaaacgaacatcatccaaatgatgcatctgaatggatcttctggatggatcacccagaggcactacctaactgattaaacgaacaacacctaacattttaaaatggtattgtgcctaatatga

SEQ ID NO: 161454 - DNA, 912 bp, Arabidopsis thaliana landsberg
  unsure (1)..(912): unsure at all n locations
atggccattattggcccaccatgctctctaattgcattaagtttgtcgccaaatgcaaaaaatgtcaaacgcatgcacctattattcacgcacctcgatactgttgaagaacaacgttacctcactctccttcgcatcctaaactaccagcaggccgcgataaaattttacaacaaaaaggtgaaatcccgctactttgtcgaaggtgatctcgttctctgcaaggtgtttgaaaacaccaccgagataaatgctggcaagttaggcgctcactgggaaggcccttatctaatctccaaagtcgtcaaatccagcgtctatcaattacttcaattccttgttcttagaactcgtccaaccttaaacgctactactattgtaccgctccgcatcactaccgcggcacactatcaccaccatctgcatcattccgcgtcccaaaaaaaaatattcggtaacaacccttaccgtatcgaactacggattacttgatcccttctaaagggtacgtaggcagcccttcgcgggcacatctataacaaaaaaaaatgccgaacaaagtttacaataccgaaagagataaagcaaatagcataaaagcgacccccatcctcatgccacttcggaaggtcacaacgacctaagtaccaccaatccttgcttcgcccacagtcgtcgtcatcgatgcctcgtcctcaaannnnnnnnnnnnnnnnnnnnnnnnnncaagaagatcggtaatctcaagagcatcgaccacttcgcgccaattgtttttgtcaaccttaagctcacacatagtcttcatcatgatttctctaacttttttgatcaactgcttcaagagtttctgagtacctacaacttgacattgcatgaaaagagattcgttgacaacacgtctgtcaagga

SEQ ID NO: 161455 - DNA, 16354 bp, Arabidopsis thaliana landsberg
  unsure (1)..(16354): unsure at all n locations
gtcgagtgacagtccagctcgggcagctggacgagtgacggacgagctcgaggcagctggacgagtgacggttgaacttgaggtagctggacgagtgacggacgagctcgaggtagctggacgagtgacggacgaactgggcggttatgggcgaagagatacaactcttcggaaaggtgcaaggaacggatgtgttgatttgggaagcatccattcgccccctatataaggaagggcgcccaggaccattccacacaccacaacacaccgaaaacacaagaaaactcaccattaaaactctctccctcttgggagaataaatagtcttaggattcggtagccgggctgtggccggcaataaagaaggagggtcggatcgacctaacctcgagaaggaaggtaagggatcctagactttgagtctaagggttctaggatgtgagttagtagtcggatccttgaaaggaccgactagagggctgagtagtatccgggtcatgtgcatcctacacaagactcggtccgggtagggatcggctgaggcggggacgcggctcggcggaggaccggcgggtcttaactgacctgccgagaatcggccggactgatgcgcgatcttcccctctctgaattctctccacggatccgagtagtgtatggcatatagagcattgcatggacttgcatatgattaagtaaataagattacttatggctctatgactttcaggaacgaatggtgatcgtgggaaggacttggcttaggcgcgagagactcaaggccgggatgatgggtggtgatagttcggatagtctagggatcgattatatgacttgtaatagcttatatgcaaactcataggttgtatcgaatcctttgcttaattaataaagtgtccgattgtttgtttactctattcgtctcatatattgaatctcggaatcatatgaaacggattagactaggaaagaacctcataaacggttagggccgagtcacttagtggcttgggtcgagagaactcgcccggactttaggcagtccggatcggggcctttcaagttggtatcagagcatgcttggttctaggactaggtgttgggttaaggggtatcaccactcgtcggcttgagaatctcgcggtagttgttctttactcttttgcgattttactaggagttatgtggattaactttagaggtttcgcagatgggtaagagcagcaaaacgggaaagagtaagaaggacaagggcattgtcgaggagactttggttgaggaggaaacgatgatcaacgagaaaaccagagtcgggacgatgttcgatgggacagactcggccggacctgaggccgggaagaagtccataaatggggaagcaccggagagtagtggtgcaagggacaacatggataaccggaacaatactccaacggcccaagaacagtgggatttgatgaagggaatgatggcgcaactagccacattgaccaaggccgttgtagcagatccggtggtcctaaaaggggataaccaaaaggacgatgactcggaagttgtggaagtgaatccacaaccgaattatgggcggaaaaggggagactatctgagtcttctcgaacatgtctcaaggctgggcacgagacacttcatgggcagtacggacccgattgtggccgatgagtggaggagtagactcaagaggaacttcaagtctacccgctgccctgaggattaccaaagggacattgcggtccatttcctggaaggagacgcccataattggtggttaaccgtcgagaaacgcagaggggacgaggtccggtcctttgcggatttcgaagacgagtttaacaagaagtactttccaccggaggcttgggataggcttgaatgtgcgtacctcgacctagttcaagggaaccgcacggtgcgtgaatatgatgaggaatttaaccgcctaaggcgttatgtgggacgtgaacttgaggaggaacaagctcaagtgcgccgatttatccgtggactaaggatagagatccgcaaccattgtttggtccggacattcaactcggtttccgaattggttgaaagggcagcaatgattgaggaagggatcgaggaggagacgtacttgaaccgggagaaagcaccgatccggaacaatcaatccaccaaacccgcggataagaaaaggaaatttaacaaggtggataacaccaagtccgatgctaagaccggggaatgcgtgacctgtggtaagagccacaacggaacttgctggaaggccataggtgcatgtggccggtgtggaagcaaggaccatgcgatccaaagttgcccgagaatggaaccaggacagtccaaggttctcggtgaagagacaaggacttgtttctattgcggaaagactggacatctaaagcgagagtgccctaagttgactgcggagaagcaggccggacaaagggacaattgcgggggaaatggactgccgcctcccccaaagcggcaagccgtggcaccgcgagtttatgagttgtcggaggaagctaacgatgccggaaacttcagggcgatcactggtacgttcttacaactccctattcattatttcaataactgcatttgcattgcatcatgcatacgggaaaggggaggtactcagcattctaagggaatgtgtagggaccttgagagtaggtgacgtagtaacgcacactctatttgattctggggctacacattgttttgttagtccggaattggttgaaacaggtgggttcaggaaagaaccaaacaccgattatggaatggtacgagcggccggcggacaggcaatgtatccgaccggacttgttcggggcatctcggttgtagtgaacggtgtcaatatgcccgcggacctaatcattgttccactaaagaaacatgatgttatcttagggatggactggttggggaagtacaaggctcacatagattgtcaccgaggacggatacaattcgagagggacgagggtatgttaaaattccaaggaataagaacaacctcgggaagcttggtaatctcggcaatccaggctgaaaggatgctcgggaaaggatgtgaggcatatttagccacgatcacaaccaaggaagtgggggcgagtgcggagttgaaagacattccgatcgtcaacgagttctcggacgtgtttgcggccgttagtggtgtaccaccggaccggtcagacccgttcacgatagaactcgagcccgggacaacccccatatctaaagctccgtaccggatggcaccggcggaaatggcggagctaaagaaacagttggaggagttgttggataaaggattcatcaggccgagtagctcaccatggggtgcgccggttctgtttgtgaaaaagaaagatggtagctttaggctatgcatcgattatcggggattgaataaagttacggtgaaaaacaaatatcctttaccccggatagatgagttgatggatcaacttggaggtgcacagtggttttcaaaaatcgacttggcctcaggatatcaccaaattcccatagagccaacggacgtgaggaaaacggctttccggacaaggtacggccactttgagtttgtggtcatgccattcggattaaccaatgcaccagcagccttcatgaaaatgatgaatggggtgttccgggatttcttagacgagtttgttatcatcttcattgacgatatccttgtttactcgaaatcttgggaagctcaccaagaacatctaagggcggtgctggaacggctaagggaacatgagctatttgcgaagttaagtaaatgctcattttggcaaagaagcgttggttttcttggtcatgttatctcagaccaaggagtatcggttgatccggagaaaatacggtcgataaaggagtggccacgaccaaggaatgccaccgagattaggagttttctcggactagcggggtattaccgaaggttcgtaaggagttttgcgagcatggcccaacccttgtctcgactgaccggaaaagacaccgcattcaactggtcggatgaatgcgagaaaagcttcctggagttaaaggccatgttgactaatgcaccagtattggtcttaccggaggaaggtgagccatatacggtttatacagacgcatcaatagtgggactaggatgcgtactgatgcaaaaggggagtgttatcgcatacgcatcaaggcaattgcggaaacatgagaagaattaccctacgcatgatttggaaatggccgcggtagtatttgccttgaagatttggcgatcatacttgtatggtgctaaagttcaaatctatactgaccacaaaatcctaaagtacatattcacccagccggagttgaatctaaggcaaagaaggtggatggaacttttggcggattacgacttggatatagcgtaccatctgtgcaatgccaaccaagtcgccgacgccctgagtaggaggcgctcggaagttgaggcggaacgggacggtcagggcgacttgcttagtaggatccggctggctcaggaacgggacgaggagataaaaggatgggcactaaacaacaagaccgagtaccaaacctcgaacaatggtacaatcgtggtgaacgatcgagtatgtgtgccgaacgatagggcattaaaggaggagatcctaagagaggcgcatcaattgaagttctcaatccatcctgggtcgaacaagatgtaccgcgaccttaaaaggtactaccattgggtaggaatgaagaaagagatggcccgattggtggccaagtgcccgacttgtcaactagttaaggcggagcatcaattaccaagtgggttgctacaaaacctacctatactggaataaaagtgggaccatataacgatggacttcgtcactggactgccgagggggatcaagtccaaacacaaggcggtaagggttgtggtagaccgattgactaagtctgcgtacttcatggcgatctcggataaggatggagcagaaatcattgccgagaagtatatagacaagatcgtgcggttacatgggattccggttagtatagtgtcagaccgggacacaaggttcacgtcaaagttttggaaggctttccaaaaggccctaggaactcgagtgaacctaagtactgcctaccacccacagacggacggacagtctgaacgaacgattcaaaccctcgaggacatgttgagggcatgcgtcttggattggggaggaaactgggagaaatatctaaggttagtagagtttgcatacaataatagttttcaagctagtattggtatggccgagcttgtagaacaccgttgtgttggacgcccgtgtgcgaacgtcggttgtttgnnnnnnnnnnnnnnnnnnnnnnnnnnnagagaatgaagttcttcaaaatcaagttaaaggaagcccaagatcgacagaaaagctacgccaacaaacgtcgaaaggaattggaattccaagtaggagatttggtgtacttaaaggcgatgacctacaaaggggcagggcgattcacctcaaggaaaaagttaagcccaaggtatgttggcccgtacaaggtgatcgaacgagtaggggcggtggcatacaaacttgaccttcctccaaaactaaatgcgtttcacaacgtcttccatgtgtcacaattacggaagtgtttaagtgatcaagaagaaagcgtggaagatatacctcccgggttaaaggagaacatgacggtggaatcatggccggtacggatcatggaccggatgacgaaagggactcggggaaattgaagggatttgttaaaagtcttgtggaattgtggaggccgtgaagaatacacttgggaaaccgagaataagatgaaggtcaattttccggagtggttcaaggagatgggtaaagatcaacttgatgcggattcgaggacgaatccaattcaaggggggggggagacttgtaacgcccgcgatcctcaataggatcgttggctaggacttggtccgaaagaagaaggtggagtctcggacaagtgagaaggacttggccataagctcggacaaaggggaaatcatgcgggctaagctaggatcgtaaagaaatcagttgggtcagctcgcccaaagctcaagctcagctggaaggagtgacggttactcaggtcgagtgaaagtccagctcgggcagctggacgagtgacggttgagctcgaggtagttggacgagtgactgacgagctcgaggtagctggacgagtgatggacgagctcgaggtaactggacgagtgacggactagctgggcggttatgggcgaagagatacaactcttcagaaaggcgcaactcttcggaaaggtgcaactctttggaaaggtgcaaggaacggatgtgttgattcgggaagcatccactcaccacaacacaccgaaaacacaagaaactcaccattcaaactctctgcctcttgggagaataaatagtcttaggattccgtagccaggctgtggctggcaataaagaaggagggtcggatcgacgtaacctcgagaaggaaggtaagggatcctagactttgagtctaagggttctaggatgtgagttagtagtcggatccttgaacggatcgactagagggctgggtagtatccgggtcatgtgcatcctacacaagactcggtccgggtagggatcggctgaggcggggacgcggctcggcggaggaccggcgggtcttaactgacctgccgagaatcggccggactgatgcgcgatcttcccctctctgaattctctccacggatccgagtagtgtatggcatatagagcattgcatagacttgcatatgattaagtaaataagattacttatggctctatgactttcaggaacgaatggtgatcgtgggaaggacttggcttaggcgcgagagactcaaggccgggatgatgggtggtgatagttcggatagtctagggatcgattatatgacttgtaatagcttatatgcaaactcataggttgtatcgaatcctttgcttaattaataaagtatccgattgtttgtttactctattcgtctcatatattgaatctcggaatcatatgaaacggattagactaggaaagaacctcataaacggatagggccgagtcacttagtggcttgggtcgagagaactcgcccggactttaggcagtccggatcggggcctttcaagttggtatcagagcatgcttggttctaggactaggtgttgggttaaggggtatcaccactcgtcggcttgagaatctcgcggtagatgttctttactcttttgcgattttactaggagttatgtggattaactttagaggtttcgcagatgggtaagagcagcaaaacgggaaagagtaagaaggacaagggcattgtcgaggagactttggttgaggaggaaacgatgatcaacgagaaaaccagagtcgggacgatgttcgatgggacagactcggccggacctaaggccgggaagaagtccataaatggggaagcaccggagagtagtggtgcaagggacagcacggataaccggaacaatactccaacggcccaagaacagtgggatttgatgaagggaatgatggcgcaactagccacattgaccaaggccgttgtagcagatccggtggtcctaaaaggggataaccaaaaggacgatgactcggaagttgtggaagtgaatccacaaccgaattatgggcggaaaaggggagactatctgagtcttctcgaacatgtctcaaggctgggcacgagacacttcatgggcagtacggacccgattgtggccgatgagtggaggagtagactcaagaggaacttcaagtctacccgctgccctgaggattaccaaagggacattgcggtccatttccttgaaggagacgcccataattggtggttaaccgtcgagaaacgcagaggggacgaggtccggtcctttgcggatttcgaagacgagtttaacaagaagtactttccaccggaggcttgggataggcttgaatgtgcgtacctcgacctagttcaagggaaccgcacggtgcgtgaatatgatgaggaatttaaccgcctaaggcgttatgtgggacgtgaacttgaggaggaacaagctcaagtgcgccgatttatccgtggactaaggatagagatccgcaaccattgtttggtccggacattcaactcggtttccgaattggttgaaagggcagcaatgattgaggaagggatcgaggaggagaggtacttgaaccgggagaaagcaccgatccggaacaatcaatccaccaaacccgcggataagaaaaggaaatttgacaaggtggataacactaagtccgatgctaagaccggggaatgcgtgacctgtggtaagagccacagcggaacttgctggaaggccataggtgcatgtggccggtgtggaagcaaggaccatgcgatccaaagttgcccgagaatggaaccagggcagtccaaggttctcggtgaagagacaaggacttgtttctattgcgggcagaccggacatctaaagcgagagtgccctaagttgactgcggagaagcaggccggacaaagggacaaccgcgggggaaatggactgccgcctcccccaaagcgacaagccgtggcaccgcgagtttatgagttgtcggaggaagctaacgatgccggaaacttcagggcgatcactggtacgttctcacaactccctattcattatttcaataactgcatttgcattgcatcatgcatatgggaaaggggaggtactcagcattctaagggaatgtgtagggaccttgagagtaggtgacgtagtaacgcacactctatttgattctggggctacacattgttttgttagtccagaattggttgaaataggtgggttcaggaaagaaccaaacaccgattatggaaaggtacgaggggccggcggacatgcaatgtatccgaccggacttgtttggggcatctcggttgtagtgaacggtgtcaatatgctcgcagacctaatcattattccactaaagaaacatgatgttatcttagggatggactggttgggaaagtacaaggctcacatagattgtcaccgaggacggttacaattcaagagggacgagggtatgttaaaattccaaggaataagaacaacctcgggaagcttggtaatctcggcaatccaggctgaaaggatgctcgggaaaggatgtgaggcatatttagccacgatcacaaccaaggaaatgggggcgagtgcggagttgaaaaacattccgatcgtcaacgagttctcggacgtgtttgcggccgttagtggtgtaccaccggaccggtcagacccgttcacgatagaactcgagcccgggacaacccccatatcaaaagctccgtaccggatggcaccggcggaaatggcggagctaaagaaacagttggaggagttgttggataaaggattcatcaggccgagtagctcaccatggggtgcgccggttctgtttgtgaaaaagaaagatggtagctttaggctatgcatcgactatcggggattgaataaagttacggtgaaaaacaaatatcctttaccccggatagatgagttgatggatcaacttggaggtgcacagtggttttcaaaaatcgacttggcctcaggatatcaccaaattcccatagagccaacggacgtgaggaaaacggctttccggacaaggtacggccactttgagtttgtggtcatgccattcggattgaccaatgcaccagcagccttcatgaaaatgatgaatggggtattccgggatttcttagacgagtttgttatcatcttcattgacgatatccttgtttactcgaaatcttgggaagctcaccaagaacatctaagggcggtgctggaacggctaagggaacatgagctatttgcgaagttaagtaaatgctcattttggcaaaggagcgttggttttcttggtcatgttatctcagaccaaggagtatcggttgatccgaagaaaatacggtcgataaaggagttgccacgaccaaggaatgccaccgagattaggagttttctcggactagcggggtattaccgaaggttcgtaatgagttttgcgagcatggcccaacccttgactcgactgaccggaaaagacaccgcattcaattggtcggatgagtgcgagaaaagcttcctggagttaaaggccatgttgactaatgcaccagtattggtcttaccggaggaaggtgagccctatacggtttatacagacgcatccatagtgggactaggatgcatactgatgcaaaaggggagtgttatcgcatacgcatcaaggcaattgcggaaacatgagaagaactaccctacgcatgatttggaaatggccgcggtagtatttgccttgaagatttggcgatcatacttgtatggtgctaaagttcaaatctatactgaccacaaaagcctaaagtacatattcacccagccggagttgaatctaaggcaaagaaggtggatggaacttgtggcggattacgacttggacatagcgtaccatccgggcaaggccaaccaagtcgctgacaccctgagtaggaggcgctcagaagttgaggcggaacggagccaagtggacttggctaacatgatggggacattgcatgtgaatgccttgtctaaagaaattgaacccttagggttgggagccgccgatcaggccgacctgcttagtaggatccggctggctcaggaacgggacgaggagataaaaggatgggcactaaacaataagaccgagtaccaaacctcgaacaatggtacaatcgtggtgaacggtcgagtatgtgtgccgaacgatagggcattaaaggaggagatcctaagagagacgcatcaatcgaagttctcaatccatcctgggtcgaacaagatgtaccgcgaccttaaaaggtactaccattgggtaggaatgaagaaagacgtggccagatgggtggccaagtgcccgacttgtcaactggtcaaagcggagcatcaagtaccaagtgggttgttacaaaatctacctataccggaatggaagtgggaccacataacgatggactttgtcactagactgccaacggggatcaagtccaaacacaatgcggtatgggttgtggtataccgattgactaagtctgcgcacttcatggcgatctcggataaggatggagcataaatcattgccgagaagtatatagacgagatcgtgcggttacatgggattccggttagtatagtgtcagaccgagacacaaggttcacgtcaaagttttggaaggctttccaaaaggccttaggaactcgagtgaacctaagtactgcctaccacccacagacggacggacagtctgaacgaacgattcaaaccctcgaggacatgttgagggcatgcgtcttggattggggaggaaactgggagaaatatctaaggttagtagagtttgcatacaataatagttttcaagctagtattggtatggccgagcttgtagaacaccgttgtgttggacgcccgtgtgcgaacgtcggttgtttgnnnnnnnnnnnnnnnnnnnnnnnnnnnagagaatgaagttcttcaaaatcaagttaaaggaagcccaagatcgacagaaaagctacgccaacaaacgtcgaaaggaattggaattccaagtaggagatttggtgtacttaaaggcgatgacctacaaaggggcagggcgattcacctcaaggaaaaagttaagcccaaggtatgttggcccgtacaaggtgatcgaacgagtaggggcggtggcatacaaacttgaccttcctccaaaactaaatgcgattccccccgtcttccatgtatcacaactacggaagtaaataagtgatcaagaagaaagcatggaagatgtacctcccgggttaaaggagaacatgacggtggaagcatggccggtacggatcatggaccaaatgacgaaagggactcggtgaaaatcaagggatttgttaaaagtcttgtggaattgtggaggccgtgaagaatacatttgggaaaccgagaataagatgaaggccaattttccggagtggttcaaggagatgggtaaagatcaacttgatgcggattcgaggacgaatccaattcaagggggggagacttataacgcccgcgatcctcaataggatcgttgactaggacttggtccgggagaagaaggtggagtctcggacaagtgagaaggagctggccataagctcggacaaaggggaaatcatgcaggctaagctaggatcgtaaagaaatcacttgggtcagctcgcccaaagctcaagctcagctggaaggagtgacagttactcaggtcgagtgacagtccagctcgggcagctggacgagtgacggatgagctcgaggtagctggacgagtgacggacgagctcgaggtagctggacgagtgacggacgaactgggcggttatgggcgaagagatacaactcttcggaaaggtgcaactcttcggaagggcgcaactcttcggaaaggtgcaactcttcggaaaggtgcaaggaacggatgtgttgattcgggaagcatccattcgccccctatataaggaagggcgcccaggaccattccactcaccacaacacaccgaaaacacaagaaaactcaccattaaaactctctccctcttgggagaataaatagtcttaggattcggtagccgggctgtggccggcaataaagaaggagggtcggatcgacctaacctcgagaaggaaggtaagggatcctagactttgagtctaagggttctaggatgtgagttagtagtcggatccttgaaaggaccgactagagggctgagtagtatccgggtcatgtgcatcctacacaagactcggtccgggtagggatcggctgaggcggggacgcggctcggcggaggaccggcgggtcttaactgacctgccgagaatcggccggactgatgcgcgatcttcccctctctgaattctctccacggatccgagtagtgtatggcatatagagcattgcatagacttgcatatgattaagtaaataagattacttatggctctatgactttcaggaacgaatggtgatcgtgggaaggacttggcttaggcgcgagagactcaaggccgggatgatgggtggtgatagttcggatagtctagggatcgattatatgacttgtaatagcttatatgcaaactcataggttgtatcgaatcctttgcttaattaataaagtatccgattgtttgtttactctattcgtctcatatattgaatctcggaatcatatgaaacggattagactaggaaagaacctcataaacggatagggccgagtcacttagtggcttgggtcgagagaactcgcctggattttaggcagtccggatcggggcctttcaagttggtatcagagcatgcttggttctaggactaggtgtttgggttaaggggtatcaccactcgtcggcttgagaatctcgcggtagttgttctttactcttttgcgattttactaggagttatgtggattaactttagaggtttcgcagatgggtaagagcagcaaaacgggaaagagtaagaaggacaagggcattgtcgaggagactttggttgaggaggaaacgatgatcaacgagaaaaccagagtcgggacagtgttcgatgggacagactcggccggacctgaggccgggaagaagtccatgaatgaggaagcaccggagagtagtggtgcaagggacatcacggataaccggaacaatactccagcggcccaagaacagtgggatttgatgaagggaatgatggcgcaactagccacattgaccaaggccgttgtagctgatccggtggtcctaaaaggggataaccaaaaggacgatgactcggaagttgtggaagtgaatccacaaccgaattatgggcggaaaaggggagactatctgagtcttctcgaacatgtctcaaggctgggcacgagacacttcatgggcagtacggacccgattgtggccgatgagtggaggagtagactcaagaggaacttcaagtctacccgctgccctgaggattaccaaagggacattgcggtccatttccttgaaggagacgcccataattggtggttaaccgtcgagaaacgcagaggggacgaggtccggtcctttgcggatttcgaagacgagtttaacaagaagtactttccaccggaggcttgggataggcttgaatgtgcgtacctcgacctagttcaagggaaccgcacggtgcgtgaatatgatgaggaatttaaccgcctaaggcgttatgtgggacgtgaacttgaggaggaacaagctcaagtgcgccgatttatccgtggactaaggatagagatccgcaaccattgtttggtccggacattcaactcggtttccgaattggttgaaagggcagcaatgattgaggaagggatcgaggaggagaggtacttgaaccgggagaaagcaccgatccggaacaatcaatccaccaaacccgcggataagaaaaggaaatttgacaaggtggataacactaagtccgatgctaagaccggggaatgcgtgacctgtggtaagagccacagcggaacttgctggaaggccataggtgcatgtggccggtgtggaagcaaggaccatgcgatccaaagttgcccgagaatggaaccagggcagtccaaggttctcggtgaagagacaaggacttgtttctattgcgggcagaccggacatctaaagcgagagtgccctaagttgactgcggagaagcaggccggacaaagggacaaccgcgggggaaatggactgccgcctcccccaaagcgacaagccgtggcaccgcgagtttatgagttgtcggaggaagctaacgatgccggaaacttcagggcgatcactggtacgtctcacaactccctattcattatttcaataactgcatttgcattgcatcatgcatatgggaaaggggaggtactcagcattctaagggaatgtgtagggaccttgagagtaggtgacgtagtaacgcacactctatttgattctggggctacacattgttttgttagtccagaattggttgaaataggtgggttcaggaaagaaccaaacaccgattatggaacggtacgagcggccggcggacaggcaatgtatccgaccggacttgttcggggcatctcggttgtagtgaacggtgtcaatatgcccgcggacctaatcattgttccactaaagagacatgatgttatcttagggatggactggttggggaagtacaaggctcacatagattgtcaccgaggacggatacaattcgagagggacgagggtatgttaaaattccaaggaataagaacaacctcaggaagcttggtaatctcggcaatccaggctgaaaggatgctcgggaaacaatgtgaggcatatatagccacgatcacaaccaaggaaatgggggcgagtgcggagttgaaagacattccgatcgtcaacgagttctcggatgtgtttgcggccgttagtggtgtaccaccggaccggtcagacccgttcacgatagaactcgaacccgggacaacccccatatctaaagctccgtaccggatggcaccggcggaaatggcggagctaaagaaacagttggaggagttgttggataaaggattcatcaggccgagtagctcaccatggggtgcgccggttctgtttgtgaaaaagaaagatggtagctttaggctatgcatcgattatcggggattgaataaagttacggtgaaaaacaaatatcctttaccccggatagatgagttgatggatcaacttggaggtgcacagtggttttcaaaaatcgacttggcctcaggatatcaccaaattcccatagagccaacggacgtgaggaaaacggctttccggacaaggtacggccactttgagtttgtggtcatgccattcggattaaccaatgcaccagcagccttcatgaaaatgatgaatggggtattccgggatttcttagacgagtttgttatcatcttcattgacgatatccttgtttactcaaaatcttgggaagctcaccaagaacatctaagggcggtgctagaacggctaagggaacatgagctatttacgaagttaa

SEQ ID NO: 161456 - DNA, 8206 bp, Arabidopsis thaliana landsberg
atggtcaacaatcaagtctccggtaacgtagttgatacagaggggaacccaatccctccaatccagacagacgctcctgaagccgctgctcccgcgaccctagtggaactgaggagtatgatggctcaacttcaacagaaggtaaacgatcaagaacaagcaaatcggtccttggcgcaacaactcgaagtagctatctcctaaggacagatcaggactactcgtttcggcgcgaggcatcttcaggatcgacgggcagcagcagatctcaatcccacacggctcgtattccacacacttggcaatactacaaggcccgtctgcagaaccgcaccggaaatcagaagagaccgaaccgagccggcaattttgggaaatcgggaaacaaatcaaaacgaaccgcagctccctcctccccgagcagaagttgccgaggccgatcagatcggggtctcaggcgatgaagattcggaagagaacgttcggtgggctgaggaatacgccagagaacaggaaataagcgctatcaagctctccctagccaaggcagaaaacgaaatgaagctcgtaagatcccaaatgcataacgcagtctcctcggccccgaacatcgactgcattctagaagagtcccacaacacaccattcacacacaggatctctaacgcgataatctcagatccaggaaaattaagaatcgaatacttcaacagatcttccgacctgaaaggacacttgaagtcattcatcatctccgtggcccgagccaaatttagaccagaagaaagagacgccggtctctgtcacctgttcgtagagcacttgaaaagggtcaactctggattggttctcgagactcgaaggaaattctgtggacagttttcaggagctatcgacactcttcttgaagcaatattcggtgctaatcgatcccggtacatcagacgccgacctttggtcactatctcaatagcctaatgacccgcttcgagacttcctcgcaaaattccgatctaccctagccaaagtcgaaggaatcaacgacgtagcggctctatctgctctcaagaaagcactatggtacaaatccgaattttaaaaagaattaaacttgtccaaaccactgacaatccgagacgccttgcaccgagcctcggattacgtatcccatgaagaagagatgaaactactagctaaaagacccaaaccgaccaagcaaacgcctcgcatcgataaacctcagaccggcgctccgaaccacaagaaaggcgcccaaggtggtacgttcgttcaccatgaaggacgaaatttctccagagcccataattaccaggtcgatacaccccgaggcaaagccacccgaggccgagggcgaggccgcggacgaggacgcggtcgagaatcctacacatggacaaaggatcaacccgcaggaaaagagcaagaatattgcgagttgcacaagagttacggccatcacacgtccagatgtcgtagcctcggagcgagattggcagcaaaattcctggccggagaaattggtggaggcttgaccatcgaggacttagaggcagaaaagggtaaaaccgagcaggtcaacgctgtggccaatcccgagcagaccgcccccgcggcgaaccccgaaggacctaaaagaggccggggtaatcgcgaaaaagatgacgatgaaccagaagctgctcggggaaggatcttcacaattttaggggattcagctttctgtcaagatacggcagcatcaatcaaggcatatcaaaggaaagccgacgcgaatcgtaattggacgcggccatttaatggaccaaatgacgaagtaacctttcacgaaagcgataccaacggtttagaccgtccacacaacgatcccttagtcattacattaaccatcggtgatttcaacgtcgaacgagtcctagtcgacacgggaagcacactggacatcattttccttacaactctgcgagaaatgaagatcgatatgacgcaaatcgtgccaactccacgacctgtgctcgggttctcaggtgaaaccactatgactctcggaaccatcaaactaccagtccgagccaaaggagtaacaaaaatcgtcgatttttctattaccgaccaaccaaccgtgtacaacgcgattttcggcaccccatggctaaatcagttccgagctgtcgcctcgacgtatcacctatgcctaaaatttcccacaaacgacggcgtgaaaaccatctggggaaaccagaaaaatgctcgcatctgcttcatggcagcgcacaagcttaggaaccccgtcaccgaatcgacggccgacgcgaatcataagtaggccaaacttggcggagccgaagaaaagtcgatctccgagcagttatagcaattaaagatcgaagaagctcgggaatctacgataccaactcccgatccggtcatctcaatttgcctcgacgacgcaaagcccgagcgatgcgtagaaatcggcggagatctaggagaagaactaacagctgaactcaccactttcctcaaagaaaacgtcaatactttcgcctggtccccagaggatttgaccggagtaagtgttaacatcgtatcacacgagctcaacatcgattcaacttttaaacccatcaagcagaagaggagaaaattgggtcgggaacgagcagaagccgtaaaagccgaggtagaaaaattattgaagatcggatccatcacctaggcgaaataccccgactggatcgcaaacccagtcgtagtaaaaaagaaaaacgggaaatggagagtttgcgtagatttcacagacttaaacaaagcttgcccaaaggacagcttcccattaccacacatcgatcgcctcgtggaatcaacctctgggaacaaactgatatcgttcatggatgcttttgcttgatacaaccaaatcatgatgaaccccgaggaccaagagaaaactgcattctacacagagcaaggtattttttgttaccgagtgatgccattcagacgtaaaaaacgctggggcaacttattagcggttcgtcaacaaaatctttgcgttatagatcgggaaaacgatggaagtgtatatcgatgatatgttggaaaaatctatagaagaggaggaacacatagcccatctgcgcgagtatttctggtagcttaacctctataacatcaagcttaatccagccaagtgccgcttcggagtgagatccggtgagttctgggatatctagtcacgcgatcggcatttggatcacgtagatcatgcctgatgatcggggattttaattgctcggaccgagcgtatgatcgagagtgcttttgttgtgttagtagctaggtagaatgagtggcctagaattttcgtgggtggataggtattactgtagataagagcagaattagatagagacaagattttggataagtatggttgtggatagaaacaagaatggatatggacgaatgtggatagggacgacattagggataagaaagagtatggataagtttgttcatgcctatccgttccgtatggataatatagtccaagtttatccgcgtaaagataaggtcaaaaaagtttatctgcatgttgtagatagagttgcggataagctcggttgagcctatctcgccaccttgtgttttccaaaccgacctaccacccctataaatagtccttccgcctcatcattcctcattcacaaaaaatgcactaaaatctctctaaaaagaatgtgagcgagtgttgagagtcggatacgactagtttgtccagaggagcttctaggtaatgtcgaggatctgtcgagtagattggttaggcgatcggaggctgagtttggattaggagtagatcaagtctaccgttcagcggaatcaaggtaagtttctattcatgcgtgattgcgttcatgtggttccatgtagtcgacatactcatgataactagcttgattgtttattttattgagtgcttgaggttatgctttcaatattgttatacttctgcatgctgcttgttattttgggtttcgggttggggatttattgcctattagagggatctaggactcattaggcgagtagcgctcatcccccactctcttttgcaggtaaccttagtcgcaaactttattttaagcatggatgttagggaagccggtttagtttttgcgttgactttgtaaaattgtatttttgtaaactagtatgtacgactcaattgagcttcggcttttgtacccaaaacctatacatgtatttggtaatttatttcaatacataatatatgaataagaaatcggcttttgttaaaactctcgtgtatcctctcattagtctagcccgtcctaatcccaacttgcggtcgtagtacggattgcaaagcctttaagccccgtggttgcgagaggcggttttctgtggtcgggcttggccttcggtgatctttggtcagatttgtctgcgggcggtcgccaacaatacgtgatgcttccggatttattcttagttctaggacggttcggggttgttacaagggtggtatcagagcatggttcatgatgctttgaggacgtggcatgatttttcaaatgttttatacagtcaaaagagtcgcaaaggcaattaggaaaactgtttcatgataggtttagatagtttagttaggattacctttggatggtggttgcagatttatgaaggagagacggccttggagaccattaagctgaggagtgaagaggatgatgattatgatcgccggacacaataccctccgatattaacttatgtgtagcggaagcgtggtggtcatatcatatttaagtaagtagccttcagtggtcttccattctggcttgtctagtttttaaggagctagtggagcggcaaaccttcataagtatttttataagtttaggaataggttaccctgaaactttcatgattgtaagatcccattgaggtacgtatgggttctaacttctcttgttcttgtgcaaatgtttgcttgatttttgtttatattgtttgcttgttgatttttgaggaacccatagagtgtattaggtaaaccctaacgatttaggttagaacctttttagtcttttagtggttaccagagttgtctcttagtccttagaattggaggatgaattcttttaaaggtaggagaatgtaatacccctgcctaggactaggacaaagccgaggaattgtagtcgactatttagcaagtcgtacaatcggaacgatcgaaagaagtctttacgggacaagtattgtttcgtcggaccaacagtctaccagtttaggagatagtcatgagcaagtggtcagggaaccagatgggtgagtcaagagaaacaaggattgggtgactatgattaatgtgttgatgcgttgagggaacgcgtaaacccatcttggttatggttctacgagatgttcatcgttagtaacggtaatgtccctgagtgcgggggtgtgtgtttcactcggtaccgtggcccttagtaatatcttaccccttactaggcgctgcttatgtactattttctaaacaagccgctacatggttgtcgagctttacttgtgccgggctatcagcatctggatcatgtagatcatgcatgatgatcttggccaccattcctaaggatgcttcagagaactcatctgctcaacttatgagatatgtcaagcatttggtcaacaatggagtaaactctaaggaagcaaatttgctcaccagggatatcagtcccatactgttagcgaaggtcaagaaggacatgtccaagagagtagtgcgttcagaacatgttagctctattgccaaaggtcaaagcactgagaagctccccgatccaggtagcatcgttcttgattactcaatctctactagcagattcagtcactccttgtgtgatctgggatcaagcatcaacctcatgcccaaatctattgctgagaggcaaggcatgactagctacatctcgacacggatcactctcctctacgcggatcgttccaaatgagtccatgatggtatccttgaggatgttcctgtgagagttggtaattgcctcatccctgctgattttgtggtcctggcatatgatgaagaacccaaggatcctcttatccttggtagagctttgctacctacagttggaggtaggattgatgtgaagaagggaatgatatctctcaacatatgcgatgtgcagatggagtttggcatggatggttcggaatctacattgcctattagtaacattgcaataaacaaggacaaacctcctaattctgctcaaatttcaactccagagccgaccaaaaagattgttacaactcagtcatagatgagagatgtagagaagcattgtcgatcgacaccatcgcgtttcatattcagatgcttctcccctcctccacagcccacaactgcttcagttcccactgatatgtactcctctatctcttctcctactgttccttcgattatttctttaattttttttaaagtgttacaggtaaccaagcatcgagactctcgagcgcttgtttcctcattatcttgcaggagtgagtatcgatcgataccaacaccaatgtcgatcgaaacatgatactgcacataggcgatctatttacacactaccttggaaggcaagattgcaatccgctaagcagcataagtcccttgtcactccatccacgcccccaactccgccaagtcaagctattgactctaaacaatcgcttagtgggaggcaaccacccactgatatgatttttcttttctttttcttttatttttgaatttttgatttatttttccagctctttacggatttgaatgccagtggggacagtggggtttaagtctcgggaagcgcttactaactatgcttttatttttggttcttattattttttgtttttatgttattgaatcattttcttttttctaacaaaaaaaagaaaaaaaaacaaaagaaaaaaaaacgtttttatttagtctagttaggaattatgatctgtatttttttaaattaatgcctggttgattattgctgcaagttcgattcaatccgactattggaaaatctaaatggaaaactgacagacttgaagatatccttgttttcaacacaatccattaaggttgtagctaatctcactgctcttccttttacctcatcaaaacggttagagttcgtaggacttgactaagaaaggagacctctcccttgataactaaatatgtatacgaacgagagactaaaaggattcgcagataatgtatagggtatagaatgtttcctattatcccactattagacattgttcgaaatgatcaattacaaagtttggaaaaatgccgaggatgtcgatccagtatgcgagttcctctttgtttaccctctaaaaagtataagtttaggggagagaaagagtaccggaaataaaaagaaaatgagtggtcgaattgttatggtatagtaaatgaataagtctagaaggtttattaaacgttaacttgattgatgagaccaagcgatgagagcctaatggatatagttgagtgctttcatatggattctaggatgttgtgtgggctagcggagaattacatagtggttagaatttgactagaactgtttagtgcattgatttggtttgtatgatcttggtaagaagctagagagattgggagttcctgtgttttcaaacttcttccaggggtttggcttttgtgttttgcttgagggccaacaaaagctaagtcttggggagtttatatacctcgattttcactgcttttagctatgatttaggtatagtttttaaagtcctttcgttatttgtagagtcttttctagtctttttcaggtctttacatgtttgggatgcatttggagattatggagcattctggagcaaaacagacaatttaagctgcagcagcaatccggagacaaaaattgacgtaggtgtcgatcgacacaacccctggtgtcgagtgacaccaatacctgacgacaattcaattgcgcaacttattgatgttttgaagatttccaaattcggcctagaactttcccttatttccaaagaaggcccagatgtttttaggacttatatattgatttttatggtcattgtttag

SEQ ID NO: 161457 - DNA, 832 bp, Arabidopsis thaliana landsberg
ggccctaatactatcttcatattcatttttgttaagccaagaagggaaaaatgtttttgactgggctgagcaaacatttaaacgattactatgaatatgatagagctcgagaggcatcttttaacggaggagggaacatcgcttttagaggaaaactcaagggagatgcgtatttcacaacaaggctcttcaaaccccatcttcagctttcatcttcccccatcacaatctcctactctgtaagtctctgcttctagatacatcacattatgagatcttcttgtttttactaatggggggttttgagctggtgcaggtgaaatcagatgaaacctctaatcttggaatcctgctttctttctcatctccatcactagagactaaatccatactcgtggtgccagaggatcccatccgcagatttgacgacatgtccttacagtgtctcaccacatcagtgcagactgtatccgagtggacggtacacgaggcaagtcttgtcatggatggtcacacactgactgaaatctctgccttttgctacagaccagagaattcgacaaagagtgcagaatttgttgcattgctcggacacatctcagtcaaagatcatgttcaaaaccagcagaaccccgagattttacttccagcttcatcgtgggtcatcgaggctcataacgtagagcttgtacccagcaataccagatccaatatcctgacggataagctagaatggagacagatagacctcgaagaatccgcattcacgcggtacaatgtgtatgcccagaatgacaagtcgactgatctaagaccgaggaagggtctctag

SEQ ID NO: 161458 - DNA, 1849 bp, Arabidopsis thaliana landsberg
ttacacgacattattaatgtttgtcattgtcttgacatcaaccaacttgtcaacaaactcttgaaaattcctttccgatgttccaccgtaagccacggcagactccgcctcctccttccacctccgagcgttttctctcagctccaccgccttctctccaacggtggcctcaagcagtcgctcagcaacctcctcccttggaacaatcctctcatcagaagctccacggctgagtctcaatcctgtcttgaaaacaccaatcaggtacaccgcatttgtcacctgatctccccactgcgggaaacaaataacgggaactcctgaagttaaagcctccatggttgagttccatccacagtgacttaagaagcaagcaaccgcaggatgagccaaaactttctcttgttgacaccattccacaatcttccctttctcttcaagctctagaggcaagacatgtggttctatggctaagccttctaagggaggacgcaaaacccataagcaggacaacggggagttgagaatgccgtgagcaatctcgtcgatctggttttgcttcaagaaagccaaagtcccaaaagagatgtaaacaacggaggatggttctctcgagtgaagccactctatgcagtcactatctggcttggagatgtctcccttgatgtcagaccttatggttttagccatagtaaaaagcggaccgatggggttgaagttgacttgagggcagagctgggacatgtggtcaatggtatctttttcaagttcttgaaaagtttcgatgagaacagagaaaggcttgtgaagtcgcttgatctgctctaaaatggtacctcctatagaggacagcggagaggaagggtgaagaaagctagggatctcgtcatgcttcaattttaatggcttgaaagggacgtcaacggttatttccggctcggtttcggtcggaaacttaactaactggtggtggtaatagtaataagcggcgaggcaagcacaagactggacccaaagaacagctgatgggatttgaagctcctcggctatgtcacaaacccatggaacaaaggcattatttatgagacatctcactggttgcttctcatatttcttgacaagattcttgatctctcgttttccggaaacttcaagtgatttttgtaacaaatcaaagtcttctttgtagacaaatccatcctcgaagaactcgatccggagaaaacctagcccgaccggtttgagcacaccgtcttgaatattgttggcttgacgcatcttcttgcccaatggttcctctgtggttacaaaggtgacgattaagcctttagaggcaatgatctttccgagacgaagaagagggcttatgtgaccttgccctgggaatgatacgagcatcacatgaggtaacgacgattccatctccatattttttttgttgttggtaaaactcaaaaagaagtttttgtcttctttacaatatttccaatttagatacctcgatttatggaaggttgggtagagaggcctttccacggcgtgctattttttatacaaatattgataataaatgtagaaaaatatcataaaatacagcatagacatagacacataaatttataagcttttagtcaattataaaaagatagtaataagacaaaacaaaattatagataacaattttggaaaagaagcgtaaaagaataaacaaaaactagaagagaaatttttataatgattatatagtgatactaaagtccttgagcagatgacctacttgatttatttttcaaagattacctgctctggttataatggtattataaaccacgagattagcgatcttcat

SEQ ID NO: 161459 - DNA, 383 bp, Arabidopsis thaliana landsberg
atgacgaaaggtaaagagatcaaatttcccggaaaaaaaaaggaaaagcaaaagcagtgtgggtttaaggatgggccacagagaagagaagaagaagaagaagtcggtgggtgaattagtttttttgtactgtgaatgatcacaagaaattataaacaacaactaagctacagggtcgaattcgaaacttttctgagtaagaaatctatagaagaaaacttgaagcaaaagttaattaaaaacctaaaaaaaattagaagaaggaaaaaagatgaaacgatttttagggtaaagggtggtttggtttgggaaattccattgatggtgatgatgaagaagttggtgatgacgatgaagatgatgatgattatgatggtgcgtga

SEQ ID NO: 161460 - DNA, 456 bp, Arabidopsis thaliana landsberg
gcacttgtcccttatgctcatctttgtgtggttggttacagaaaccattgattcttgcactctcaaacccaacttctcaagccgagtgcacggcggaagaagcttacacatggaccaaggtaacaatcaaaagcttattgatactctcacaaaatgtaaatttgcatatatttgatgcaactatgaaaaaagaattgtgttttgattatagggtcgtgcaatctttgcaagtggaagcccgtttgaccctgttcagtatgatggcaaaaaattcacgcctggccaggttcgttgattttcttttaacattttttctctataattcatggctcatgtccttccaataacattcctttttcaggcaaacaactgttacattttccctggtctcggtcttggtttgatcatgtccggtgccattcgtgtccgtgatgacatgcttctagcagcttgtaa

SEQ ID NO: 161461 - DNA, 370 bp, Arabidopsis thaliana landsberg
gacatacgaaactctatcaagaccagctaaccctaacggttagtaggtgaaagacgactattatcactaatatcttgcgtactcagttgccctatcggctagtaggtgctaacatggtttcaaaatacatatgaaagcattaagttcaagtttgattctagtccataagtccctatcactcgacgggtgagcaacgattatagttctttattcagttgagttagttcaagattattcaagattctgccaagtataaaatacctaagatcatgtactaggtggcgttccggacattcaagcattaagattaaactcaactagaaagaatagtgtaaacgatcaaacaaaaccatagaaaccaccaacctaa

SEQ ID NO: 161462 - DNA, 149 bp, Arabidopsis thaliana landsberg
ttcctcaggttagtaagcgtgaggagttgtgtgcaatattttgttcgagtatgaagttctaaggaaaacttttttggcaagatcagatgaataacatgccgtcttaatctatattgcggggcgggtgttacattacaactcttccttgg

SEQ ID NO: 161463 - DNA, 136 bp, Arabidopsis thaliana landsberg
gcggcggagagaaaagatttagaggctgcggtggtgggggtggttgagacggtgggattcttgtggcttgtctcatggaagcacgatgttgttttaaagcggtgacgatttcgcgacgagcttcagccatgtttag

SEQ ID NO: 161464 - DNA, 475 bp, Arabidopsis thaliana landsberg
ttaacggacacatctattttctttagacttcttggtaagaattaacatataagtaacctctttgtctagaattttttgttgtttaataaaatatcacattacaacaaaaacaaaatggtacatcatgaaagtttaaacaatttctgtttgactgtttcatcaactaaaattagaaggagaaaaaaaatgtggaaattgatacatacttattgctgaagatgtacactaataatctgattttcaggaattgcatattaaagtataagaaatgagaattgagatacttttgagttttgacagaaaataaacataacaaaaattgatactgaaaatgagataaatagcattaagaaagcatattgagaaagcttttgtccaatctcccatcatgcaacatatttgtcaccaagctaatgattgaagcatctccaacaaacccagaactcctcatttctttgatgagttctgctgatgc

SEQ ID NO: 161465 - DNA, 436 bp, Arabidopsis thaliana landsberg
  unsure (1)..(436): unsure at all n locations
aatctacaggctgtctaaatcgaaagacggatagagcaagaagcaaaggctnnnnnnnnnnnnnnnnnnnnnttgctacttggtatgtagaccttggattagaaatgtgaatggcatgccttgatgaatcttttggtaatagttttcctctaattttctgacttgtgttttgtaaaggtgctggggaatctggaaaatctacaatttttaagcaggcaagtccacaaggaaaattgattgtactctttacttaaatttacttatgaatcctgctaattgaatgatacaaatttactaatttgcagataaaacttctattccaaacgggatttgatgaaggagaactaaagagctatgttccagtcattcatgccaatgtctatcagactataaaagtatgcaatacttgaaatgactgtgtcgggtttatccttct

SEQ ID NO: 161466 - DNA, 468 bp, Arabidopsis thaliana landsberg
cagtagctttcgactttttccaatgctccaaaatggtctagagcttcggccatgtaaacttgcaacatctcaaacaaagatgaagatggctcgtgaagaactctttgatgaataagtaagactctgacaagccaccatgaaatactcctaagttgaaaagtttcagaggcacttgtctcaaacaacaaatctttcaactttaacagcagcaatctagcaaaaactaaatgctgcaaggagaaaaaagtagtttgggttacacaagagttcactacaaacaaatacagaaatgaatgcctaggatacacagcttagacccttgcaggatataatcatcacacagactatggagaaaaaactaggcaacgaacttgaaaagacacagaagggagatagtacctggagattagaaaacttcccgagcaagtcagaacctgcagacatgagatgaatcttagcccagttctc

SEQ ID NO: 161467 - DNA, 467 bp, Arabidopsis thaliana landsberg
agtaagatcgttaaatgtctcctctctgaagtcgtgcgtttacaaggaatttaatggaagatccacttttattgggagatgatcagttaatcactagaaacctcaagtcaacgctgacatggtggatgaattttacggcggagctgaagaacgtcagctctatggcggcgcctatggccaccgtgacagtggctcaatatctattgcccgtgatctcggtcatggtcgccggccactgcggtgaactccagctgtctggtgtcgctcttgccactgctttcgcaaacgtctccggcttcggcatcatggtaattagtttatcctctgtttaaaccacgttcaagatccaagcgaaacttaacaagtcttggaaatttttgcagtatggtttagtgggtgcacttgaaactctatgtggccaagcttatggagcaaaacaatacactaaaatcggaacttatacgtac

SEQ ID NO: 161468 - DNA, 502 bp, Arabidopsis thaliana landsberg
aaaattttcccaattgttgttatgtttggagttattatatggacttggcaattctaagagcatttagcgaatattggcaaacgctgtataactggaaatggaaaaaggaagaacaaaaacgaaattgacatttcgaatgacaaaaagatgtacatgacatgttgttttatgtattggcctgtgtttactcttcctgtgccaaactatttaattctctttagatgctacttcatcaacaacaaagcttgagctcgagtcccttcagcagctgcattgaaccaccaatcttaagcaagatgatctgttgttttctggttcaagtcgtcgttggaacgtaaaccacattgttcagtaagctgtgagatcggccatagaagagatagatcatgcttccagtaaatagccataccaagaccctgaatccctgatccatgtcccagctctgacattacataccactaggaactcactcaatgttgatgatcaagtaggtgttgaccaa

SEQ ID NO: 161469 - DNA, 195 bp, Arabidopsis thaliana landsberg
aaaacgtcgaacagagagctaatttgatatatccgtctcatttaaattttagcttcttgatccttaatcctcatgctcagggtcaagagtaatttcaaacccatgtggcaagaatttgttaaatacgagaattaaatggttatgtccctttaacagctctttgactcgtgcaatcacgacagaagtatcggtcct

SEQ ID NO: 161470 - DNA, 216 bp, Arabidopsis thaliana landsberg
ggttaggatttaattagacttgctaggcatatggatttggttaggatgatcattgcaatagactagagaatgttgggagttcctttgttttcaaaacctcttccacgggttcagcttttgtgttttgcttgagggcaagcaaaaactaagtctgggggagttgatatatccctatttttaccgtttgtaactatgttttaggtataggttttagag

SEQ ID NO: 161471 - DNA, 205 bp, Arabidopsis thaliana landsberg
gtttacggagaaatcctccagtgactggtttccttcgtcgaggaagccaaaaagaacatcgtcggagctagccatgccgtcgagaaatttcatgatgtcatcggaactttgccgatccatttcttgaagcaggcgagagagagagagagagagatatggaaatgttttttgtttttttctctcttaattattttttgtttcgatg

SEQ ID NO: 161472 - DNA, 330 bp, Arabidopsis thaliana landsberg
tatgctttttatctcaaatatgttgtttgcttcatccaatatgtctgagtaatctgcttgttaggaataggatttctcattaggtattcatatggtttagtagattgaccccttgctaggttatctgtagaattcttcatctttaattgtgcttaatgctagatctagagtaattaactagatcatgaatccaaacaatagatatgcccgccataggtatttgtagttggatctattatttgatgagtctggtttatatgtgtgtaataagaatcggcctagctactaagattaacaattgaactcgttaagaatgcatatttaggttga

SEQ ID NO: 161473 - DNA, 219 bp, Arabidopsis thaliana landsberg
caccacgatcgagatcctcgattccttaattgctcctgtgagagcaggggagatggtttggcttctttcgatactttgatcatcaaacatggaaatcccgttgtagctaaactgtttacgtaaatggctgagaaatgttttacggacgtcaggtccatgaaagctcgtgaagacgcggtatatccaggttcgagaccaagaagaagaagaggaagaagc

SEQ ID NO: 161474 - DNA, 109 bp, Arabidopsis thaliana landsberg
gttcttcctgtatatgtatctatataatacacggccatttgtgttttcaatcatttttatcttcaaatggcatagggtacaatcgtgtatcattggttctagaattgca

SEQ ID NO: 161475 - DNA, 415 bp, Arabidopsis thaliana landsberg
gactccggccggcgttattctaaatctccggcatcaatggccatgttctcgcatcgtctccgacgaatagtcgcaccttcctatttccaacgattctccactctatctcgtccctccgatttcactcccgtgccatcgttattaccgagatctgtggtgaagcaatcgacggcaattaatcgatctcccgcgagattgttctcgacgactcagtatcagtatgatccatacactggagaagattctttcatgccggataatgaaggatgcgattttaatcattggttaattacaatgaatttccctaaagataatcttccatctagagaagaaatgatttcgatttttgagcaaacttgcgccaaaggacttgctattaggttcgtgtttctgcaaattgcttcaaattttggaa

SEQ ID NO: 161476 - DNA, 282 bp, Arabidopsis thaliana landsberg
  unsure (1)..(282): unsure at all n locations
tatctcttcaccgaaacatcttcaaccttcaataggagaaaccaattctcaattgctacaaaaatataaatattttgaaaaatgaaactggagctggtgttcataccatcacctggtgacggacatttacggccattagtggaggtagttaagcnnnnnnnnnnnnnnnnnnnncattttttcattatcatcattatcatctcttagatgcatggatttagtagcatgaactattcttttatacattgcctttattttcccttgattctgaagaacgtttta

SEQ ID NO: 161477 - DNA, 384 bp, Arabidopsis thaliana landsberg
  unsure (1)..(384): unsure at all n locations
ttgccatgcaagcttgaaaaatgctgtttctatggtttatgaaattctgatgagcaataagagaaagtatcctaagtcgtgcgttcttttaaggatgttaagtttttgatcgtacacgttaagcatcaaaacactcgatcgaagtacnnnnnnnnnnnnnnnnnnnnnncggatacgaaaaggctgccgactattcttaaatcattttatgtgcatataatttagagaaaaaaagctcctctgatattatgctcccaattctgattttatggggtttggattattagtacccatttttagataaattatgagtgccgataaagtatactcttgacagggacagtgaaaaaaagaagaacaagggtgaaaaatgttcaaatggtc

SEQ ID NO: 161478 - DNA, 602 bp, Arabidopsis thaliana landsberg
cgtattttagagttattgtaaggtcaatttggtgaaaatgtgtgactaaaatatctttctccataaaataatttttttctccagcacaccctctagctcttgcagaggtttaaagaaaatatcggcaacatacatagaaaaatctcgtttattcatttataaaggcataaagttacacaccaatcactaagccaagctcatatgtcatatatcataaagtaagtaattactaatggagagagataactaaaaggcaaagccttctttttattcaagccactctcatactttcattgtttgaaatcacacaagtgttgcctttccgagctgaagagctttctctcgcccgtaaaacttttcgacaatggcaagtgaaaactccattgcagtccctggagctctgcttgttatgacatttccatctaccacgactctgtgctcaatgtgactcttgtccgaaagtttgtcgctcaccactgggtgagtagtagccttcttaccctatacaaaacatgtctcttatatctcagtttaatgacttaaaagatagaacaagaaactacaattctagtactgtttgatttatgcaccttgagtaaacc

SEQ ID NO: 161479 - DNA, 240 bp, Arabidopsis thaliana landsberg
cctcgtctatagctacctggatcgagtaaaggggtcgagtgaattgctctgctgcttccctcttggtttgatagagtagagggtcgagtagatttccttgtgagctctttctgcacctgaaaacacaccaaaacatgcaatatatatgtaagatgatcctaaatgcctaagatagagcaaaataagctaaatgtgatgcaaaatgatatgatacaatgagtgatcactaagctaaatatg

SEQ ID NO: 161480 - DNA, 416 bp, Arabidopsis thaliana landsberg
tgaggacctttgtgtcattcaatgaaggacatacatttcagcttactttggcttctcttcttgaaatgggttaccaggtaatattaatttcctaatgctattattttttatgtcatggtcgttcttatacatgattgctctttagtagaagttggctacatatgatacaaagcaatggttttcatataacaagtttgttgaaacatgtaggtgagatttggactcttggaggcaggggcatatggaatatctcaacctcgtaaaagagctttcatttgggctgctgcaccaaaccagttcttccggaatggccagagcccatgcatgtttttaataattcgcgttttaaaatcccactatctcaaggtttgcaaaataaggctgttcaaagtactaaatttggtgcacctttccgt

SEQ ID NO: 161481 - DNA, 416 bp, Arabidopsis thaliana landsberg
tttacaccaaaaatatatatatatatatatatataatcaaacaataataattctaataccgtaaataccgtaagtgattaaattatttaaatccaactaaatgtctaataccgtaacatatatactagaagatcaccaatgacggagataaattaataaaacaacctgaattcacacaactaatatcgggtgtctcactcaccattcgattcattttttaaggcggcattgtgaagtcttcatcaaaatctaaaacatcaaataagtttaagaacttaaattttttttacaaatgatttaattaagtctaaaataccatattttattccaaaatcaagaaaatgtttaaaaccctcacccgtccggtttaactagttcactgagtcacgtgttaatgatgagtttttgtgagtttt

SEQ ID NO: 161482 - DNA, 91 bp, Arabidopsis thaliana landsberg
cagctccgtctcagattattcgctattcccgacgaagagagtagatacgttgtttagtcagacatggtcaaacgttccccctatcacgggt

SEQ ID NO: 161483 - DNA, 291 bp, Arabidopsis thaliana landsberg; identical to SEQ ID NO: 2598

SEQ ID NO: 161484 - DNA, 202 bp, Arabidopsis thaliana landsberg
atcggagtcccaaacggcttgtgaacgcaacattaaagtacgaggagggctcataaccaacccatctaacccattacgggcgacggtccaaaagaaggatccagaagatcatctcgacttctgcgtacagcaggaatattcacttggcctccgacgaaatctactgcggttctggatagcatgccatccgagttcacaaagc

SEQ ID NO: 161485 - DNA, 169 bp, Arabidopsis thaliana landsberg
caaacggaagcttccagagtaagaagaataagagaaaaacatacaccttccttgagactgatcttcactctgcgccagcgcgggatcctgctccgacgtgtctcgtggcaatggtgaagaagttgcaggttccatggatctgaacttagttctctctgtactcagcatg

SEQ ID NO: 161486 - DNA, 277 bp, Arabidopsis thaliana landsberg
ccaatttaccatgtactagagacattctaagtttttgcaagaaaagttgatctatggaccatatcttcgaatttatccctacattattaaaagggaagtacaaattgaaattttgtctaaatttggcttcaattttgatttcaattttggattttgttctttgctattcaaaatcattaagagtaatttggtattaacaatctcctaaactttatatgatccgattcaatctaaaccgttcaataaaattaattcctttcaatctaaaccgtttaaa

SEQ ID NO: 161487 - DNA, 130 bp, Arabidopsis thaliana landsberg
gtaacacattatggttcctcaatactctagataatcattctcgtgtgccatatatgatagcttatgaacaactatgagtatgcatatgcatacatatatcttttgtgactaagcgcgtattatatcattg

SEQ ID NO: 161488 - DNA, 316 bp, Arabidopsis thaliana landsberg
attttctattttgctttttggaaatggttttttttaactgggtggttcttctatagaatcaaaagaagcttggaataaattagggttggagttttattttgttttcttggaagttgaatttttaatcttctcaagaactgacaaatatttttttttgtttttgtgcgtgtgtgttaataaaatatccttaaaccaaaattaaaggagcaacgttgctggagattaagaagtcattcaaagatgtgaacaatgttctttatgactggacaacttcaccttcttcggattattgtgtctggagaggtggtacttgtga

SEQ ID NO: 161489 - DNA, 250 bp, Arabidopsis thaliana landsberg
aagaacaggggattgtggcataggtcttggattttctcgggtcgaatatcgggtcggattgagagtaacatctccgacaaggagcgcattgtagccagacgatgtcgctgccggtgtcgagcaccatgtaaacatatctcgccggagtaccgacaccgaggcgcgtgaagtattcaccgcttccttgagagagaccagagacgactgagctgctgaatccaccgggtcgtggcgcgtgagtcacgtttct

SEQ ID NO: 161490 - DNA, 88 bp, Arabidopsis thaliana landsberg
ggtggcaatggctgtaagtaaaacctgtctttcaatgccaatgcaaagtctcttgcttggtctgagttatctgtcccagctgctcacc

SEQ ID NO: 161491 - DNA, 167 bp, Arabidopsis thaliana landsberg
ttaatgattacatgttcttaaagttatggatcttttgggaaaaatggactatttggcaaaaagagtgtgaacataaaaaatacaaatggggcgttccgagaatcgaactcgggacctctcgcacccaaagcgagaatcataccactagaccaaacgccctcaattga

SEQ ID NO: 161492 - DNA, 79 bp, Arabidopsis thaliana landsberg
tgagatcatagtcaccatgaaagagtgaagcttcaaagaatccatcagcatcggtgacttcagtagtttggctgcgtag

SEQ ID NO: 161493 - DNA, 516 bp, Arabidopsis thaliana landsberg
atcaagctctggatctcaggccaagtgagactaaaagtgtatattccaggaactgagctaatctcaggaacaaaagttgggcggttactaaaagtattttgaaggaccgctgtgctattccggagatcaatcgatcttaagcaaaagggtacaccgtcgctagacatttggactgagcaatcaataacatcagcaccatctttgattgccttctcatatgccaaatctgtacatccaggatagtccccactcgcaccatgttttgatataacaagaaaatccactgagcaatgaaccatttggtagatgataatgtttattataagtttcttcttctttttttattagtaagagctagcagaaagaaaatgtgaagcatcaatactctcattaccttgttttgtagcgtttctgccaatgtgggagaagcagtctgaggaaaatatgaaaagaaaatgtttgagttttatgttttagagacaaataaaaaaagtgtctgaagaagagattttgctt

SEQ ID NO: 161494 - DNA, 208 bp, Arabidopsis thaliana landsberg
atcctagtgcaagtcaacttctgtgccagaagtgccactgtgcggtaaagagcaccagcactgaaaaccacccgccctcgaatactagtcatactactgataaaaatgtcagtatagaagcagatcaagaatcactcgcaagcccgcgtctcattcgcattgtgaagtgtaatagcggtgatagcggtgaagctgtcattgtcatgaa

SEQ ID NO: 161495 - DNA, 99 bp, Arabidopsis thaliana landsberg
ctgaaaaaaagtaactccgttgccgggactcgaacccgggtctctcgggttagagccgagtatcctgaccagctagacttcaacggatttgtaaatcat

SEQ ID NO: 161496 - DNA, 117 bp, Arabidopsis thaliana landsberg
aaaaaaataaaaaaaataaaaaaagaaaaaaaaaaataagtaaaataaaataataaaataaaataaaaaaaaaaaataagaagaaaaaatagaaaataaaaataaattaaaaggggg

SEQ ID NO: 161497 - DNA, 215 bp, Arabidopsis thaliana landsberg
ggttaggatttgattagaactgcaaggcatatggatttggttagaatgatgatggcaatagactagagaaacttgggagttcctgtgttttcaaacctcttccacgggttcggcttttgtgttttgtttgagggcaaacaaaagctaagtctggggtagttgatataaccctatttttactgcttttagctatgatttaggtatatgttttagag

SEQ ID NO: 161498 - DNA, 145 bp, Arabidopsis thaliana landsberg
ggtatgggcggtgcaacgagaggtagcagctgctgctgacgacaacaatgtattccatatgatattcagaagcgacgcaccgtctcggccgcgattaacgttatatgtttatctttgttaatgatttcggttttgtcgtcaactc

SEQ ID NO: 161499 - DNA, 217 bp, Arabidopsis thaliana landsberg
tcccttgaaaagggaagcgttcaatcattaaacttgcttgaaagcagtctcaaggttcatacagaatgaccgacaatccattaagctgtaagctccacggtatacagttagattaaggacgtacatcatcccaacagaatgattcaaaatactgagaattccaatcaatttctgcatttcttcttggattgagatcagttcgaagttagaagaactg

SEQ ID NO: 161500 - DNA, 136 bp, Arabidopsis thaliana landsberg
tgtgagcaaacagatgggatgtgatcagaagtcattaagttaaaccaagcaataacaggtttgagatttctaacggtcctaagtgaacatgaagaaaataaaattctaagagaattacacaaatcactcaaccacc

SEQ ID NO: 161501 - DNA, 426 bp, Arabidopsis thaliana landsberg
atgatgtgttctcttttcttttctagactttcatagatccatttatttgtttcaagagacacatataaggtgcttttttcatttctagtgtttgtcttattataaagtttgttgtaaatctcaccacaaactctctgtttttctcgcaacctctgtttttgttcttgttaaaacagaaaatacaagaacacgtttaaacactttaatcttctacattgttaataacttggttactcttacacaacacaaggacacacatacatatactacttctacttgagacacacacacacacacacttgcacacttgcacttagacctaatgatggctcttacacaagacaagtagccaccctacatacattggaattctcactccttgattcactcttcttagactctaacttagacttactacacaacact

SEQ ID NO: 161502 - DNA, 97 bp, Arabidopsis thaliana landsberg
tgtagttaacgttaccacccattatacaagtgttgggacaatgaatgctactttcgtactcgtcgcttccatcgcagcaatataagaaccagacaat

SEQ ID NO: 161503 - DNA, 76 bp, Arabidopsis thaliana landsberg
gtatgctataggttttcaaatctctagctacgcttatgtatttccctagattatcaaagttagcatgccgttttct

SEQ ID NO: 161504 - DNA, 107 bp, Arabidopsis thaliana landsberg
atggtggggtttcatgaagaactcaatgatgaatgtagatagccaaagtagaggagatgatagattgtgaatggtaggaggaattcttctaaggaagacatagacat

SEQ ID NO: 161505 - DNA, 218 bp, Arabidopsis thaliana landsberg
ctcttgtggttacaattttcacttctaatcccataattctccttctttgtcttcttctttctccctaaaatcctaaatcctcctttggatttctcttcttcttcaatttcttcccacaaggttagtctcttctatcgaatctgtgttcttcactgtttcatctctccaattcccagtttttccttgatgggtttatcttaaaaatcaatactttgagc

SEQ ID NO: 161506 - DNA, 325 bp, Arabidopsis thaliana landsberg
gaaatggtttcggactcggacctcgtgacccagctccgggaaattctccgtagctccgacctagaaactacgactccggcgagcgttcgccgtcagctggaggtgtatttcggtgtcgaattaaccgataagaaagctttcgtcagggaacaaaacgatgcttttcttgaaagcgatgctttgttagaaagcaaacccgcgcaagaagaagaagactgtaatggcgatcaaaacgatgaatagggaagtgaaaacgatgatgataagaccgaactgtaagcttatctcttccttttggaaccgactgttgtgttataatacaaat

SEQ ID NO: 161507 - DNA, 275 bp, Arabidopsis thaliana landsberg
atttttgaacaaggggtttatacgattagagcttgtgcaagatgagaggagcaccgaactgtgggtgagtagtgaggactgtgtaaggcgcgtgaacataagaaggagaaagctcaaaggagaatttccgtagaatcagtgtcattgccatctttgcctcaagcagtgcaaaattttggccaatgcagatcctcggtccccacgcaaaaggaaagaaggagacttggttctttgttgcctttgagagaccgtctttgaatctatctggcttgaac

SEQ ID NO: 161508 - DNA, 62 bp, Arabidopsis thaliana landsberg
attgactcgttgttaaatgccacaagaagaaagctgaagaaagggagacgaaaaattcgcag

SEQ ID NO: 161509 - DNA, 368 bp, Arabidopsis thaliana landsberg
ctctaaaacctatacctaaaacatagttaaaagacagtaaaaataggaatatatcaacttccccagacttagcttttgcttgtcctcaagaaaaacacaaaaaccaaactcgtggaagaggtttgaaaacgcaggaactcccagtattctctagtctattgccttgatcattctaacccaatccatatgcctcgcaagtataatcaaatcctaaccaacatgtacttctccgcaagcttacacaaccttctagattccatacctaagttccacaactatatccaccaggctttcatcgctggatctcattaagcaagctaatattcaagaacattctagactcattcatgtactataccatgataaat

SEQ ID NO: 161510 - DNA, 140 bp, Arabidopsis thaliana landsberg
tgttatgccaagaatcaagatgtgatcagaagtcagtaagtcaagccaagcattaacaggttttggtgtgttctagcagtcctaagtgaacacgcagaaaacagaaattcaagcagaaacaataaaacactggaccaaca

SEQ ID NO: 161511 - DNA, 237 bp, Arabidopsis thaliana landsberg
atgattggatatcgatgggcgttggtattgtcatcagggtcaaacagaatgatctcaaagttctatgtacaccaagcggctgttatatatatccagttttaacagagcatatatatacatttgaacttgaagtagaggaggtgacttccacggagcttgtctttgagttcacattagacaacgaaagcaattggaagatagaagaatgcgggaatctccaaatcgtggaggtccctt

SEQ ID NO: 161512 - DNA, 524 bp, Arabidopsis thaliana landsberg
gccgcgtccatggttggtgtgggaggaatataatgaatagccggagggagacaagtctcctcaccgaggccagaacgttcaaggattctcatttggaactcgacgctcttaggcttgtccttgaggatcaaacgagagtgttccatgaaagttgcgaaggggacacgacacgtgacaggtggcttgtaacaagaatagtcaacgaggtagatggtgcgtggcttggacatgaagtaaacagtggagatgaagatgacaaagaaggaagaacatagaacctgaactaggtcaaactggagtgaattccaaacattaaggatctcttcaggacccatccgaagaagctcaacggcgacaatagccatgatcgggatcaaaagaaaactcaagaaatggttaaccaaatattggtaaccaagtttcacgtacttgagcttcaccgagctagagaactctggcatcggtgcctgaggcatcgtcggagagttttaatgtataattgtattattgttacaaaatgtgat

SEQ ID NO: 161513 - DNA, 156 bp, Arabidopsis thaliana landsberg
accaacctgacaaataaagaatctcatattcctcttgtgttgtctctgtagagtgtcaatcatgtggtctggcttcaagcgaaagaacccatttcagctatgtagaaaaaaggtgtgaactttgcaattggattcgcttttctttttcatgaagct

SEQ ID NO: 161514 - DNA, 208 bp, Arabidopsis thaliana landsberg
atcttgaagtggttattctggatagcaggaggtgcaatatctttcctctgacggtgatctcgtggtgcatcttcagcaccaatgttggcagggccattctgttgattttgttcgtcaaccatttcgagtggttgttagggtaaaaggttgactgtgtttctcctttctctgagttcgcgagttactcggtcgaagttgtcgttgaaga

SEQ ID NO: 161515 - DNA, 98 bp, Arabidopsis thaliana landsberg
aaaaaaaataaaagaaaaaataaaaaataatagagaaaaaaggaaaaaaaaaaaaataaaagaagaaaaaaataaaaaaataaataaaaataaaaaaa

SEQ ID NO: 161516 - DNA, 393 bp, Arabidopsis thaliana landsberg
gtttatcttctcggttacttattcattttcaaaaaatggactccggagactcgtcctttagcttccagctgtttaatctccctcctccacggcgtctccgccgtcgtcctcgccacgaacgccttactctccgatcctaaccgtggattctcctccgtcaacacccaatctcaaaactcaattctcgatttcagctccgcttatttcctcgctgatctcgtccaccttgccgtgtttccttctcccgccggcggagactcgcttttcgccgctcatcacctcgccgtgcttttcgttttcctcacctgccgttacatggttgctcacggcgcctgcgctctgctcgcgctgctagtcgtcgcggaggccacgagcgcgtgtcagaacacgtgg

SEQ ID NO: 161517 - DNA, 98 bp, Arabidopsis thaliana landsberg
ctcctctacgttcttacgagcgcatctttatcccagtagagtctttcaggggcatgtttcggtccttttcacccccccttagaaaaagtgagccgcgg

SEQ ID NO: 161518 - DNA, 430 bp, Arabidopsis thaliana landsberg
aatttgtgtaatctaccgagccgttgggctgagttcggtatcaaaggtcaagctcacttctatggaactcttcgagtccatatcccgactagctcctcctcttgaattttcagatgccatacactcgtttagttcaataacaacttgggacatggtcggtcttcttgttgaagaaggattgagacaactcatggctagctcaacagctttccaaacagaaccagaatcataatcttcatttaaattaggatccatgatgctgttgatgtctccttttgtaagcattactcctacccattctgctatatgtggcttttcacggctttggtcgatcacgggtcgatttgtgataagctccaacaatacaatcccaaaactataaacatcactcttttctgtcaaccaatttgttctatagtatctggaaaat

SEQ ID NO: 161519 - DNA, 140 bp, Arabidopsis thaliana landsberg
gttttgcaatgtatgatggtgttccaggagttgaggttggggattttgctataactggaggtagtggtggctcagtgacatcagcatctatgaaatccgggtttggagcttgtgctggaggtaaggacagaggactcata

SEQ ID NO: 161520 - DNA, 401 bp, Arabidopsis thaliana landsberg
ttttaaatcttacctattctcaacaaataatatcgtataacattacgcttactaaagaatctcaaaataacaattaaatagaaacaacaacatcaaaacaaaaaatatcatatatatcgtactaaatacataacatttagctaactcgccgtctgcaccatcgtagataccaaacattacaaaaattcgtcaatattgtaaataacaatgtcttcatctctagtaggactatagtagaatatactctcaccatcgtcaatattggtttattattgtatcaataaatatatctcaacaattttaactcatgaaaagatgtacgtacatcatttttcaaaagtattaagaatatctatactttgactatatatttttactaaattattatatatgcatagatt

SEQ ID NO: 161521 - DNA, 443 bp, Arabidopsis thaliana landsberg
gttacctttttttttggtccgtacgaggaaaaatctaggagaccgagctatttgttcgaaagatgcaactttttaatagctgttgtggaaaaggatttgatgggtatgtttgaatcattgactcgattattgttactcttcctgtttctctctatgggtttgtctgttttatttcctttgtttgggttgctgcaaaaatctgtttattggttaaatcggttatggttgttcttcttgattagggtttaaagattctatatcaattttggatgtttgaaatttggagcttatcttttgttcaattctctatgccttccctttatctctaatgttttaaaatgtaaagtctgttcttttttttatcatcctcactatataatatatcacctgattgatccttgaaagtttcatcattaatagcaaatttgaggtagttttcaggg

SEQ ID NO: 161522 - DNA, 311 bp, Arabidopsis thaliana landsberg
tttcttcaatcgagattttatcgctttttgattcgagaatttcgaaatcggaacccaccaccaccaccctccatcgtcgccaacagatccaacggttctctgattatttttatttgaactaaatgggtcgcatcgagatttagaagaaaagggaaatgttggcaatggagaaagaatttgattcaaagcttgttcttcaagggaactcatccaacggtgctaatgtttctagaagcaaaagcttctcctttaaagctcctcaagaaaatttcaccagccatgatttcgaatttggcaagatctatggtgtt

SEQ ID NO: 161523 - DNA, 603 bp, Arabidopsis thaliana landsberg
tcagcaaaaagataaaagaactgaaacagtctctaaacaggcaagttagacttttcaagaagtttactttattagaatcaatacataaaaacgaactgctttactgatttatactgctttcttataagaaaaaagtttaaactcattcatgagttatgcctatatgtcctctcagcttctcaaagacaggatcttatacgtgcaacactgtctgcattgcatgcctatcttgcctggattccattgcgttacatttttgagtctactttggtgatagacttcaaataatttatagattgatgtaaattggtaccacaatatgttcttctgatagctgctctggttatttacagcttgagaccctccttaaattatttcctgtgccagcatatacgaacctcactattcaatgtctgaccgaggtacctcagtttttaagttcagtttttactgatgttagattgaatgtattatttatgtctctattggctcgaattttgtcgatcaggtcgcagctcttaatttcggggactgctacaatgatcaatatgtcaaaatgtgtaccatatttatagggcagctgcggggtaattaatcgccttt

SEQ ID NO: 161524 - DNA, 146 bp, Arabidopsis thaliana landsberg
acatccattgcgtatcaaccattgatgatgcttgctacgttggtgatccaacagttcgtgagttccatgaagcttgctctgagcatcacctcttgaaaggccaaggagttgcaggtcaagccttcttgaccaatggaccttgcttt

SEQ ID NO: 161525 - DNA, 134 bp, Arabidopsis thaliana landsberg
agagcacaaaagctttcttgcgtactttattgatactgggatgaaacaataataatagtaacgacatttatcttgtcactgccggaaatgctataatagaaagaaaagaacaaaatctttattatgaagctttg

SEQ ID NO: 161526 - DNA, 106 bp, Arabidopsis thaliana landsberg
taaaataatattatatatttttaaatcatctttacaataaaaatttttagtttaactaaaatataaacctatctgcggtatactgcaggttaatatctagattata

SEQ ID NO: 161527 - DNA, 547 bp, Arabidopsis thaliana landsberg
gacggttttacaggttacatgttgattaatctgaaagaattgcagaataatttcactattatgcatgcatgttactatttcacttattaatcagaatctaaatctcttaagaaaataaattaacaaatattatttctttataaggtggaacaaaaaggagagggtccagggccaagatgctcacatgacatagcacaggtagggaacaagatttactcttttggtggcgagctcacaccaaatcagcccatagacaaacacctttatgtctttgacctcgagaccaggacttggtccatttctccagccaccggagacgttccaaacctctcttgcttaggcgtccgtatggtgtcaattggatcaaacctctatgtctttggaggccgagacgcttcacgcaaatacaacggcttctactcgtttgacacgaccaagaacgagtggaaactgctaaatccggtcgaacaaggacccactcctcgtagcttccactcgatgacagccgatgagaacaacgtttacgttttcggtggagtgagtgcta

SEQ ID NO: 161528 - DNA, 349 bp, Arabidopsis thaliana landsberg
attgaattagtttaatttattatttgattaaacacaccttcgtaaaccgtatcagtgattcaacaatatagccaagtgaataagaaaaaaattataagggtaaaagaaaaggaatgaacaaaagtctgactgtaaaaaagtttaaacaataccaaaataccaaaaaattgtttgggctctagtgctttgaactaagcgattttcaagtttctcaaggcagaagtgaggaggttgagcttagcgggagctttttgcttgtactctcgctccaatgcagttgcagccaaagactgaagctctggtgcagccatgtccttgtcctctttgttcctgccttttgagatctgtg

SEQ ID NO: 161529 - DNA, 140 bp, Arabidopsis thaliana landsberg
ttgatcactcatttcgaaaatatgaattgagtaacaccaacttaagtgtttaagacattaaaataatatttgctcctaaattacattgatctttagtataaccattaccaaatactttcaaataaagtataataataatt

SEQ ID NO: 161530 - DNA, 312 bp, Arabidopsis thaliana landsberg
tgattaaagtaatataaaggaaacaaaatgaaatcttgtgaattgctttcggaccggtctaatcttttgccatatttttcgctgacactgaaacattcaagatgacggtcaatccctttattattaaaagggaaatataaattaaaattttgtttaattgggcattaattttgattttaattttggattttgttctttgctattcaaaatcattagggtaatttggtcttaacaatctcctaaactttatatgatccgattcaatctaaaccgttcaataaaattaattccgttcaacaaaaataagtgaaa

SEQ ID NO: 161531 - DNA, 140 bp, Arabidopsis thaliana landsberg
tactctcaagagtttttattggctttggtaaatatagaatgacatcgataaaaagacaaacattatatgtaagagttttttttagttggcttgagaaggcacatcttgtaacccacagaccatatttgctggtactgcaa

SEQ ID NO: 161532 - DNA, 269 bp, Arabidopsis thaliana landsberg
cagtatctggcacatcagtgacagagggcccatcttctcattccccctcattcgaaaattctcatgagtgtaaagaaaataacctgcctaccacactctaaacatggtagtgtccaatctcatcatgtctttcattattgaggacgaatatctacattaagctcttttcccggttttaaccgaagtcacgagctccacacccgacccttattacactcttatgtctatcgcgacagagctttgcctgcaaaacacaccaaaaccaggcc

SEQ ID NO: 161533 - DNA, 255 bp, Arabidopsis thaliana landsberg
ggcctatttactgatttatagcgtgagtgtttcaaaaacacaaaatggttttatccgtgaatcattttgagcaattatttgccaaattcctgagttatatggtcaatagaattctcaacaattggagaggagcgtgttgcttctcttgatgcacatgttggtaagattaattggtgactttatgatcaaacgtttagagcagtctattgctaacaatgatataagagtgttaagaacttattttcttcttgtctt

SEQ ID NO: 161534 - DNA, 320 bp, Arabidopsis thaliana landsberg
agctggtggactgtggtagctcacgggtgaagaggtgtctcggccaaaaggtgtaaggtcgagcaggtaccaacgaacggttgcaaggaacggatgtgatgcttcgggaagcatccattcgccccctatataagggaggacgcccaaggcatttggaataatctcacatcatctcacaacatccagaacaccataaaacattcttaaggagtcccaacacatcctagagttgttggtcggaaagggggtgcgggtcggcgagtataactcgaccgaactgatgcgcatctacctcccagtccaacggttcgatggagtgt

SEQ ID NO: 161535 - DNA, 464 bp, Arabidopsis thaliana landsberg
  unsure (1)..(464): unsure at all n locations
gcttattgatgttaaagtataacataacatatttatacgattttattttatatatcttttatttatgtagttctgtttctttttagttgatgaaatatttgctcttttatacatatgtttgctaagcatgtgttttttctatcaaacttgatactaaataaaagttttgtgatcttttaatgatagggaaatctacacttacggattcacttgttgctgctgctggtatcattnnnnnnnnnnnnnnnnnnnnnnnnnnnnnnnnnnnnnnnnnnnnnnnnnnnnnnnnnnnnnnnnnnnnnnnnnngtccactggtatctctctctactatgagatgactgatgcgtctctgaagagtttcaccggagctagagatggcaatgagtacctgatcaacctcattgactctcctggacacgttgactttttttcagaggtcacagctgctctccgtattcactga

SEQ ID NO: 161536 - DNA, 548 bp, Arabidopsis thaliana landsberg
aagagattgaagagaggagatagagtttttatgataagctttggagctggttttaagtgtaatagctgcgtttgggaagttgtgagagatcttactggtggtgaatcaaaaggaaatgtgtggaatcattgcattgatgattatccaccaaaatcgattctgaatccttatttggagaagtttggctggattcaagatgaagatcctgacactttcaaggtccctgacgctttcatgtaaaacgtttacgcacaaaaacgcaaacgcaaacgcaaaaacaacacaaggtgatacaatattctctctttcttaatttcttcttttttgcctttagttaaaatttttacgttttttgtttaaatggattggaaaggagatatgaatgtaaaagaaactttaattagttttttttttaatatgattttttttgggtgttataatttgttaattacatactttcccataaccgttttaagggacatgcacttccagagcgatagaaatttactaatttgccatcatattggaatgctgccgtctttgcttct

SEQ ID NO: 161537 - DNA, 443 bp, Arabidopsis thaliana landsberg
ttttatttcaagcaactttgttctttcccttttattatttgcgagctaagagaggagtgaatttgtctaaatcccttagtacaaattcattgtttgattacagaatcaacagtagagacgggctctataagcatgtgagatgtgctattttcccaaaatgatagatgttcaaggtgtgtttttttatttgtacaatgagattaataaatcatttatttttagtcaagaagcatcgaagcaagagaacgaaccatttgaaagactcataaaccaaattgagtcaaaggaatttcaaagaagtagtttggtatggacggatctggtaaactggtttcggtacgattgtctggttatttttggtttaaaattgattgggtatgttgcagaagctttgcctcagatggcaggtctctccaaattgatcatccttcgatattattatt

SEQ ID NO: 161538 - DNA, 673 bp, Arabidopsis thaliana landsberg
aaacgtcaagcacgatcaagcttgcctccagtgcgattctcgtcgatcagcttttccacgtcaggtcggccgtgcagctgcaccaccgcagagtggttgtctccgtagtatagaacgtctcccattaactggtccggttcaatacctgtcgatggtcaaacttttcaatttagttacgtctttgccactacattactttactaatttactaggtgacttattatgcttcatatacttttaaatggttagtgttacaacatcaaaataacaatattatgtacctaaagaaataatcatcgtacatcgtaatcagctaataaacgtgtgtccaaaaatctgctaaaatctaggtgattttgagagattctgttaaaagtttccttacttagagaaatttgttcaacaaattaggggcattatcggttaagtaaagtctaattccaatatgttttatttactttctagattaaatcgagttctctttttaatgagaaaagaaattagagataattcggaaattaccttcttcctcgtgtattttctccatgctcttataaaagctaaagtgaggaactttctcaatcttctctctccgacagagttctctggtcttgtcagattcatcacccatgacgagcaagaaaacgacgtcgttacaggtcctgctcagttc

SEQ ID NO: 161539 - DNA, 270 bp, Arabidopsis thaliana landsberg
ttttgatcttaatcaaagcatctagaaccattggaccacaatctttgagatcgattttgtaatcttgaagctctggctttccaggattatctggattccatcgatagatctgaaacgtcttcagactcgatcctcctccgccgccggttgaagcttttgtttccgcctccgctccttttgatgtccatctcgccggaatcaatcgcgccgccgtggctaatttcgacggtttcgttccaaccaatcttccgatcaaaccagacgccattt

SEQ ID NO: 161540 - DNA, 319 bp, Arabidopsis thaliana landsberg
aggctactctggttatgttgcagtcaaaataccattttcactgtcgtagagggtcagattattgttgcagaatgggattgacttgagcgctgacgatgttagctatgcgagcagtccttcctggtaagtgctcaaactgcacaatggactttgtgttcttcggtcctcttcagattttcagtatgctgatcatattcgcttctggatatttgcgctttctcttctttctttatgtgagcacatgtttccctcttcaagtactccttgaactcgatgggataaagaggcttgtgcattctcattctgggagatgaaaatg

SEQ ID NO: 161541 - DNA, 366 bp, Arabidopsis thaliana landsberg
atggtcttatttacacatcaatccgaaaattccatgctttaccaacctctcacgactggatataatgcattgccatagcatgaaggatctgacttggatattgtttgctccaaataatgtctacctacaaattggagattcaagagaagtaggagaaataataaacaaagagaaagcaaccaatcttacaagtattattacaccatttctgaaactagaagagttgattttgtataatttgccgaagctggagagtatctactggagtcctctcccctttccgcttttgttgagaatacttgttaaagactgtccaatgctgagaaagcttccatttaatgctacaagtgtcccactagttgaaga

SEQ ID NO: 161542 - DNA, 119 bp, Arabidopsis thaliana landsberg
catatacagtaaaacctctataaattaataatgttgggactgcaaaattttattaatttatagaggtattaatttatcgataaattaataaatattaatttatagagagattttcttaa

SEQ ID NO: 161543 - DNA, 845 bp, Arabidopsis thaliana landsberg
tatacccttcattaaaaaatttaagtgtacgtatttataatttacaatgtacgtatatatggacatgtaaatatgtaagattatattttattgtaaaagcggcatacacaattatttattgagtttgtacattagaaatctttggttatttcgattagatggaatatatttttggaggttttcctataaaatctatgcatatataataactaaataaaaatatatggtcaatatatatttgttcctcatactttctgttcgtcatcaccaccctctttctgttcatcctctttatcgtcctcgacttcttcttcctcatctacttcttcttcctcatctacttcttcattgttttcaaatacatttggtacctcaaatatggtttttattgtgttttcaccttaacccatggttagtttcatcaagaaggtcccacatcattaacataatatttacactttacttattggattggacaaaatgacacagaaatgtttacacttagatccctactatgaataaaaaaaatgttcgcattgatgttgtttagatgagaacctatcaacactggaggatcaagtacttggtatgctacagtaaaattatatgtgagtctgttaaagagaattatagtctttttacgaaatctttgtaatgtttggtatctacgatggtgcatacggcgagttagccaaatgttatgtatttagtacgatataggtgatactttttgttttgatgttgttatttctattgaattgttattttgaaattttttaatgagcgttatgttatatgatattatttgtgtaaaaaagataaaattttaaactaaaccaatagac

SEQ ID NO: 161544 - DNA, 151 bp, Arabidopsis thaliana landsberg
ctgtaatgtggcaatacagctagcagcggtggcagcattatgtgtgcaatacgaatctgagtttagaccaaatatgagtatagttgtaaaagctttgcagcctctcctgaaacctccagcagcagctccagcaccagtaccggaatcctga

SEQ ID NO: 161545 - DNA, 107 bp, Arabidopsis thaliana landsberg
gttgacccatttaccaaacaaaacagagaatcgcagagcaaactatagactacacaaaacacttccgtcaccggcgaatttactcaggcggtaatctcaccggacat

SEQ ID NO: 161546 - DNA, 288 bp, Arabidopsis thaliana landsberg
acagttcatactttgatcaaacaggatactttcatggcaaatctgttaagggatccaaagcataccagagaactcattgcagtatgcaaatgacaatgcattgctaatcggaaaggttagtggatcaaacattctactcttattctttaatgcttatcatattgtggaagtcgatgatactgctttgtgatgctttgggggtttatagagtgacattttgtcatgtttttgttcttttgagcagtctctaagagggtctcttctagctctgttttatgcgtcaaccgt

SEQ ID NO: 161547 - DNA, 163 bp, Arabidopsis thaliana landsberg
  unsure (1)..(163): unsure at all n locations
aattgcttcaaatacagtatcaggaagaaccgtttgtggaacctcaatatccacgggcttattagctaaatggcaattggcacatacaatacgcccagtcgcctctcgtggtttttagggggtttcgttaggctttcattggatntcantttgtaatggatgc

SEQ ID NO: 161548 - DNA, 848 bp, Arabidopsis thaliana landsberg
ggcgagaattgaaagacgcttcgagagagatagatcatctccgttaaaccctagcgattgggtgggtacactttcgtcgattcttctttttctttatgttttaagctgtttgtttctttcgattttgtgattcgatcttttaatccgatgtttcattcgtcgatccgaaaactagattgttctctgtatgatgattttctgctcaatctttgtttgtgattctcttttgcaagcctatgaatttcatttggactttcattttatggttctgactactgagtgatgcgtatatgtgtttagtgagttgaccttgtaagctttggttaatttttcttaaattctccaatcgaaatgaccttgttgctggaactagaaatttgacgtgtagcaaaacttgagaacagatcatgaagtttttttttttttttttatgcattgtgcatgatttacttgatgaaagaatgtttttttcttgcttttattgacgattgaattgatgggtcttacgcgtgtgtattcatgagtttcatcttctgtaactacctttttctgaaagcactatctatgttttggtatgtccttaatttgcctaaccaccacgtgattgctcatttgctctttcatttgaatctagaatacggatatactccaaatggctttcttaagtaaagttggaaggttattcagtcagaccagcagccatgtcactgcctctagctcgatgctacagagcatccgttgcatgtcttcatcgaaaatctttgttgggggtaactatgactctaattcagctgtgcgagagaatactttttttttgttttgttggtctcaaaaattgtctatgtttc

SEQ ID NO: 161549 - DNA, 265 bp, Arabidopsis thaliana landsberg
acctattaatatgatagcgccgtgtagagctagccaaagcccatagaccacattattgaccgcatcgagtaaattctccctgtggttcaggtctccacagtaacacaaaacaatgcggtgttctatgagcaggagtagtaggtgcagcggttaaagaattgcatccttctaaatacgaactgcccaatccatgagtattccatcaagtaacgaagaaagtacctgtgaaccgaccccctaaagcgaaataggcgcaaggagagag

SEQ ID NO: 161550 - DNA, 128 bp, Arabidopsis thaliana landsberg
  unsure (1)..(128): unsure at all n locations
gatgattacctgattcgaatcggattctgatgacgncgatgaagaagatgatgatgatgatgaggaagaagaagcagactctcttgttgatacagtcactcgtctactcaaaggttcatcaattttag

SEQ ID NO: 161551 - DNA, 381 bp, Arabidopsis thaliana landsberg
ctcgaacttccatagagcaatatcgatggtaataccacgctcacgctcggccttaagtttgtccaacacccatgcgtacttgaaggacctcttgttcatctcagcagcctccttctcgaacctctcgatgacacgcttgtcaataccaccaagcttatagatcaagtgaccagttgtggtcgattttccagaatcaacatgaccaatgaccacaatgttaatgtgaaacttctctttacccatagctgtcaaaacaaaaacaaaaatcgaaacatcagaatcaacaaaaatacatcaaccatcaaccatacaacaaccaaaacgtcaacaatataatcaaacacagatccactgaaacaaaaccacatatcaccagttgag

SEQ ID NO: 161552 - DNA, 352 bp, Arabidopsis thaliana landsberg
cgatgactgggatattgattttgcctactcttcactacttttctctgccttgtctttctcctattgcattaccaaagagaaagcagagtgaaactaatctttccaaccttctttactgagtcttctcggagcaagccctctagaggataggctcggtgtgagtggtaacaccggagtattcggctgttcttcgtctccaccaccattttcatcatcccaatcatctccccaattattgttccatccatcatcaccactttcttggtcagattttgtcaccaatgcggggttagagactggcaattccatatctagcctctggtatttgttgtttccccgtgacttgttcttg

SEQ ID NO: 161553 - DNA, 331 bp, Arabidopsis thaliana landsberg
  unsure (1)..(331): unsure at all n locations
ggggagagggggggggggaggggggggggggggaggaagaggggagaaaaagggggggggggggagggagagaaaggagaggggggggggggggggggggagaggggggcacaaggggagagggaaggggggggggggggggaggggggggggagaagggggggggggggggggtgtttgaggttgggggggcgcgccgctgggtggggggaataacaaaggaacaaaaagggtttttggggggggggggggaaaagggggggggggggggnnggtatgggggggggggaaaaaaaggggggggggaaaaaggggggnggggggngagggg

SEQ ID NO: 161554 - DNA, 1932 bp, Arabidopsis thaliana landsberg
gcaaccattcactcgacttcagagagtttactcaaccaacggttaccactcgaatcgattcaattcgagggaatcatgagcaattacagtggcagttcttctgttgatcctgactacaacatggatgagacagagtcgtcatcttcaaagccagagagagaacagagagaatatgaaaacttcagaagaaaagctgagatagcccgagggaaaagagcgatgatagagaggaaaaagcttatagatgaggatctggaagacgagtacatgcctgaacagactcgcagagctaccaaacttctgcacaagcccgacatattgcctgctgaggaatatgttaggcttttcaagctgaatgagttctgtagcatgaggtatccttgctcgacctcacttgcacaactcgaattgttggaagatgttcagcacctgtaccaaagttatcatctggacactctgatggcttatccgtatgtagcatatgaagatgagacaatacaattcctctccacactgcaagtagagctctaccaaggtatgacctctaatgagtatgattgtgaaggattgggattcttgcgattttctgtgaatggtcatgagtataggttatcaatcaagcgattggaaggattgtttggcttccccagtggaacgggatctaagccaaagtatgaaagagaagagctgaaagacttgtggatcaccattggcagctctgtaccgttgaatgcttccaggtcaaagagtaatcagatacgcagccctgtcatcaggtacttcgagcgttctgtagccaacgtactctactcccgagagattacaaggactgtcactaactctgatatggagatgatcgcaatggccctcaagggaactcttcgccaaactaagaatggtatgcccctccagggtgaaatcaatgacacacccctagctgtacttcttctgatccatttgtgtggatacaagagttgggctttcaccaataaccgcaagagagcacgaggcgctctgtgcataggtggcgttgtgacaccgattctgatagcttgtggagtcccactcatttctgctggactcgagccgcgagcaatggatatcgagcacctacgtcactgcgaattcctggagtttgcaatggttgacgatctccacaggttcaggtttgagcactctatagacaggagagctaacatccttctccctagccctgaggtcacacggataatagagggagataacattgattttaggcctgagattggacacctctactatgagaacgctccgccattggatgaggatgatcttcttgaagaagctgcctcgaatgggatggatgaagatagggcagtgaagttcgacactagcatgtatcactttgctgaacatgtacctccagcgaggcagagcaagagcttgactgaagctcataagaataacagtaaattgcagaagtggtgcaagaaccaggacaagctgatcgccaagtgtttcaagcttctgacagataagctgagttgctcttcctccaccactgctattccacaggtacagcgtactatggagatgccatcgaggagaattaatgcacctacgcacaggcctgagcttagcgagcagagagtcccacatgtccaggctaggcattcgtcagtcgaatcccgggaacacaagagaagaaggaaggctacactcactcgatctagcagcagatcacgcctcattcactcgttatggtcactcgaccgcggtgctggccgcagtagaaggagagaggtcgagtaccctcagagcagtgctggccgccataaagctgatgaggtcgagtacccacatgttggagctgatatggaacaaggcggttcgtctatggcctgggagcaattacaggcagccattgacgagcaactacgttcattcttcgac

SEQ ID NO: 161555 - DNA, 425 bp, Arabidopsis thaliana landsberg
ttttttctaaatcatacagaatatttatactaaagagtattttgaagctgtattaatgatcccattacccaaattatatgatacaataaaagaatatacccccaaaagaaaacaatgcaaagtaaatcatcttaacacctaattcttctttctaaagattgattagattcactattcatgtttttcatctcttcattgtcttgtccgtagcagccgatcaccaatcgttctcaactcgaacgttctcacagcaaggccaacatcacggattgtagtgtctagcacataaggagtgcgtgctcgcggcgctgagagatcgaaccatggtaatggaagtaacggattttgctctcagccttgtgctatgtcttcccttgtagattctgagacatgtgtacgcctatcgcgaatacattctccggctg

SEQ ID NO: 161556 - DNA, 288 bp, Arabidopsis thaliana landsberg; identical to SEQ ID NO: 76661
  unsure (1)..(288): unsure at all n locations

SEQ ID NO: 161557 - DNA, 196 bp, Arabidopsis thaliana landsberg
tgatatatccctatttttactgttttagctatgatttaggtataggttttagagtctatttgttatttgtagagtcttttctagtcatttttaggttttacatgtttgggattcatttggagataatggagcattctggaggaaaacagagaacttatgctgcaaaagaaatctagagactaaaaatcgcgtaggt

SEQ ID NO: 161558 - DNA, 113 bp, Arabidopsis thaliana landsberg
agaagagaagcaagcataagagacactgttttcatagccaaaggcattcccgggcaaattctacgtccggctccgaatggtgtaagctcataatctctacctctcacgtccat

SEQ ID NO: 161559 - DNA, 100 bp, Arabidopsis thaliana landsberg
gcaaagcaaaaaccacaaacaaagagtataacttatcttcccacaatccttcgcaaccaagaatcatgaagttttctctctcagttaattcaaaagcatg

SEQ ID NO: 161560 - DNA, 179 bp, Arabidopsis thaliana landsberg
attaattagattataacccgcggtacaccgtagagacaattaatttttttaaattagtatatataaaagtctgcaaattatatttatctataaaaataaatatttttttatagcttacaattgttattaagtaacatcttttcaaactcgttccgtcaaacccgtgccgttaaaaaaat

SEQ ID NO: 161561 - DNA, 164 bp, Arabidopsis thaliana landsberg
agatggcgagacccatccgccgacaatactcatcatagcttttaatgaaacagcccagccatcaactccaggaccaagattctttctcatattagagaaatatttcacagttcttcctgagaagataagtgcaacattggccccaagtccaaacagaggataga

SEQ ID NO: 161562 - DNA, 485 bp, Arabidopsis thaliana landsberg
ctcaagcctcgctctaagcccttctgccatgtaagtgcctagccgctggatcggactgcctgagactgacaccatctgtttcaagacatcaaggaatccataccctgtagcgaaatccccatcagcgactgcccgagcagcctccaccagcacctctttcaagtccaactgtggagtcaaagccaaaagttcatcccagttccacgacttcccagcagcggggctaaaacctgagaattcttcaacttttgtatcaccactcagcagcgagacctcaagttcccgaatcttactcttgactccagcttcatcataggcaagagatgacaccccactcaaaggtgatccatagacgttgtcaggggaatgatggagatccgagatgcaagactgagagccctgaggagaaaacgggctccggccagatgtaatgctcacagaaggagagtcatacgaaggaagactaccagaagcagtggaggatt

SEQ ID NO: 161563 - DNA, 362 bp, Arabidopsis thaliana landsberg
gactggtttaacttgagggtctctgttgcggtggcatttagatttggttatcgaacttgttttctagggataatttattgagcatgtcaatcacctgtaaactgaggaaacgaaactactcaattaccccatcctcgggactttctcatctaattgatttctttgtttaatctgctttgtttactgcatcttgctgcatgttgtttactttttgcattttttgcgtgatactcgaccacccagttgtttggcaactacccagttgtctggcaagagactgtgcagtcgagaatacctgttacattttctgtctgttactcgacctgtcactcgaccacacccagtgcttggcaacgagctgt

SEQ ID NO: 161564 - DNA, 234 bp, Arabidopsis thaliana landsberg
gttacacatactaaattttaacccgtggtataccgagggaacaatttatttttttaatttagtatatataaaagtttacaaattgtatctatctataaaataattttattttatagtttacaaatgttattaagtaacgtcctgccaaacccgtcctctaaaaaaaaaaaccatttattttattaatattgatcttatttatgatatgtttatgaatcattgtctaaatatttt

SEQ ID NO: 161565 - DNA, 130 bp, Arabidopsis thaliana landsberg
caatattttgatagcttgtgaagagtcttatgggcacctggaagaggatggatccctttcttgaaatatgatgtcttaaagaattcatgaacacgtaagtcggctgcagaacaagaaagtttaatatccc

SEQ ID NO: 161566 - DNA, 371 bp, Arabidopsis thaliana landsberg
tctattgatgcggagaagtgtgcttttatacatcttataaaaaaatagatcactttaaccttcttctaaagaagacatgtttccagagaaaaataagaaacaaaactctcagatccatacaagaaagttgtatacaagtgaagcattgtcacaagcacatcatagtttcctctgagctttcgcatgagctcccaaagttaaaagtcacgtcatgtactgagagcctcagtgtgttcgcttttgctgcagacgtgtcgaggcattcgctgaggtcagcatcgcatgagacggagacccattctctatcgtcgtctagatacttgagctcaaaggctgccgtttcgagcttcagccttttggccacttgctgc

SEQ ID NO: 161567 - DNA, 102 bp, Arabidopsis thaliana landsberg
ctatctatctctctctcttctttttccggcataacttatgtgttaactaaactccataacctgtttcatcgataaagtgcctttgcttctatctctgtcact

SEQ ID NO: 161568 - DNA, 371 bp, Arabidopsis thaliana landsberg
gatcagagtggtctctaccttccttgattctgatcatagattcttcttcttaacccaaaaatatatattttatacacataaggtaaagttcgatgaagtggtttttttaatttttatttgatgggtttaaaacgggatttattatataattatatgactgcttgtaaatttttttcccaaatatcaaatttacctctctttttttttagtttttggaatatcccaagagtgcaaatttatgtggcatggttttagtttggcttcggttcagttttggaactggccgttttacttatcgttgtatcatatttgataagattttaattttctgggatttttttttggttttcattgatgtatctaataaattt

SEQ ID NO: 161569 - DNA, 287 bp, Arabidopsis thaliana landsberg
cgccatttacgctgtggaaatcatcgtcggagtcagattgtagccatggctgcgaatcgaaaaaggtttcatctttgcttcctgtgacagtggaaacaaattagaatatgcattgcaaaacattagaccaagagtgatagataaacacacacacaaaacacacaatgatatactaaaccttttgatttagtcaccatcattagatagaatagactcaaaaggtccaaaactgactagacctcgaaaaaacagaggagattgaatccgaggaaatgacaaagcaatga

SEQ ID NO: 161570 - DNA, 161 bp, Arabidopsis thaliana landsberg
agtagaaaaaaaaaaaataaaagaagaaaaagtaaaaaaaaaaaaaaatataaaaagaagtaaaaaagaaaaaaaagattaaaataaaaaaaatataaaaaaaaatagaaaaaaaaaataagaaataaaaaaaaaaaaaaaatagaagataaataaaagag

SEQ ID NO: 161571 - DNA, 277 bp, Arabidopsis thaliana landsberg
acgtcgaaagatggtggcgagtaattctcgtcatagtttttgtagtaaaatttcgtcctcacgagggtggtccggccttttgtcgccggaatgttggtgtagcaatttgtttgacctgttggaaagtaccggagggtattgatcggttttttgacgacgtccgtgatattaatggactcgccggtggtgacgaagcctttatctccgacccatgttacgttgttggagtccacgtaggaacccgttgttccacagtcaatgcttatacctaatgata

SEQ ID NO: 161572 - DNA, 98 bp, Arabidopsis thaliana landsberg
agagaaggttctccatcgattcacccagtgctgtacttatgagaagcgatagagaaaaagtataagaaaaacggagatttcccatagtgtggtttttt

SEQ ID NO: 161573 - DNA, 150 bp, Arabidopsis thaliana landsberg
tcaccagtgaaggaccagattcgggtggcaacctaaaccgacttacagattttcaacttgtgctactcaacttgagctcgctcacctggatcgaccttggttctaaccagttgaaaggtatgctcccatctaacatgagtagcctcccca

SEQ ID NO: 161574 - DNA, 194 bp, Arabidopsis thaliana landsberg
ttaccaaaccaatgtgttattttatactgagaatgtctcttttgttataaatctgttttctatagcatcacgcaacactagaagatttacgaatgtcatttacagaataaaggtgttatgcactttctttttagtatcttaacacttcacatcgtaagagctgcgtagagaagttggttccatgtatcaggcaa

SEQ ID NO: 161575 - DNA, 134 bp, Arabidopsis thaliana landsberg
gaatagtgatcatgatgaaattatgaatactccaataaaaaaaataaaaaaaaagttgagacctaaggacaatataactcacaagtcacaccatagcagagggagaaagccttatttaccaaaaagcaaaaacc

SEQ ID NO: 161576 - DNA, 360 bp, Arabidopsis thaliana landsberg
ctttgtgaacaagtgcgacacacatgagtaccttgctctcgggtcgtatgtctccggcagtaatgtaatttggtagcgtggagatctcagctgctcatccgagtcatgtttaagagaagaatcccctcccattagttgttcgaatcctccacccttaacgggttgagccccgacagttcctggtgtgcgtgcaaatagaaccggcacacacctttcaagacccgtttggtaggtatggcaccctgcttttgagtttcgaggcgtaacatccggcgttggcatctgtggtatttgctttgaagaaagtagactgtattggttagtagcccgagctgttgtgctatatttgacatggcagca

SEQ ID NO: 161577 - DNA, 528 bp, Arabidopsis thaliana landsberg; identical to SEQ ID NO: 78633

SEQ ID NO: 161578 - DNA, 139 bp, Arabidopsis thaliana landsberg
ttggtccgagcgagagacattgtaccctgtctggaatattctgaggcttttggagctaccgtaacatatctttgtgggtttatcctaactgaattcaaggtcctgtccatagatggtgggtggaatttcgcaaaacgat

SEQ ID NO: 161579 - DNA, 115 bp, Arabidopsis thaliana landsberg
aataggaacatgagccatggtgcaaaaagtatatggaactatataacgagcttagagaaaactgggagaggctttattgggatgaagggtattcaaagaaactcgcaagtgatca

SEQ ID NO: 161580 - DNA, 353 bp, Arabidopsis thaliana landsberg
taaatttattgataaacctaatttaataaattctctaaaataggataaaaatagaaacattacataaatcaaatagcaaaataaaagtgttacgacacaatataacaaaacatcgaataaatgtgttatgaaacaatataaaacagcactaaatatgtgctacaagaaagtatattaaaacaattgattagtgctataatagaacgacatataatagcatacagacaaaacgctattgtatatggagggtctaccataacaggggcataacatagcgtttatgaaaacgctactgatcacatttaatagctcttctctcatgctaacaatatggatatttcttgtagtgagag

SEQ ID NO: 161581 - DNA, 278 bp, Arabidopsis thaliana landsberg
atggtctaaagttgaatgaggatttagatttagcacgtgtgtaccattgtcagttgggttggtcatcatgtccagtaaaggttggtacacatgaaagacgatgagtttgaggcgtgagtgtatattcatcagtacccggggggtgttgtcaggtttagtattgtacacagtagcatcattgtccagtctagcgacgccacttgtgcatccagccctgaaaagagtgatagttgcaggcagacaacccatcgccggtagagatatcgctcggattatcc

SEQ ID NO: 161582 - DNA, 140 bp, Arabidopsis thaliana landsberg
tttgatgataacaatcaagatgtgatcagaagtcactaattcaagccaagcaaaaacaagttttagtgtgttctagcagtcctaagtgaacatgcagaaaacagaaaatcaagtagaaacaagaaaacactcgaccaaca

SEQ ID NO: 161583 - DNA, 280 bp, Arabidopsis thaliana landsberg
ggtgacagttgcatacaacaaagatcctagcccagttaagctgaatttaggagttggtgcttaccgaactgaggtaatgttacaatgaagatgtgtctctgttctttgatttattatttttgttgttgcaactgaaaaggattggttgtttattgatgggttacaggagggaaaacctttggttcttaatgttgtgaggaaagctgagcagcagcttatcaatgacaggtttacctctctttcttttggtttctaccctttatgtgtgtgtgtgtgcttg

SEQ ID NO: 161584 - DNA, 591 bp, Arabidopsis thaliana landsberg
tgattttttcaagccaaacagatgtattctatatttatattttattgcagaattgatttcatacagtcacacatacaagaccaacacacctaaacggaagagacaagctcgacagatggactcaaaacaaagaaaaaagagaaaacactatttatagaacctaaagctgccttttgtaagggttaaacttgtttgtttacctcactattttagtctacatcttctccaactgcattgccagagattgagtcacttgacctaagattacagagcaacacatcgcgccctctcaaagtcagtttaaagaaactatcaacttcctccagtaactgatccaacccttgagacaatttctcagcttgtgtccccaattccataacattatctttgaagaattcaacttcgacaggatcaacaccatcttggatcatcgggtatagcttctcgacactagcatcaacgctctccagctctttgagaatcgtggttctaccggaagacaacatgtctctgatctcagcatttacaacactctgcatatcagtaaagacctttgcccataatggtttttcagagacaggtaaatcgaaa

SEQ ID NO: 161585 - DNA, 177 bp, Arabidopsis thaliana landsberg
tcttcttcttcttcttcatcgtttatcacgacctctgtctcttcgtctctctcaaaagccattttaaatctctctctttctcactcaatctctctgtagctatcagatcttctcttgaaatgatccccaacaaaaaattaaggttcttttttgctttttaaataagtagatatatat

SEQ ID NO: 161586 - DNA, 577 bp, Arabidopsis thaliana landsberg
agaaagaagattcatgacatatacgatggtttacagtattatttacatccactcgaaaacgaatcagattttttcctatgcaagttgtaacatatatatatatagtgcttgcttcattactaaaacaaaaccaaacaagcaagtaatgtattcttcatttctggattggagctctgaaatctacacatcgtatacaggcatacgctcctcgatcaggacacgacaaatcggacatttcttgcatttctcgcagcatgtactgaaaaccaaatgtatcagtaaaatatcaattatagccaaatgctaattctactatgcggttaaagtgagatagagaacaaagaaggagcttcggtttacctgcagaggacgtgatgtctacatgggagtagaaccacgttgatcggatcttcaaagcaaactctacaaagaatcttctcctgaaattcaaaattttgtaatttattgggttaagcaaatcgttacttctgtggaggttactaaacagagaaaatgagtggagggagtacgttttgaagcctttcgtactcttgctggctataactggtgatatctg

SEQ ID NO: 161587 - DNA, 280 bp, Arabidopsis thaliana landsberg
  unsure (1)..(280): unsure at all n locations
tcgttcgtccatcttgttttcaggatggcacattctttgagtttcatctccaccaacttgaacagtttcgtccatcttaatcatcatcagtgccagagtttccgaacatttgtggtatcgtcaccgtctaaacgaaagaggagattttcaagaagcattagagctttactagatannnnnnnnnnnnnnnnnnnnngattgatagacattataagatcagttcctgaaatctctaggaattacttcaagaagccttcaagaagaacgctttagaaggaat

SEQ ID NO: 161588 - DNA, 89 bp, Arabidopsis thaliana landsberg
agacattaagagagagggagggagagtgagagagagggagagccggagagagggagggagagagagagggagagagggagagagagaga

SEQ ID NO: 161589 - DNA, 139 bp, Arabidopsis thaliana landsberg
gggaatattgattaatgggcaatttccgggaccagacattcacagtgtgacaaacgacaatctcatcattaacgtacacaacagcttagacgagcctttcttaatctcatggtaacatctctttttttcgttatttgga

SEQ ID NO: 161590 - DNA, 271 bp, Arabidopsis thaliana landsberg
  unsure (1)..(271): unsure at all n locations
ccgactcgttagtcaactagtaatgttatcaggaattgttctctagatcttctatggntaactaggagcctgggctgcttatctcatctctgttctctccctccaatacagagctagtaaagaaaaagaaggcaaaagcttcaaaaaccacgtcattcaggtcccctctttaaaccctctctctttaatcagaatcactaaatcataattatctttcattaatctaacacttttaaaaatctcaacagtggtttgaagtacttgatggatt

SEQ ID NO: 161591 - DNA, 75 bp, Arabidopsis thaliana landsberg
ttttatttttaattttttttattttattttatttatttattttatattattttttttttttttttttttttattt

SEQ ID NO: 161592 - DNA, 258 bp, Arabidopsis thaliana landsberg
gttgcaaagtgcgactgttttcttttgtcgtcgcaaataagttcaaagagcgactgttttgtgactttttggagaacttcagaagacaaacttttgaaatccacatagtttgatccaatctattgataaaaattactgaaaaacacctattttagtgatatagagtacatacagaactttaggtatataaattatcggttttgtaacttattttagaacttgtttaaaaatatcaatcatgacaatgaaagaacatgg

SEQ ID NO: 161593 - DNA, 398 bp, Arabidopsis thaliana landsberg
cagtcataagatagttatagctaacagtatcaggtttcaatcctacactactcatttcttccatcaattccttaactctctcgggactttccttcgcagcattcataagtctaacattataaactgtgttatccaagtcacaacctttgttcaccatctcaatccacaagctctccgcttcatcgactaaaccattcttatacaaagatcctaaaatggtagtgaaagcaatgatagtaacttccacacctttaacctccatatctctcataatctccatagctttttcaggcttaccagagtcacaatacgacttaatcaacataccgtaagagattttatcaggagtgatattattatacctctgaggaaattcgtcgaacagttgggggactctt

SEQ ID NO: 161594 - DNA, 356 bp, Arabidopsis thaliana landsberg
acttgtagcagacaagaatcagcggttgggaagagtagttacagattataatcaagccgaatcttctatatacacataagctgtgaaagatcgagagatggtagaatttaaaagacgattttaacctcatcaaatcggtggaggagctgagccgtaggaggagacaagctgaactaaagagttcatggctctcacttgcatctccagagcctgaatataatcagttgcttcttctagaatcaccggtacggattgtttaccgcaaccgggaactaaccggcctagaacacgtactttccggttaacatccggtatactcttcttattcaatctcaacaccgacactctccgttttc

SEQ ID NO: 161595 - DNA, 197 bp, Arabidopsis thaliana landsberg
attacaatattgtgagacccattttgtagcacatttgatttgagtttagtggattctgttatgtatcatcttattattaaaagggaagtacaatcattaagggtaatttggtcttaacaatctcctaaactttatatgatccgattaaatctaagccgttcaataaaattaattcccttcaatctaaaccgttcaac

SEQ ID NO: 161596 - DNA, 90 bp, Arabidopsis thaliana landsberg
atttggaaaatagacactttttatacaaataatttgtaaagtaggtagtttttttagaaataggagaaataaacatttttctctttcctt

SEQ ID NO: 161597 - DNA, 390 bp, Arabidopsis thaliana landsberg
tatgttcattaagaagttatagacattttttataggaattattatttctatataaattatatattcttaacacataatttttatctttgtaaatcttggacaattcatgttttgttttctcatatttgttagtttaatattaaaattcagtatttatttttttggtttgggttttttagagttaataaagatctagaacttgtataatttagatattgacccgcagcacacaggagtcgatatttttgttagaaaattagatatttttattttaattaatattatttatatatataacatatgcaagaggtacatcaaagaccctatatttttattaaataaaaaataatatttttgtattaaagatgatctatagatacatgctattgt

SEQ ID NO: 161598 - DNA, 158 bp, Arabidopsis thaliana landsberg
ctcgctttcggtgacaatgggaagctcgtcgaaggaagagacggcgagtgacggagatacggcgagcggtggcgcctcaccgtccaacgacggcagactcttctcggagggcgagcgtgttctcgcttaccatggtcctcgcgtctacggagccaagg

SEQ ID NO: 161599 - DNA, 338 bp, Arabidopsis thaliana landsberg
ttattatattttgtgaatttagttaaatgggttggttccaaaaactttatatacaaggcaaattactataccggttaggttataaaattaatttgggtggatctcgattcgataatgttgaccctccttaatgtatgtgttgaatgtattatgagaattatgttattttggtttaaattgctcaccaaaatacaatcttaaatgtatttgtgccatataagtttttttctctcttaattctctcaaatcttctagagagaaaaaactttgaatcttgttactaacttttgctaatccaattaacatcgggctttagatttcgttttgggttttacctt

SEQ ID NO: 161600 - DNA, 169 bp, Arabidopsis thaliana landsberg
gtcccataagctcgatcctatggaatctgacccatggtctcattgagcgaaggggtgacgagaaaaatacagtcagatttatctttgatcatagaaaactgaaacaatgactatgtgagatgttcgtttttttttatctatttctgtatcgctcgaccataagtgcagc

SEQ ID NO: 161601 - DNA, 118 bp, Arabidopsis thaliana landsberg
gggggggggaggaggagggggaggggggggggggggggggggggaagtggaggggggggggggggggagggaaaaagggggggggggggggggggtgggggggggggaggggggaggg

SEQ ID NO: 161602 - DNA, 836 bp, Arabidopsis thaliana landsberg
cctcctctatggctgcctggatcgagtgaatggatcgagtagaatgctctactgcttccctcctggttggatagagtagagggtcgagtagagtccttttaagcgccttctacacctgaaaacacaccaaaatatgcaatgtgtatgcaagatgatcctaaatgcctaagtgtgcaaaataagctaagatggtgcaaaatgatatgatacaatgagcaaatgcaaagctaaatgatgataaatacacacataaatgagtaaaatacagagttatcagtgaataagggaagagcttgcacaataggtagtgatgctcaaaacaaggtcctcaaaacgctcaatatggtccattggctgctcatgagataagccatggaaaggatgctggccaagtaaagcaaagtagctaggcttcagctcataatcgttcctctaaaagggtgagatacaatcgctgatcgattagcatagaacaggtcaggcctgttaaaattcccaagagtacgacgtggttccacagctggaggaatagctgcaggaatctggtgttggtgtcgatcgacacctctgttgtttcgttcgacaccaatcgcgtcttcattgtgctcccaaaggtgtcgatctataccttagttgtgttgatcgacaacgagccctgctgcgttccggcagctaattgcgcattgaggcgcgcttgatcctcattgacgacctcaagtaggatgagtccatgatcatccaatatatgaccagcctcattctaggcttgcccatcctcatctctcaaaactccttctgcatcaactctgatgactctgtcaaccattgctaatctt

SEQ ID NO: 161603 - DNA, 224 bp, Arabidopsis thaliana landsberg
cccgaattaccggcgaccgatgtgggggcagcctaaaccgggacaccgggcttgtggcagagcaaagaatgcgtcgtgctgcttggcaaaccgttggagtgccgtaccctaaatggctagagtccattatccgaaagcatcactagcttatgctctgacctgcgtagcatggggcacgtggaatcccgtgttattcatacaggaccaccttgcaaggataccta

SEQ ID NO: 161604 - DNA, 161 bp, Arabidopsis thaliana landsberg
attttggacaagaacaaaaaaaaaaaaaaatggcaacgagaggagctgttgcggctgctgcatccacaatatggaagcaccgaagaaacccttctcttcgatcattatctcaccattttaatcccaatttcaatcacagaatcatcccaacaggtacagtt

SEQ ID NO: 161605 - DNA, 316 bp, Arabidopsis thaliana landsberg
gatcaaccgctcagagtcggtgaaagcaacgtacgaaggtgtggttctgttaccttgatcattagcaatgatctcaacacggtcgtgttgccatactccaacacaagagtacgtagtaccaagatcgattccgatcgctggaccttctcccttaccagccattatcacagagaaaaaaaagctttagctaaaaagaagagacgaaaagttttgagcaccagagagattttgcttggttttgagttgtgaagaaaaagagcgtcaaagctaggtttatataaggttagattagtttgaggataatgataacttttcc

SEQ ID NO: 161606 - DNA, 275 bp, Arabidopsis thaliana landsberg
cttctccttctctctctttttgtcctttataaaacgaaaaatggctaactaaagccctaatttcgagtttttttcttttataggcacactttatggtttccaattaacccaaccgattaaaccggaggatttaaaatcaaactctaaccgattttcctgttcatgggcgttacaagccttaacattttctctgaaatgtctactgatttcatcgtcattgattagcaatgcataaagtaattctgatgaatttttaagaaaaggtaacttcactt

SEQ ID NO: 161607 - DNA, 221 bp, Arabidopsis thaliana landsberg
cagatactacaaaaccaggtaagtataaggaatgaaatataaaaagaatctcttcaaggtctatttgataaaataaaaaaaagtcaagaatagaaatttctccaagcaggatcgtctttcaaataccagaagcgaagtaataaatacagactaatctctctgataaaaaatggaagcttaagaaagcatacatcacaaggaaaagatcagaatactataga

SEQ ID NO: 161608 - DNA, 2086 bp, Arabidopsis thaliana landsberg
acgaatccccaaagacagggataatccctaaccttttttttttctctcttttttctgtgttgtctccataaccttgcaagtactgtcgctcactctttctctctcaagagtctacattctctgaagcaaagcgctgatgagggaggagagagaggatatgttgtcatggcctctgatcggagagaaagagaagagaagtagatttgtaaaggaggaagtggagaagcagctactgttgtctggaccactaatcgcagtgagtcttcttcagttttgtctgcaaataatctcagtcatgttcgtcggccatcttggctctcttcctctatccgccgcctctattgccacctccttcgcctccgtcaccggcttcaccttcctcgtcagttctttctatcaaccctctctctctattatcaaatcattctattcttttactacaaagttttttttatgagacaccgagaattattagatggacaaatatctagtaattcatttctttatagatattgatatttaattattttctatttagcaatgttgaaaattaccaatagttaataaaaaaaagcgaaaagaagtgactaaatataaaaatctattaaatacaagatttctatgaattagaaccctatagtttaaacggctaattgaaaatttagaaacctaattaatactaaaaaatcttctcaaggaattgtatgatatatattttaattcagctacgatgtagctatcaggccaccttttctgaatttccaagttgcgtatgcatatttgattcttctatgctactccaagaacaaaaacattttgtcattttaagaagaaagcgaaaacgccaaaaataaacaagaaaaagtgttttgtgtataaatattttcttttttcttttgtttttgctacccgcacatgtttacattgcatggtaaatgacatggagtatggacagtccaaattaactatctaacgatgtgaagatttacgttgaacacttacttgtaaagcaagaaatcttatcataagaaaactattcacctctgaacagatgggaacagcaagtgcgatggacacagtttgtggtcaatcgtacggagcaaaaatgtacggtatgttaggcatacagatgcaaagagcaatgcttgttcttactcttttatctgttcctctctccatcgtttgggccaacacagagcacttcctggtcttcttcggccaagacaagtccattgcacacctctctggctcctacgccagattcatgatccctagcatcttcgcctacggtcttcttcaatgtctcaacaggtttttgcaggcgcagaacaatgtaattcctgtggttatctgttctggagtcaccacttctcttcacgtgatcatctgttgggtcttggtgttgaaatctggtttagggtttagaggagctgctgtcgctaatgcgatctcgtattggctcaatgtcattctcttgtcgtgttacgtcaagttttcgccttcttgctccctgacctggaccggtttctctaaggaagctcggcgcgatatcatcccttttatgaaactagctattccttctgcatttatggtttggtaagtctaagaaaaaaatgccctacattaattaattattggacgtaacttggaaacaaggtttttatgaaacagacacattataagaaagcatggatatactatccaattgtccctatgtagtgataaaattagcctaaacctagttgagatttgaaaaatgttacatctcttattagtatcctttcctcttatagtatctttttattttggtgatgttgtttgagcagcttagagatgtggtcatttgagcttttggttctctcgtcaggacttcttccgaacccggttctagaaacttcttgtcctcgcaatctggcaagaacgatattaataattgttatctcttcgtcataattcagaaccaaatttagtcattaccttgtgattgagtgtggtaataaatttgcagccttaatacatcaggaaccgtctggatgatcccgtttggccttagtggcgccgcaaggtcaataacaacagtagtcat

SEQ ID NO: 161609 - DNA, 512 bp, Arabidopsis thaliana landsberg
catcgaatgggaaaggtgttacatatcaagcaagaaacacgtaagctttcattctcagtactttaacttattcagcactagtaatctgcttttcatccttgtgcttcttggctctagaaaggatattaccatggaaatggtcaacatgcacgagaagcaactatttatggatggtaaaaagttggttgccattatttctgaagctgggtcagctggtgtttcgttgcaagcagatagaagggcagtaaatcaggtgtgtcgagtttataaattctcctactaaataaaattgtctttttttttgcgtattcttattgttctgtagatctaagttaattgtcagagatgacctcagaggacttcacatgtccgctttgggggtattagttgatttggaattttttatatatgtctgcagaaaagaagggttcacttgactttagagcttccctggagtgctgatcgtgcaattcagcaatttggaagaactcaccggtcaaatcagacatctg

SEQ ID NO: 161610 - DNA, 461 bp, Arabidopsis thaliana landsberg
taataggaccaaagatcctaatgaattagcagaatacgatgtggttgtgacaacgtacgctattgttactaatgaagctcccaacaaattcttggtggatgaggatgagaacgatgaaaaaaatactgacagatatggtcttgcctctggcttctccaacaataagaaacggaaagtcgtggtgggtgctagtaagaagagtaaaagaagaggtagaaaaagcactaacgatacttcttctgagcctgattgtggtcctctaggaaaggttgggtggttcagaatagtactagatgaagctcagacaattaagaactatagaacacaaatggcaagatcatgttgcactcttcgagccaaaaggaggtggtgcttgtctggaacaccaatacaaaatacgattgatgatttatatagctatttcaggtttcttagatatgatccatatgcggtgtacaagt

SEQ ID NO: 161611 - DNA, 434 bp, Arabidopsis thaliana landsberg
gcgaggcttcagctcatagacgttcctctggaagggtgggggtacgatcgctgatcaattagcatagaacaggttgggcctgttgaaatccccaagagtacgacgtggttccgcagttggaggaatagctgcaggaatctggtgttggtgtcgatcgacacctctgttgtgtcgttcgacaccgattgtatccgtgtgctgctctcgatggtgtcgatcaacacctctgttggtgtcgatcgacagcgagccctgctgcgtctctagcagctaattgcgcgttgaggtgcgcatgattctcatcgacgtcctcaagtaggatgagtccatgatcattcaatctctgaccagccttattgtaggcttgcccatccttatctctcaaaactccttctacatcagctctgatgactctgttagtcattgctaatctc

SEQ ID NO: 161612 - DNA, 356 bp, Arabidopsis thaliana landsberg
ctgcctccaaattttcaccttcatgatattctggttttgtaagagtttcttctgcacataattttcgactttataactcatttttatgacctattaatagtcacctctgagcaattgattttcacaaaatcagaaactggaaaaatctaagcaaaatctcttagaaactggaaatatgtctgaagctcacaaaagattgtcgtctctacttaaaacactcaaaacaccaactatttcgcgtttcgttgaagacagatacataaccagcaaaagtgataaatgatcttcagacaatggcgttagcagcactagcaatccttggccagagatccgcacactctttcccaataggtcca

SEQ ID NO: 161613 - DNA, 140 bp, Arabidopsis thaliana landsberg
tgtgatgctaacaatcaagatgtgatcagaagtcactaagtcaagccaagcaataacaggttttggtatgttctaccagtcctaagtgaacatgcagaaaacagaagttctaacagaattacacaaaacactctgtatca

SEQ ID NO: 161614 - DNA, 78 bp, Arabidopsis thaliana landsberg
gggaaaggcgataggattgctgataagcgggacgcttgtgtatcaccattgcgctaatcgcaacgcgactcttctctc

SEQ ID NO: 161615 - DNA, 237 bp, Arabidopsis thaliana landsberg
caccgcgagctcttcaacacgtcgagaagaaaagatcatcatccgatagatggagtcaggctcatcagtttaaatggtgaagggttgacaagcctatgtagatgttctaagtgggagacagagtctgtagactctttccatcgcttggagacacagttgcaagcagccacatcccttgcagaagtcaggtaggaaagaatgtattgaaggatcgcatcaggaatagagtccatttga

SEQ ID NO: 161616 - DNA, 433 bp, Arabidopsis thaliana landsberg
catccgtttcttttattcttctttctccttaaatttaaaatctttgtattaaatttattggatgttgttgtttctaagcgtttctttcaacaaacccattttcttcttcttcttaagattctgaatcattcattgtttgatttagcttctcttcgaattcttgattttacaggtttttgtttttttttaaaaaactttgatagattgaaataatcaaacttggatcgctgtgataatgattcttgtttgtatgtaggatctgaaggaagctatggtttaaattttttgatgggcaatctctaacaggtacaaatgttctctttgcttctctcttacaagatctttaggttatgtcttgttctttgaagttgctatctttcttccatgttccagaggtttgtcttattttatcacgtttgacatagtaatttct

SEQ ID NO: 161617 - DNA, 597 bp, Arabidopsis thaliana landsberg; identical to SEQ ID NO: 16481
  unsure (1)..(597): unsure at all n locations

SEQ ID NO: 161618 - DNA, 227 bp, Arabidopsis thaliana landsberg
gcttcaggtgcaacatcgagtttcttcaaagcaactgctttcccatcatttagagttgcataatatacccttccataagaaccctcaccaatcagagacttagatccaaaattgtcagtcttttctttaacctcatccacagacaagggaggaacttcgatgggaagagcttctttctgcacctcaggctttacaacagcttgtggtttttgattcttttgatttgc

SEQ ID NO: 161619 - DNA, 233 bp, Arabidopsis thaliana landsberg
tacaatagaaactatataaattaataatattagaaccatgaaattttattaatttatagtgatattaatttatcctataataaatattaatttatagaaatatttacgtaaaatacaatactaaattattttaaaaatattttttaacttagtttttcttatgttttgatgtttgtatattcaattatgttaaaaaattatttttttcttgactttttaatttattttcctac

SEQ ID NO: 161620 - DNA, 204 bp, Arabidopsis thaliana landsberg
aggttactatggcgagggtgaggcctagacagttggaactgagctagtctgttccttccatgttgggttttgatggggaagagggcgcttgggtctttgtgtatgagctgagaatctgcattgtcgtgccttctcttccacttcctcgacgacagcagttccctttggagaaccctcctatatctcctctattaggagctggga

SEQ ID NO: 161621 - DNA, 317 bp, Arabidopsis thaliana landsberg
  unsure (1)..(317): unsure at all n locations
gtcttcttcatcttcctctgagaaatcaaaaactcgatcgatcaatacgtcgtgcgtctacatcgattccttcagaacctagagatcctctgttttggttgactcgataaagctaaccatgtcttacaaaccaagcgcgaagactgaggttcgccggaacaggtataaagtatctgtggacgccgatgaaggtcgccggagacgggaggannnnnnnnnnnnnnnnnggaagaacaagagagaggagaacttgcagaagaagcnnnnnnnnnnnnnnnnnnnnnnnntggcgtcacagccagtgcaggatttctcct

SEQ ID NO: 161622 - DNA, 146 bp, Arabidopsis thaliana landsberg
tacaattgggaaaaatatcatttaaatcatcagtttaccatttttgttggtttaaaggatgaactctagagatagtacattagattcctaattttatgttgactttcaatttaatcacgaatgcgtcgttaactagatcaattaag

SEQ ID NO: 161623 - DNA, 376 bp, Arabidopsis thaliana landsberg
  unsure (1)..(376): unsure at all n locations
tcgagccattcccatgtgccttgtctccgacaactttctctcttcccttctctcttcctctggttcacatggaacttcaataacatttacttctttaaggtttctcatctcagaaaaagtcaggtgggtactactaaatttggattttcgttcacttagaacagttctgtttgatctttgattcctcaagttataacttttgtttttcttttatatcttatgacatgataatattaggtcttaaatcatcctcttctcttgatcctgttggaaaattcttcgatttggtggttatgttgcttagataacctaaaaaggtatgaatnntgagctctggtggatacttaatctctgtttttatcaatagaatttgata

SEQ ID NO: 161624 - DNA, 408 bp, Arabidopsis thaliana landsberg
tttacgccaaaaaaaataatatatatatatatatatataatatataatatcaaacaataataatgtgattaaactttttaaatccaactaaatgtttaatactgtaacaaatatagtaggagattaccaatgccggaaataaactaataaaatattgtgaattcacacaattaataccgggtgtttcactcaccattcgatttattttttaagacggcactgtgaagtcttcgtcgaaatttaaaatatcaaatgagtttaacaactgaaattttttttaaaaatgattaaataaagtataaaatcttatattttatttcaaaatgaagagagttttttaaaacccacacccgactggttcaaccggttcaccaggtcatgggttaatggtgagtttttgtggggttt

SEQ ID NO: 161625 - DNA, 472 bp, Arabidopsis thaliana landsberg
ttggattcctcatgactatgacagggtgcttgattcccaattgcttgatgtggaaacaccaactttttatatcggacggagccttgttaaatctggagtctcagttcttgtctacaggtaaaaatcaaggtcggtttgttaaactactacttgtcttcatgatccaatggtggatgtgtttcttgcacgaacagcggagaccaatattctatgatcccgttgacaggacgtataaccttagtgactagatcggccatacaattgggactgtgaacaagtgtaccacatcgagtctggtttgctggccaacatgtaaacagtcaacattctgtaatgggacatgtaaagaaaaaacgcgtacagaactaacacattgtgtgctgtgccctatgttggaggatggactctagtctatggaaatgtcttgtccttcgcaccattgctatgagctttacacgaggacccattctca

SEQ ID NO: 161626 - DNA, 173 bp, Arabidopsis thaliana landsberg
atcgcaagaagcaccgcaaagttgatcccaaggccatcatgaactgggcaaggcagattcttaaaggcctgcactatttgcattctcagacccctcctgtaattcaccgtgaccttaagtgcgacaatattcctgtcactggaaataccggaaaggtcaatctgaataaagta

SEQ ID NO: 161627 - DNA, 145 bp, Arabidopsis thaliana landsberg
gtaactgttgagttttatggtggtgctctcaatgcagtgagtgatagtgctcccgccactgtgatacaatatgccagaagggctcaaaaaggtgatattttttgattagatcgtccgcctttaaatctaatggtgcatttcggag

SEQ ID NO: 161628 - DNA, 345 bp, Arabidopsis thaliana landsberg
  unsure (1)..(345): unsure at all n locations
ttgagagacgactcaatgttgtgataatggctgttttttttctttctaagtactaatttttaaccgtacatattggtgaaaggcagagttaactgatgcatnnnnnnnnnnnnnnnnnnntgttttcgaattgcaggttttaaatgctgcatgcagaagctgtgcgagtatttactctgttttttttttttttttttctttcttcatgttttttggttccatggagtatatgtaaaaaaaaaaaccatgaatactcggttttatgtgggtattatgttgtaactctcacaactcttgttaaagcttttggcaatttgtacagtaagaaaaaaagaattgtctctc

SEQ ID NO: 161629 - DNA, 259 bp, Arabidopsis thaliana landsberg
ggttcaatctgttgtggtagaaacgttgtcgtttcaataaaggcagccatttattgaaacgttgtcgtttagatgcctctcatttttgttgaaagccctagaaaatggaattagacgtataaattgatttcatctttctcagcttttgctaaacgcagataaacaggtttctttctgattcttcttcgtattggaacatacaattatacaattgggtataaccattttcttggatttcagtgtatgattccttttaatg

SEQ ID NO: 161630 - DNA, 241 bp, Arabidopsis thaliana landsberg
cttggaaataatccaacaaacggggggtgatacctagcgggtacaatggacaatggagatggaatagctggcggatggtcaggccaccccgtctatagaaataaataaaggcgtgaactttttgcacgccggatgcctactttttttgaaactttacccctatctttggcataccgagactgaattgccagagctgactgcccgtttagaagggccgaatcactgtatcctgtctaacaac

SEQ ID NO: 161631 - DNA, 261 bp, Arabidopsis thaliana landsberg
agagtaacgaaatagaatgcttcgagtaatgaaaatgacagattaatacaacgttcatgaaacgcgatatcaacttctcatctacaagagttcaacatgaaactccggcgaacgatgaggaacgattctcagagagaatccaaaaggaaactataaacaacaaatccaaaatcttcttatcttctacaaatgatcctcattagctatatatatctgcatctcgattcttcctctaacactcccatcgaccaatcttctctt

SEQ ID NO: 161632 - DNA, 123 bp, Arabidopsis thaliana landsberg
agaaatggatggtggaaatttgcgagaggatgctccagaaacatttgacaacaggtttgatctttacacaattttcttcatctgcaatgataccggctttaagatgaaagccatctattaaac

SEQ ID NO: 161633 - DNA, 357 bp, Arabidopsis thaliana landsberg
gtgatgtgccgtgaaatcctatacctaaacctgcatgctaaacgagttcgataagttcaccttagtagataggccggttcttattagacacctatataccaggctcatcaaaatagtagttatggtaacagatacctatggtgggtatatctattattggaatcaagttctagttaattactctagaactaacattaagaacaactaaagatgaagaatcctatatataacatagcaaaggggtaatctaccaaatcatatgaatccctagtgagaaatcctaaccctaacaagccgactactcagacatgatgaataaaataaacaacatgtatgagtaagaaagcataaacaaat

SEQ ID NO: 161634 - DNA, 309 bp, Arabidopsis thaliana landsberg
  unsure (1)..(309): unsure at all n locations
aaaagttgactttgactttctttttaccaattcctttttcttgttgcacacttcctccttcttataagcttttaattatgtgtttggacaattaagccattgatatggaacaaaactaatcctacggtggtgatgcgttgtgtgctttatatattttttatacactttntgatatattcttacacacttttttcacaaagattgatatttgcataatttgtggtaatcattctcaaaatacggtatatatacttcacctcttactttcaaagagaaatcataagtataactaagcaataattctatata

SEQ ID NO: 161635 - DNA, 107 bp, Arabidopsis thaliana landsberg
tttcggttagagattgcggaggagacggccttaggtggcggtctcagcggcggcgataaatgtaaccttgacggcgagagattgatgttggcccaagagcattaagg

SEQ ID NO: 161636 - DNA, 140 bp, Arabidopsis thaliana landsberg
  unsure (1)..(140): unsure at all n locations
ccctctccttntccgtttcctgtggcccttcgnctggttcccgcgngctgctccccccttgttcngctgtgtgctttgtcgttttccgngnttcggtttcttctgttttcttgctccgaggtaacgtgctttttttgntc

SEQ ID NO: 161637 - DNA, 395 bp, Arabidopsis thaliana landsberg
ttggaatttgtttttgtcatccctcgcactcaagtttggtgtgcattctacaacattcttctcatatttttacatgccaaatcaaactaaaatgccaaatggtaacaaggttgcaagcttacacacatgaaaataagaaggggttacattagccagtgaagaacctcgtggataactagttaccaagaatctacttgactacattaacagttcacatatcctaaacacacaaaaatcaccaaacatgacttcacttcctttcttgtttcgcatcagcattactcgtcacaacttccattttctccatcttcttatacccaaactccttggtcttgatcccacattcctcctgcatcaccatcgcaagattgttccttttgaaagctgcatatata

SEQ ID NO: 161638 - DNA, 321 bp, Arabidopsis thaliana landsberg
gggggggggggggggggggggggggggggagggggggggggggggagaggggggggaggggggggggggggggagggggggggggaggaggggagggagggagagggggggggggagggggaggggggggggaggggggggggggggggggggagaggggggggggaggggggcggggagggggaggggagggaggggggggggggcggggcgccgggggggggggggggagaggaggggggggaggggggggggggcgggggggagggggggggaaaaaaaaagggggggggggggggaggagggggggggggggggggg

SEQ ID NO: 161639 - DNA, 85 bp, Arabidopsis thaliana landsberg
tggtgaggcatcatttgtaagtcttgctgccccattcatcgacgataatgccccacatgatcagggagctgcttcctggaatgca

SEQ ID NO: 161640 - DNA, 361 bp, Arabidopsis thaliana landsberg
aactttcatatgtgcaccaagacgcacaagttcacagtaaagctgagcagcctcggcgacaccatcagagagcaacgaagtcgacggaatctgtgaaccaatatgaaaatgcagaagctggagacaatcaagcataccagattgacgcagcttcctcaccacacgaacaatctgagtagtagtcaatccaaatttacccttttcaccagaagttgatccgaaatgacccgaatgcttagtcctcagcttagcccttaacccaatgacaggcctcacattcatcttctggctcagctcaataaccagatcaagctcttcttcttgctcaagcacaatcacagtattcaacgccagttttctc

SEQ ID NO: 161641 - DNA, 166 bp, Arabidopsis thaliana landsberg
gcttgagtaaggtccttgtgtgctctcagaccacgtgataagagttctggtttaaccaagttaacttctttaataagtgaaatccagtcccatgtgtttgaactggtattgtgtgtatctcttgactctcgtttgtgtattgctattagcaaactctcacttttta

SEQ ID NO: 161642 - DNA, 345 bp, Arabidopsis thaliana landsberg
tgtgtccttacatatggccttgttatgacgatcttgattgtggataacaacgttgtatcagtagtcacttatgtgatagtacacgccctgatgatgtgcttgcactagagagtttacttgcgagcaatcacaccagtgagttgtcatagacctctctctgtgtgcaaagtgcatctgcctcatctcattcgctgtgtctaaggctacagtggtatgcccgtgcttcgtttagcagttgctctatgtgtcccccaccaacaggttacgtctatcttttataaccaacagcttcttgtcaggtgctgtctccttctctttcgcccacccggtagcaaagttgttatc

SEQ ID NO: 161643 - DNA, 161 bp, Arabidopsis thaliana landsberg
tcttgtcatatgttgcttagtttctacaattctttcttgttactcgacctgatactcgaccaccctgttgtctgacaacagactgtgcactcgaatatctttgtttcatttactatctgttactcgaccagtcactcgaccttattcagtgcttgatatgt

SEQ ID NO: 161644 - DNA, 137 bp, Arabidopsis thaliana landsberg
  unsure (1)..(137): unsure at all n locations
gggggggggggggggggggggggggggggggggggggggagggggggggggggggggggggagggggggggggggaggggaaggaggggggggggggggggggggggnaggagggggggggaggggggggggggggg

SEQ ID NO: 161645 - DNA, 167 bp, Arabidopsis thaliana landsberg
gagcttggcataagctaaagctttgcaggagctttcatgattcatggattcaggtcctggttgagggagaatcaagttagagcttatgagcatgtagttgtagtaaagattgcctaagtggaaagaaaggagaattgagtcttcatcatcaacatgccaaggtgagg

SEQ ID NO: 161646 - DNA, 251 bp, Arabidopsis thaliana landsberg
gctacaaacatatcaacagatggtgagacttttaacaaccctttattcggctcgagctctcctgggggcactctggggtacattgcggcaacgtgctcttaactccctatggcttgccaaaccaagagagaggaccatgcctctattataccttaacgaaggctcagaatatgtgagattcttagcatacgaattgacgactttagacacgttgctcgtatacaagattatgagtatactgtcacctgttg

SEQ ID NO: 161647 - DNA, 354 bp, Arabidopsis thaliana landsberg
tatttaggtaaaagatcgttcttctcaatcaaaaggtttacaaaattgtctgaattcgaaatagagaaaacgcagaccgaccttttttccgattacaaaggttaaaacagctagtgacaaacaaataagccaacaagagcaacccagacttgtagggagatcaaataaataaaataaacaaaagggttaagatgacaacaagaccacaagaacaaacaaattgcagaatccagtaaatcagatttgttgggagagttttggccaaatcatgtaacataatttacgagtatgacctttttcattgatcagagttaagggctttggagatccattctgatgctgcggcttgagttt

SEQ ID NO: 161648 - DNA, 196 bp, Arabidopsis thaliana landsberg
  unsure (1)..(196): unsure at all n locations
cgaccaaatcttcgttcgctgcaaactcatggctgtaagttttaaatcttccttcgctaatccacgatttccttattttcttttggaacccattttagaatttacttgttaagtagggtttgctnaatctctgaaattcatgctatcttcttgttaatatgtccaattagaagtaattaatggagtgttttcgatt

SEQ ID NO: 161649 - DNA, 212 bp, Arabidopsis thaliana landsberg
ccaatcgatttacaaaagtcagtgatcacctgagagaacaaaaatacatttccacaaaacttatggactttgcttctctaactagttcttaagaaacctatgagtgtaaggcaatggcttttcctctgagctgattaaatctcttcttgcctactatgttgtgtgtgacaacgacaagaggtgtagaaatcctatttaatcagatattgttt

SEQ ID NO: 161650 - DNA, 139 bp, Arabidopsis thaliana landsberg
atcatgtaaatgtttgcaaaggcccaacaaaaatatatgacgatggatagtaataaattacatatagtcatcatcattatccatatcgcaccacatttggaacattaaattctctctattattcagagagattatcaca

SEQ ID NO: 161651 - DNA, 151 bp, Arabidopsis thaliana landsberg
aatcggcccgttacaacaaggcaatgatacatcttttttggatatgagaatgttcgaatccggggacacatgtttggtggtgggtacatcgagagacaatttttcgattaaataaatttatatatatttaagtttgattaaaatcagcaaa

SEQ ID NO: 161652 - DNA, 408 bp, Arabidopsis thaliana landsberg
gctcccagatggttctggccgcttctttaacctgagtaagcaaaagctttattcctctcttcttcttaattttcgtctagctcttctgatttcaactgttgatttttcatgaaggtgttcaaaacaagctcttgaatgtagatgagagtgtatacataccaatcactaaagcagagtttgctgttcttatctctgctttcaacgtaagttctctctcacacactctttgtgagaagctttccccgttgttctaactgtatacttgaattgcagttcgtcttgccgcaccttataggctggagtgcatttgctaactccatcaaaccagaagactctaaccgccttaacaatgcttcgcctaagtatggaggagactacgaatggagtagatgatggagattagaggca

SEQ ID NO: 161653 - DNA, 140 bp, Arabidopsis thaliana landsberg
tgtgatgcgaacaatcaagatgtgatcaaaagtcactaagtcaagcaaaacaataacaggttttggtgtgttctagcagtcctgagtgaacatgcagaaaacagaaaatcaagcagaaaaagtaagacactcgaccaaca

SEQ ID NO: 161654 - DNA, 318 bp, Arabidopsis thaliana landsberg
  unsure (1)..(318): unsure at all n locations
cccccccccccccgcccccncccccccccccccccccccccccggggggatttggggggggccaccccggcgcccatccggggacagaagaagcccccccccctccccccagaccccccccccctcttcccccccccttgtccccggccccccccacccaccccccccccccccccccccccccccccccccccccctccccccccccccctcccccccccccccncccccccccccccccccccctccccccccccccttcgcccccccccccccctcccccccccccctccccccggccccccccccccccccccc

SEQ ID NO: 161655 - DNA, 169 bp, Arabidopsis thaliana landsberg
gaacccggaccgttattgttatactcgcctttgtaaagtttatcaagtgcttccccaccggtccattggctccaacccgaaccgtcaataaactcatcaatataagattccattacaactgttcttgaaaattctctccacggacgtcccaagtagctcttcactttat

SEQ ID NO: 161656 - DNA, 328 bp, Arabidopsis thaliana landsberg
agaaccaatgacaaagccgaccagcccttgaccagataaaaaattctcgaactagctcttccttctagagaatgtagttttgttggtaaagagtaatggtgaaacagttggaaatattgagaactgggtggaattgtataaggtgccatggatcttacttctatgagatctgataccatgttgacatttctaaactaagaatggtttatgctcaaatgagcttattaacatagaaatctaaaattggaaaatacaatagttcaatgagctttattgaaatataaagaagaaaaagaagctttaggttttgtcaccaagaacacttaga

SEQ ID NO: 161657 - DNA, 687 bp, Arabidopsis thaliana landsberg
ttgtatatgtgtcatccattacaggtatcccggtgaaccttgttttagcccatggaccgcttctccaataagtctttgagcctctcatagtacacgcctgggatggaacttgcggtgtaatctgaaccgtaaaatcgccaggcgatggatcagtgtgacttttccaagaagtcaacacccgcttctcacctgtggcaagattatacatcaggtttgagaaaggtagcatagtgtcaccaaaatgctcaaagctttcccatagagttcttcccgaattattgtctatgacaactaaatttccgttgtctgtaagctccgcacgagacccgttagatgcaaaagtttctccaatggaccacacaacgctatgattttcattaaacaacagaagacttccattgctgctgatagttaaatttgctgcagagtctgtaacaggcttttctctattggccacccacacaaccacccggggaatgatacccttgaaccagattccaacatactgattttgggagttattaaaactgaagaatcccaattcataaactccattagaggagctgagagtttttcctattgacagaggactttctctcgttatccctgcatagctgaaacttaaaaagatggtaattaagagcaaggaagcaaagaacatgatcctcttcttccccatgtgttatt

SEQ ID NO: 161658 - DNA, 318 bp, Arabidopsis thaliana landsberg
gtccaatcatctatcagataaatttaccaaataatgcatcagaaagacaattgttctccaagtactcatagacaagaagcagctggtttttctcaacacagcatccataaagcttcacaaggttcgggtgctgcaggcaagcgatcataccgatctcgtttacaaactctttgttaccttgatgtgatttggaagatagcttctttaccgcaatcaatgttccatctggtaatcgcccctgtattgtcaaatttttggctttaccgtcacctgtttttaagaacactaacattgatttatagagcttgaagactcctt

SEQ ID NO: 161659 - DNA, 96 bp, Arabidopsis thaliana landsberg
taaaataatatcatatatttataatcaactttacaataaaagtttttagtttaactaaaatataagcctacctgctgtataatgcaagttaaaatt

SEQ ID NO: 161660 - DNA, 143 bp, Arabidopsis thaliana landsberg
ttttgggttttcagagagtgatgatgataatagagtgtgccttattatttagagttagtatctataaataccaacaccaatatgttttacttctctaacttcactccaaggacacagctttaaaatacttttaacacgcaaaa

SEQ ID NO: 161661 - DNA, 379 bp, Arabidopsis thaliana landsberg
tcattacctaaaaggtaaaaaatattaacttcttaaatataattatttctatatttaaacttaataaaacgttatcaatatttaaacttttaaaaagtttaatatatcacaattttttaacatcattatataatatatagagtttaaaaaaaaatcaaaattttttccgtcatatcttgtgattcgaaattttaaaaatgaaaatatattaaccaattgacgaaaaatgtgtgggttcaacgtcccgcatcgactaaaatatttagacaacgattcataaatatatcataaacaaaatcaacattaataaaataaataatttttgtaggggacgagtttggaaggacgttacttaataacaattgtaaactataaagta

SEQ ID NO: 161662 - DNA, 309 bp, Arabidopsis thaliana landsberg
aaaatgtgtctcacgaaacttttaccacgatttgatatgacgaaactgatttctcccaaaccctaacgattctgctccttctccttttctctctttttctcctttataaaacgaaaagtggctaactaaagccctaatttcgagtttccttcttttataggcacactttagggtttccaattaacccaaccaattaaaccggatgatttaaaaacaaaccctaatcgattttccggttcacgggcgtacaatataagacaagaagacaataataattactgaattgaaacaaaacaaaatattttggga

SEQ ID NO: 161663 - DNA, 391 bp, Arabidopsis thaliana landsberg
  unsure (1)..(391): unsure at all n locations
attttttcggagttttctgagctaattgtactgtaaaattgtctgggttagtccgaattggtatgattttctcgttgataatcgtcgattttagtgttgttccgtttttgtgcaggtaaagaatgaagattaggttctgtaatggcttcacaaagcctgggtttttgctagttcactttgnnnnnnnnnnnnnnnnnnncgttagatctcgttcactctctgattccacttatggcaacttatgcaaccacaagaagagacctgggactggaattggtctaactgttcaatgcgctattgcaaatcggagattttcttcacgttctctggattcaccgagaagagaaaggtctcgttcttcttcttcttcgggaagggatagggatagaga

SEQ ID NO: 161664 - DNA, 350 bp, Arabidopsis thaliana landsberg
tttttcttttttttaaacaaagcaattttaacatttataaatgtaaagttattacgagctatttaaacagagttgccttaacaaaaaaaaaagaaaaaaaaagagccactctgtttaaaacctaaaccacatattggtttggtaggtactgcttactcaataaaatccggttgaacaaatcctctgcttttctgcttcatttatcatttttaacttttcaagttgacccatcccactcttcatagaactccttaagatactcttccatgaacttgtgccttttcttgccctccttttacccgctgataattttcaatccccattcaaatcaaaatcgaaccaaatttccg

SEQ ID NO: 161665 - DNA, 362 bp, Arabidopsis thaliana landsberg
ggaaagctgggacatcctactcctatataaaatttatgtatgttgtacaaatctcacaacatttacatatataaaataaaataaataaacattttccatcatctttttcattaatacaagcttatttgacatccaaagcaaactgctctcatattttaagtaactcgccagctttgagaccatcaatcgtgtttcgccacatcatcaatcctcagccgacgaccgctagcaaactctgtcggacggcaggaacagaacacagtaacgatccgaagattccggtaagagcataagctattgcacaaaagggaagagcctctggctccttagccgacaaagctgctgttccaagtccatgagca

SEQ ID NO: 161666 - DNA, 187 bp, Arabidopsis thaliana landsberg
ggtttcttttgttttgatccttcacttactaaactcgtgtctgatttcatgttcctcgaatgatttgtctcaaattcctaaaaatttccttagtctagctaaaagagaagattttttcgattggatggttggaatcagaaggagaatccatgagaatccagagttaggtgatgagggagtataacca

SEQ ID NO: 161667 - DNA, 383 bp, Arabidopsis thaliana landsberg
catactttatcacttcctatctcaactctcgtgaagaaacatagtaaagcaggctttaatcaacaatctatcaaagtcaataagtagtctaaacatcaaatctcttggggtagagtctacaaatctctggaattcgtagatcagacattcatttgaacgtctttaggacgctggaataccttgggtcgtattccaaacttaaatgagcgaaataagcattagggccaacgattccaaaagggatctaacctaatcttatccacctgaataacctagagattacctaatctaatccatcctcaagaaccctaatcactactcaagcaacataatcaagattacaaacccaaaaattactctaaacatatcaaaatgtagatcta

SEQ ID NO: 161668 - DNA, 214 bp, Arabidopsis thaliana landsberg
cggccataataccccttctggggggattccatccacaaacgcaaagtttagggcaaaccaatatggcaaatcatcattaagtaatcgcaattgttttcctcatggagggacatatgtaaagacagatcttaggaatcgggcacggtataaaaggttatttacaggcacatattcctccgggagatcgattggggagtgggcataagggtctata

SEQ ID NO: 161669 - DNA, 220 bp, Arabidopsis thaliana landsberg
ggaattgaactgaacctcacattcagcataaataagtaggcctaaaaaacctacttatcaatttggcgcattgttacattcaagatatcagaaaaagttaagatcaagttcttttacatttatcaagttactaactcatcatttcgtctgcttgttattgtggtataggtactaatctttgtgcatgcaaactcgatccaaaggttctgcacacctacta

SEQ ID NO: 161670 - DNA, 314 bp, Arabidopsis thaliana landsberg
tttaaaagtgggagcttgatgggtaatttagggaatgtctttgaatgaagcaaagactggttttgctaataaaggggaaagaaaagattccttttttctgttgttgttgtttcagatattacggagctttgctttgcctttttttctaatctgttgtttttggggaaacttgcatgtgaagggatttgcgttgaacgaatcagcgtgaccggattttcttcttgcaacactgtgttgttgttgttgttgttgttgttgttgttgttgtatttgtttatcttctctctgaagtttatgcggcaaatctgttgaat

SEQ ID NO: 161671 - DNA, 219 bp, Arabidopsis thaliana landsberg
ttggttaggatttgattaaacttgctaggcatatggatttggttagaatgatcatggcaatggactagagaatgttggaggtttctttgtgttttcaaacctcttccacgggttcggctttagtgttttgcttgagggcaagcaaaagctaagtccagaggagttgatataaacctatttttacatgttttacctatgatttaggtataagttttagag

SEQ ID NO: 161672 - DNA, 301 bp, Arabidopsis thaliana landsberg
  unsure (1)..(301): unsure at all n locations
agtgtcaaagatataactctactaaaagcagcaacacctacaaagtttagttcttcaagtgatgatcaaaagtgtattctttaacgagtctataagtgaaagcaaaggactgttgataagacttctacttcctgacgatattgaggtcaatgtgtacatacgcaagcgaagccacaaatactaagaagaaagccgatacaagcatgaatggttccgcaagcatgtatattggttngaatgtatagtacacctgcaaaacgtcacacatgtaagcagtttatagtctttttttacagaatcg

SEQ ID NO: 161673 - DNA, 231 bp, Arabidopsis thaliana landsberg
ccccatcctcgtttttttctttatctaattgatttctttgggtactgtgttgttgtttactgcatcttgtcacatgttgcttactttttgcaattctttcctttttctcgacgtgatactcgaccacccagttgtctggcaacagactgtgcagacgagtatctttgtttcatttactgcctgttacttgacgagtcactcgaccacacacagtgctctgcaaccagctgt

SEQ ID NO: 161674 - DNA, 146 bp, Arabidopsis thaliana landsberg
gggggggggggggggggggagggggggggaggggggggggggggggggggcggggggggggggagaaaagaagaaagagagggggggggagggggggggggggggggggggggaggaggggggggggggggggggggggggggggg

SEQ ID NO: 161675 - DNA, 236 bp, Arabidopsis thaliana landsberg
ataaatttgatgttgtatccccaattcttacatatgcacttcttgcacatcccaggctcttgtgttttttttgccaatgggtctaactaaagacagagctaatgtggggttcactttaaccggcaagctcactaattggtggacgatccatgatatctgctgcagctgctgcactacgttgcaggactgggtcaatatcaggcaacttaggaatctgagctaagagatcaattgtg

SEQ ID NO: 161676 - DNA, 114 bp, Arabidopsis thaliana landsberg
ataaactttgaattggtattgaattattatgtggaagagagaggaaaggatgaggaagagggagatgatgatgtagacgatgttgaatgaaaaaaccattgttgttagtctaat

SEQ ID NO: 161677 - DNA, 359 bp, Arabidopsis thaliana landsberg
attacaatgtctaactctttttgagttccaaaccctttactagactaacactttctttgctattcccccttaagaactctaaactcttactctctttttttattttcttttcattcccattctcttttccaatcattccatacacaatcccaatcccaaatacaagtctccacctagtcctagctaacccaaaaagcgtgggctaggtctacatgaaacactactcttgtcgggtcatacctaacacgttatactaagctcaatcaaaaaagacctcacaatcacacacaaatgatctttgacttgaaataaggctaggctaagggtatgggaaactgccttagatgatgcaaaatttg

SEQ ID NO: 161678 - DNA, 519 bp, Arabidopsis thaliana landsberg
gaagagttccgtaccatcttctactctcttagacttgcaaaatccctttatgagagtattatatgtaactttttctgggaaacagtccttgctaaccatgagctcaaacatctgcttggccttgtctagacgatcatgcatacagaacccgttgatcaatgaattgtaagtgaaaatatcaggatctatagaccttttgatcatgtcatcgtacaatttctcagcctctacaaactttccttctttcacaaacgcatcgatcaatgcattgaacgtgactaaattagggttgattttcttctcaatcatatcactcagtagttgagaggcatcactccatcttccataactacaaaggcaacttatgagggagctgtaggtgataacattaggtctaatacctttgttatccatttcagtgaacagattgagtgcatcattcacgtctttgtacttgcaaagaccatcaatgattgtgctgtacatcacaacatcaacctctatttttgatgcttccat

SEQ ID NO: 161679 - DNA, 231 bp, Arabidopsis thaliana landsberg
aggatattgcagaggctaaggacttcttcaagcacaaaggggtagatgttggatcgaattgacacaaaggcttttatcagaccattcatcagagatatttttcgttattgacaaaagacttaactgtactgtttggaatttttgaatttaacagtgtcactgaggtaaaacgcaaaagcttcgtatgcatccaaaagtaatcgcaaaagtataacaaatattccaaattgc

SEQ ID NO: 161680 - DNA, 224 bp, Arabidopsis thaliana landsberg
tatcattatcttatataccatagaatctaacacaaacattaaagtagtcaagcaagacaaatttaacaccaagtaatagtaaaacagacacaaactatatatggaacatgtggacaatgaaactagttcgcctttccttgtttcccttttatcagaccatcttggacttgggatgtgacggcaatagctgcacaagcgagagattgatggcttttattcattgg

SEQ ID NO: 161681 - DNA, 575 bp, Arabidopsis thaliana landsberg
ttcagatttctttctctttttttttttatgaaaaagatatcagtgcaactaaagagatttacaattcagatttctttctgaaaatatattcgtgtgacagtaaagactaaaagagtttaacaattcagatttatgagtacattctgagttggacaatccaactggttatatggacactagatgatgtagagggagagagggcccaacttgatataatctttataatgaaaccaaaacaaaattgcaaaaatttcatgaatttggctgagactcttttggaaatgatgatgaaagcgtctggtaacaaccaacagtgacctccaatctctgatcatggatctctctccagggaaaacctcaaatcataagtctccttatttggttggtttctgtagtcaagatcggctttcgactcaataaatcacagaattttataagcatttgcatttcctatacacaagcagtgtgaacttaccactatggactaaaatggaggttcgagtggttcatcccagacatctgcactcccatttgagacttcatctacatcttcctccattgacaatctcgcatac

SEQ ID NO: 161682 - DNA, 211 bp, Arabidopsis thaliana landsberg
gacggcgtgctttcactttacttatatctttcctctattccactttcttaattcaaatacaaaattgtcttaaataataatcgtaaatcattgaaaactctttaataaattgtataagaaaataacaatagtagaaataaacccaaggttcccaaaatacaccataagccagacggacttgagtgactacacacgattctcaccgtgacct

SEQ ID NO: 161683 - DNA, 66 bp, Arabidopsis thaliana landsberg
cggttctcgtcctctcagtttatggcaggatgttccaattcttgtgattgtaagcatgcttgcata

SEQ ID NO: 161684 - DNA, 751 bp, Arabidopsis thaliana landsberg
gcgataaaaaggacaagactggaaaaaaagatgccagtaaggatgataaaggcaacccttgaaagagagtgagaattggcaatccatgttttaggtaacgtctaaatctcttggaaccattggggtttacaagtcttactagctcacgaacttagccacttgggatatcgtgtaacccgcaggtcatgatttaagagacagtgaaagctgagaaaaggaagggaccgtttcaaagtgatcttctgtggataactttgtgaacaaggttttcttaatagatccttttttcgtgagttgtatattattccaaactgatccataaatccatccaatcctcatcccccaaaaagaaaatagtataaacatagaaaaacgaaaacatatcagactttgggcttttcgtatggtttagtttttggctttttgctgtgttgttctatttcagaaagtaaacatgtgaaacggttcatttgtaattcatgaaaggattctttatgttactgctgttgcttcattgagtagatacgaatcgagaatgccttttttccttgtttccgacaattatcgattgacgtgtgaccactttaaaagtttaaacagctcgactttccaatatgggtttatttcttgttttatccacaccattaaagaatggtttttgggatttttatttttgtgatgattaatcatttttccaaattttattttgtatataataaatgaagcaaattttggaaaactatccaatgga

SEQ ID NO: 161685 - DNA, 251 bp, Arabidopsis thaliana landsberg
tacaagatcagaaccgatttttataagttaaccgtccatgtaagaccaactactagatggactaaccggactaatcaagaaaacgaaaaaactagccggtttagcccatcacaccatctcaacatcccagtccatatatatatatacagccaaagttagctagggagccagcttctcggcactcttgactgctcctacaaagaaataaaatctccataacatgaccttgtcctgaagaaaacagagtttgg

SEQ ID NO: 161686 - DNA, 183 bp, Arabidopsis thaliana landsberg
ggccttatatatagtcaagcaagatgattacattgggtaagctttggagcccaaaacaaattttaggctttttcaaaacaacccttcatatctccgttcttagatgcaatcatcaggctcctaaagaagtaaggtgataaaaaccaaaattcaaaaaaacgaatcaagaatatgcctcatagg

SEQ ID NO: 161687 - DNA, 166 bp, Arabidopsis thaliana landsberg
ttatgcatgtcagacactcgtttgtccgtactaagcttttgtattgtactgtataagctctacaaaacacactcgtatgtataaatatatgtaggtatttagcaatagtcagcatgtagctgaaaactggttgggagagatatattattaagagccccttaaagaa

SEQ ID NO: 161688 - DNA, 152 bp, Arabidopsis thaliana landsberg
acaacaaaaaaaaacagaacacaaacaaaaacacattgtaacattagtttaagcattaagcttctttatgtcgaataataataattctccgaccaccgtgaatcaagaaacgacgacgtcttgtgaagtctcaatcacattgcctactgatc

SEQ ID NO: 161689 - DNA, 261 bp, Arabidopsis thaliana landsberg
  unsure (1)..(261): unsure at all n locations
aatgtaaaatattattaatatcaatatgcaaataatgttacaaaatacatttattatttgcaatgcgactgacaacagaaaataaattttatctttttaccaaacaaaattaatagtatattacaatataaatgtgcatttaggatgtccccgtaagcgaagcttgtaattcttccaatgattgtcctttggtttccggtacgagcatccaaataaaaatgaatgacattcctccgacagccgcaaatatgtaaaatgttn

SEQ ID NO: 161690 - DNA, 471 bp, Arabidopsis thaliana landsberg
  unsure (1)..(471): unsure at all n locations
ggtttcaagggatataatttcgcttgatcgtaaagacaaatcatcaatgtgttttacataacaaaacaactgtaaggaattctgtttacattcaataggcaagttgtacaagctcatgagtattcttggttccctaccctctttgatatctaagtcaaccacatctactcatatgcatatgcctgcacacatagatatatgtattgtatcttcaatgtaacagtatatatatatacacctgnnnnnnnnnnnnnnnnnnnnnnnnnnnnnnacgaaatggtcttgcacaagcatttgctcttcttgcttgtctagtgacctttgcactgctttgtagaactcaatccaagaagatgagtatgaatccatggcgccaaacatgaaagttggattgggacttgcagggcaagcggtgaccatatccaaaacagaagtggcaggtttgagctggtgagggaagttgaaggccaa

SEQ ID NO: 161691 - DNA, 131 bp, Arabidopsis thaliana landsberg
tatgaaccacaattaaaatccaatcccacaaaagtttattgagcataattttgcataagacatttacacaaaacacaacaagggccattatcaagcctgtggtttataagagaagccgtcacaattgcctt

SEQ ID NO: 161692 - DNA, 348 bp, Arabidopsis thaliana landsberg
atctatcaactctgacaaagtagggtgtatgcatcaaacatatttttactcattgacttgattaatcaaattcatgccttgcatagatttacacatatgttcaaaaaaggaaacaaaacacaacaaaattatgtctacatttcctaaaacttaaagactacaattcatctttagcagacccatcctttggtttcaactcttcgttgataaaaacagccatgtccttcgcgctcaatttcgttgatagctttagctgcaaatgaaaaacgggtaagatacactacggacaaagcttataagcaaaaacagaagtaatgatgtctaaaagggattgagctagtgagctct

SEQ ID NO: 161693 - DNA, 141 bp, Arabidopsis thaliana landsberg; identical to SEQ ID NO: 2712

SEQ ID NO: 161694 - DNA, 82 bp, Arabidopsis thaliana landsberg
  unsure (1)..(82): unsure at all n locations
atcttctctgagtctctctgacactctcaccaacctaatttctcacaaaaacctaanaagttatcgcccatggattcagatt

SEQ ID NO: 161695 - DNA, 1169 bp, Arabidopsis thaliana landsberg
gaaacgagttcggtttgagttgaagctttgcaggagctttcatgactcatggatttaggtcctggttgaaggagaaccaagttagagcttaagagcatgtggtcgcagttgagataataagtttgtctaaatgagccagaaggaaaagtgtgttgtcatcttcaattaggctaaggtgagggtggtatttgcgaagcatggtatctttttcttttgttatgcttcttgacgcatgatatgtaggcttagatctgaatgcataggataagattatgtgatgatatgatttgatgattgttgagtatgatgtttgataatgtaaagttatgtatgatattataagtatatgtctgttaagtatgaccatgagtatgtatgcattatgcatgtacccctgggccgtatccattgatgtccggggtctccctagtgatgtggacagtgatggactgaccggttaacagctgttcaaaaacagctgacgagcccggaatgggagtgtctgagccacgagggccagcctccacttatgaggttctagtcatcacttatgaggatgactggacctaatgatgtgtatgtttatattaatatatatatatataagatgattggtatgaatgtgttactagaagttaaagcatgttaagttgattgcgtgtgtctaagtttatatgttatgatgatgatcgtatagctttggaaagagtgttatgtttcagtgggcagagttgattcccctcactgagtattctttactcaccctttctttttcctttttttcctcaggttagtaagcgtgaggagttatgtgcaatattttgttcgtgtgtgaagtttaaagaaaacgttttggcaagatcagatgaataacatgccgtcttagtctatatggcgggacgggtgttacacgtagcatgatcttgttgtttcgagacattatttttttcatgtgttttggttactttcgtaagtactacgatgaacaagtgcttttggtaaaatggacaactgtttatggccaaatctaagtggatgattctgaaagggtttagagaaccttaattctattatggtgcagccggttgtgatggttccgtaagcctgcaataagtcttgatgattttcagttagccgataatacatatgatcttcaccaagcacataca

SEQ ID NO: 161696 - DNA, 416 bp, Arabidopsis thaliana landsberg
aacatagaagaaacatcacataaatatttctaaaatgttacttaacactttgggttataatatttagttgcgtttcatagtctcctcaccgaatatgcacatagaacctagctagataaggtgtgtcctcctaagggacacaaaactagcaaaacagcattccataaagtttggaaggatttttttttcagacagaagggaaatatttgttgaggttgaaaggaagagcatagaactcttctgttctcgggtcgttcttgaaagtccagaatctgtcccaccagtgtttacctcggtctttcctgatcgaaccatctttcttgtgaagcgtcgtgtccaacaagtaagccacacatcctcccacaaaggccttggactagaagggcacattgaccatgtcgttgaaccatcttgcc

SEQ ID NO: 161697 - DNA, 142 bp, Arabidopsis thaliana landsberg
tgtgatgataacaatcaagatgtgatcagaagtcactaagtcaagccaagcaataacaggttttggtgtgttctagcagtcctaagtgaacatgcatcaaacagaaagagtaaaacactcgaccaacacagctcgatgcaga

SEQ ID NO: 161698 - DNA, 315 bp, Arabidopsis thaliana landsberg
aataatgcaagttcaagaataagcaaacaacaatagagtcatatttcactaaaatgatgcatgttcactatatatgtatatataagtataatatatatatatatatatttgatattttaatacaattattaatttatgatattaatgggaccatatgtttacataggattttcaaaaaaattattatcttattaatttatcgatttgtatcactttttacactgtcccaacttgggaccgaaagaatttattaatttatagaggttattaatttatcgagtattaatttataaaagttttactgtatatagtatc

SEQ ID NO: 161699 - DNA, 309 bp, Arabidopsis thaliana landsberg
aaaaggaaaaaaaaaagaagagggagtttaaaagggggaacaaattccctccaaatgattgggccataaaccagagacaaggctcaagccaactctgcttctatctatctctcactctactcataaaaatctccatatacgcttcttcttcgttctctgatttgttggtgcgcttctccgtcatcgttcgccgatcatagtcgatcccgccgcttccaggttagtcgtttattctcgtctgccttcgatctcctaatctcatcgtgttccgttagattcgctgattttgattcgtttaagctgtttctc

SEQ ID NO: 161700 - DNA, 192 bp, Arabidopsis thaliana landsberg
ttgagccttaacttctcaacaagtcacaaaatagcaatatcatgaaatactaaacatccgtcacttaggtggtttatgaatcctctctttttacaaaccggccctgaaaaaaaaaccaatgacttattattaattatcagcaactccacgtatcaaccaattctagttctctcagcgagttcaatcatttta

SEQ ID NO: 161701 - DNA, 389 bp, Arabidopsis thaliana landsberg
tttagtttaactcaaatataagcttatgagtcacccattcgtgttcgggtagaacccgtttgggtttgggattaatgggtatatgatttactacccaatagaataattctaaatattccgttctggtttggatcggatccagttgggtttgggtcagtttgaataaaaagttttagacccaaaaaaatagaaacaggaaatttgtatttagatagcgggtcttcaaacaaaaaaaacttttacatttgttaagttttaataaatttaattatatttgaatatattttactaaattttgacaaacataacaaataatttttgaatagtttagttgttttggatatttaggtccaaaattaattgacatatttagatttataattataatc

SEQ ID NO: 161702 - DNA, 107 bp, Arabidopsis thaliana landsberg
aagaattacactaatggccccaaactttaaatttataaacatttcatgtcaatagaaaataattgaataatgagatccaaaacggaagaaattggagacggagctaa

SEQ ID NO: 161703 - DNA, 461 bp, Arabidopsis thaliana landsberg
cctgcatgctatgtagcatctttaagcttttatgtcacaattggggcagtatgagtaattcaagagcatatgtccaatcagagacgggtataaaaagcaagatcaatgtctaaagtagttagcttcaagagcagagtatccgagtatcaaggacagaccatcatagtgtagaaataaagcttatccatatgattacacactcttttgtcacataatccctcacgtgagcgcacgattcacatccttcatatgtgcctctttttaacacagatcactcacagtatgttctgtcctcactagcagtccttctttgacaagaggtgtatgtacaatggcgttcttcttcggtttcagagaacctcccttaggcatcctccatgcctgcagattcataagacgaaggcctcatgtctgacgaagcagtatgtctcataaatagtcgagagatttcggttttggct

SEQ ID NO: 161704 - DNA, 136 bp, Arabidopsis thaliana landsberg
tcgataggacatgggtaagtttcatactttataatacaaaaagacacataaatactgcaaatataagtacatacccttattatgaagactacagaacatatacaaagattctgaacatatattatacacgcatatt

SEQ ID NO: 161705 - DNA, 328 bp, Arabidopsis thaliana landsberg
gaactctctgagaaacaaattaaaaaattacaatgggtctcattgtctcaaaggtagatttcgaataagcatgtatggtctacactacacattcacttgcatgagtccaaaaagccataactttagtcttcttctgaaatagttgcttcctaataatttaaaaaatattggatgcattggctgcatgtgacttcaaaatatttgtatgtatattttgaaaagagatatagaacaaaacttggacaaaactacaatactagtacgaaaaataaagacactgcacatctaaacacaaacaatcatattgcgtttatatgttcaccgttgt

SEQ ID NO: 161706 - DNA, 371 bp, Arabidopsis thaliana landsberg
cacgaaactgcgaataactcaaccaattttaatccaaatccaattctgtaaactggagaataacgataaaggatttgggaataactctaccaaatttcgttagcttttaccacgatttgatatgacgaaaatgatttctcccaaaccctaacgattctgctctttctctttttctctctttttctcctttataaaacgaaaagtggctaaccaaagccctaatttcgagtttccttcttttataggcacactctagggtttccaattaacccaaccaattaaaccggacgatttaaaaaacaaaccctaaccgattttccggttcacgagcgttacacatccactctataagaattatcaaaccccaggcc

SEQ ID NO: 161707 - DNA, 207 bp, Arabidopsis thaliana landsberg
tgctttcaatatttaatgctttcttatgatttctttgttgagttgcatttgactgagaactctcgtgagatgcttcacatacttacaaagtctcagtctgcgcgcatggaatggtattgtatatcagaagaccattcaatatggagatgctgtagtaattgtcgcgtaggcttctttcttatgcttgtgtcttttctatattgatgt

SEQ ID NO: 161708 - DNA, 354 bp, Arabidopsis thaliana landsberg
gactggtgtaacttgagggtctctgttgcggtgacacttagatttggttattaaacttgttgtctagggataatttattgagcatgtcaatcacctgtaaactgaggaaacgaaactactcaattacccatcctcgagaattcctcatctaattgatttatttgtttactatgctattgtctactgcatcttgttacatgttgcttagtttttgcatttctctcctgttatcactctgatactcgaccatacccagttgtggtaacagactgtgcagtcgagtatctttgtcactgtctttgctgtttactcgacctgtcactcgaccacacccagtgcttggtaacaagctgt

SEQ ID NO: 161709 - DNA, 160 bp, Arabidopsis thaliana landsberg
aggaagtggagtgaaccggtccgcgtctgaaccgagcgtgaccagtacggttaaggagagaaatgacggttttgaatttagaaacggtgaagtcagtgatctcggagcagtcaacgttatgttgttgttcgggaaggttagagaggacacggatcagatg

SEQ ID NO: 161710 - DNA, 111 bp, Arabidopsis thaliana landsberg
attaagcaaagatatctgataaacttataagcgatagtagaacaaagtaactcatagatgcatcagcacagaaacataatgaaatgaggtcaatgtcgagacatcgattac

SEQ ID NO: 161711 - DNA, 623 bp, Arabidopsis thaliana landsberg
tctctccatgttttctttccactgcctctgatatcctcctcttcatcgtcgtcttcatcatcgtactcatacaactctctactccggacgccattcttacccgacccggaacctggacccgaatgataattatggtacggaacaacagtagccttccctaagacgtggtgcctgggtcccaatggaccgcctaggatactccgaaccggaagcaggaagtagaactccttgtcaccaatctgcaaaaggtcctgtgaatcgagcttgacgttggggttcccagggagatggaggacaccttcaacgaagcagccatttttgccaagtacctcgagagagaagcgtcgtctagtgaagtcatagaagatccgagcgtggttgcgagaaatgttcatcccaccgccgagagatgagaggtcgacgtcgacggtcgatttcttagaattccggccgagaataatggagtaagactgcatatagtactcgaaatcctcaccttggagctgcgcagggccaacctatacatcgctcccgcttccaacggctgtagccatgccgtgaaatttctccgattttgaagtcggagatcaaatttggggttacatagtaatagaatgtgtatg

SEQ ID NO: 161712 - DNA, 544 bp, Arabidopsis thaliana landsberg
acctcgctctaggagcaaaatcagaaacagaaatcctttgagttgactaccttgtttcctttcgatttccagagcaagacattcgtttaggtccatcaccacgtgtggcatcgtcggtctacgtcttgaagacggttagacgggtttacacaacctaaagccaactctacaaccttccacacaccgtttgtgtcatagtcatctcagttttatacaaaagaaattatagagtgtagatagtttattcaataaatacattggaagttcggaagatattctctcaatttatctggctccaggggaaaattcggaagcagaagagcgactaaagtcaacataaccacttgtgtgcatctcttcactaccttgtcgccttgcattttctaaggccacacattcgtttagctcagtcacgacgtgtgccattgttggtctccggtttgaagacgggttcacacatgcaagagccagctcaacaatcttccaggcaccgtttgtgtcatagtcccccatcagttttgggtcaaggatgctcttgatgtcc

SEQ ID NO: 161713 - DNA, 192 bp, Arabidopsis thaliana landsberg
aaaaagcgtacgggataggagttggagagatttcatcacatcatagaacataatacattacatagcgtagatttagggaatggtacaagaacgttttaaactgccttaaccggtgttttgtagaccagcagcaatacccttcatcgtcaagatgagtgtatcttcaagtcctggcgcgtattcgctagtcgg

SEQ ID NO: 161714 - DNA, 371 bp, Arabidopsis thaliana landsberg
gaaagacttctttttcgttttgcttgtgaatgtgttgttgggattagattcgattcttaaccatcggtctcgttcatttcgacttcacttttcgtcctctttcttcttcagattatgtatgtatgtcgctagtagacatggatccatcaaatctctgagacacctgagcttgatgaatagccatagacaaagctcttcgatgcaaattctcttcaacattaattaacttcctctgtgaacgattcattctcttgcttctggatcaatctcctccacttctgataacaacatctttcttcttcatgcagattaccctgttacccattattcacaaaaccctgaattttgcccaaagtgattccatcattgct

SEQ ID NO: 161715 - DNA, 389 bp, Arabidopsis thaliana landsberg
tatattaccacactttacattgatacattcttccttttgtccaaaaacatatatacaaaatactggaactgttttttatcaagttccaaattacaaacatatcgttttagcttttgataaaaagaaaacatggtattgattttagctgtgtaaatagagagatatagtttcaatagttcaatgaaggatatagataatcccatgttgttgttgatacctgttttcagacacggtacagcttaataacctgatcgatcttggctcgacagacgggacatccccaattcttggatttgatctccttcaagcaagacatacatcccgcgacatgtccacacgggacacagactgcttcagatggagcatcgagacatatcgcacacgttcca

SEQ ID NO: 161716 - DNA, 146 bp, Arabidopsis thaliana landsberg
  unsure (1)..(146): unsure at all n locations
ggggggggggggggggggnggggggggggggggggggaggggggggggtggggggggggaggggggggggggagacggcaaaagaaaagagggggtggggagggggggggggggggggggagggggggggggaggggggggggggg

SEQ ID NO: 161717 - DNA, 207 bp, Arabidopsis thaliana landsberg
taattttgggtcacttacggaaaacggtttcggttagctggagatcaacatccaatccgaattcattgttaaataacttttatccttacggaaaacggatcggttagctggagatcaacatcctcctagagactgaatgatctgacaatttcctcagcgtgtccatgttcatggagctcaacaagtattttctttaacctgcgggcg

SEQ ID NO: 161718 - DNA, 158 bp, Arabidopsis thaliana landsberg
attagacgaacggcttttcgcaacagctcctcgactgatttcaataaggtcacaagcccttcttctcatctctttgcgttgttcactctctctatccataaacctcttcaatacttccttgatctcctctctccctatcagcaagtcattctttttcg

SEQ ID NO: 161719 - DNA, 210 bp, Arabidopsis thaliana landsberg
atagcttattctcagtttacggtatgtagttctcttctcccattatctacacttagagttatgacttatgaccaataataatgtggctgaaatgtatgcccattagatatctatcatgatctgatatctaggagggtccattccacgcatgctgagaagttcgcagagatctgtccttgctgtaccggttgtggctggggtgtcatctgg

SEQ ID NO: 161720 - DNA, 290 bp, Arabidopsis thaliana landsberg
aatacacccatcaatccacatccatactatggtatgctacgatcaaatcttactcctaaactactagaatgtatgtagattcatgatcagctgtttctgttttgttttggggttttttaaaacaggcccagcctcaattgattcagcactttctaaagatactttatcaggtaactctctcgctcaaggcatttattcaatttacaatgcttctccggtttcttttccttaaagctaaggaccagtacctgacattttcttggttcaagtaaagtttttttttgttcact

SEQ ID NO: 161721 - DNA, 222 bp, Arabidopsis thaliana landsberg
gccaaagaaaaagaaaaaaaggttgaagctttcacacaaagtctcacacacaagccgccttattttttttttcggtgattcttcagagagaaacaagccggaagtagtaaggataactcgcctccggtgaaatctcagccgttggatcagatcggtggacggtggataaaacatgcctgtggagaagagagagtctgggttaaatgattaagatattccttg

SEQ ID NO: 161722 - DNA, 117 bp, Arabidopsis thaliana landsberg
catctaccaatacctcttcctctgggtctgagaatgccacacgtgcaaataaaaagaagagtaacagaagaaagggttagatcaagtttcaaactccattttctagaaccaaatccc

SEQ ID NO: 161723 - DNA, 193 bp, Arabidopsis thaliana landsberg
atttttttaacaggacgggtttggtagaacgggtttggaaggatgttacttaataacaattgtaaactataaaatataaatattttataaaataaatataatttagataaatataatttacagacttttatatatactaatttaaaaaaaaaaattgtctacgcagtgtaccgcgggttataatctagtatgt

SEQ ID NO: 161724 - DNA, 340 bp, Arabidopsis thaliana landsberg
acacactttaatacatagcataacttaagatacacgcaacccaaaagcaaataatcttggttccaatgcttgagatcaaccatcgatcgttccagagttctatcaaacctttccttcgattcttgcgtgagtaaggccgacacaggcatcaacgaaatctccttcaatgaaatcagtggacaaaatctgcaacttatctccacatcccttggaaacacactgagaaataaatagtctggcgtgttttcggatccgatcagtcaccggtttaacccacacaaccggattatctgcttgcggcgtgaccgtgttctcaacccggtaaaagaattttctagaa

SEQ ID NO: 161725 - DNA, 250 bp, Arabidopsis thaliana landsberg
aacaatccgtcgtagtctagctggttaggatactcggctctcacccgagagacccgggttcgagtcccggcgacggagtttattttttctttttttctgaaacgatctcaaagctaaaaaactatttctctgctgtttattcataatttctttccattgtcacgtttactatatgattcaattagggttttgacgaagcaacgagcttcattacatagacaatttgaggcatagctaggaggaagaagat

SEQ ID NO: 161726 - DNA, 562 bp, Arabidopsis thaliana landsberg
ggtcacaattggctatcaggacaacttcccaagcatctgatcaaatgcactgacctcgagtttctgaacgtggaagataacagaatcaatgacaaatttccattttggttgagatcgttgtccaatctacagattcttgtccttcgttctaacgagttctatgggccaatattttctcttgaagattatttgagtttccccaagttgcgaatctttgatatttcggaaaatcgcttcactggagtcttgccatcagattactttgcgggttggagtgcaatgtcatcagtcgtagacatttttgatactacgcctcaggttcacattttaggagttttccagggatactatcataactctgtggttctgacgaacaaaggattaaatatggagctggttgggagtggtttcacaatctacaaaaccattgatgtctccggaaacagactcgaaggagatattccagaatcgattggtatactcaaggaactgattgtgctcaacatgtcaaacaacgctttcacaggccatattccaccatctctatcaaacttgagcaatc

SEQ ID NO: 161727 - DNA, 110 bp, Arabidopsis thaliana landsberg
ccacaagcggctagcaattgtgatttctggtaaaaaaaaaattcgagttccaaaacatgctgaaaatctcggtgaattagttgtgtcactagtgttgatcatcaatactt

SEQ ID NO: 161728 - DNA, 125 bp, Arabidopsis thaliana landsberg
gggggggggggggagggggggggggggggggggggggggggggggggggggggggggggggggggggggggggggggggaggaggggggggggggggggggggggggggaggggggggggggggg

SEQ ID NO: 161729 - DNA, 149 bp, Arabidopsis thaliana landsberg
atgcatgatgtcgagtctacaaaagttcacctggacagaatatttaggaagaccaaaagacagagatattgcggtttacatcttgaaaaacgcttgtcgcttaaggactgcaacaatcgattctgatacacgtttgtttacaaaactcg

SEQ ID NO: 161730 - DNA, 321 bp, Arabidopsis thaliana landsberg
attgtttcaacatttttcttggatatatattttttttttggtaagtacatttttcttgtataaattctatttgtttctatagtctcaagtataatttagattcatgttaaacaaataaaaaaaattgtcgtcttctatttaaattacgatcgttattatttattactttcattcattttattataataaagctgaatatatttttaatggtaaatttttttgtttttagcaaaggattgtaaattaatatatcgccaacatgtaatatgcgagattgaatttttatggtaacaaaaaaacaatgctaatacaaaatcaaat

SEQ ID NO: 161731 - DNA, 431 bp, Arabidopsis thaliana landsberg
  unsure (1)..(431): unsure at all n locations
caaagtacatacaagatgtgtggaaggctggagttcgtgtgaagacagagaaggagagtgggattgccaagagagaggagattgagtttagcattaaggaagtgatggaaggagagaggagcaaagagatgaagaagaacgtgaagaaatggagagacttggctgtcaagtcactcaatgaaggaggttctacggatactaacattgatacatttgtatcaagggttcagagcaaataggtaactcacatacagtagcaaaggtccttctataatatcttgttttgtacgtctttcattcagcataatcttttgttgacttttcnnnnnnnnnnnnnnnnnnnnnnnnnnnngctttttgttggatgttcaaatccccattttgcttcttggtgacaattataataataaaaacaatgcaattttaccacc

SEQ ID NO: 161732 - DNA, 453 bp, Arabidopsis thaliana landsberg
tgttccgtttaataaacatgcgatgattattatttcttagaacagagaatcactgaaacaggtttgaaaagagaggatgttatatctgtgaatagaaaagacaaagacaaagtggaggaatcagaactcagccacggttattgctctgttgagagtctattggaaatttggctttattatgatagagagcaatcagaaatagataaaattggcttttagtaattaatgtttctagggatgatgattcaaatttattacaatagctgaatacagatcaacaacaacacatcaaattgattcaagatgttcttaataaatcataagaatttaacaaaagcctgcataaccgtaaccgtaaagttcattctgcattaactgattcaaccaggggttcttcacagattcttctaccgccgagtaatgttgtgtgtttgagacgcaaggattttgaaa

SEQ ID NO: 161733 - DNA, 287 bp, Arabidopsis thaliana landsberg
aggaaactataagagcaaaaacaattaatgtggagaaatatgaggcaaagaagatactggataatgtatttaccatttaacttacatggatatcttacaatgcttatatcttccttgcttaaccgataaattacggtcaggtttgaaataaaactttgtttgaaaatttggattgaattatcttctttttggactacaggaaatacaaggataataacgatccagtttgttgttaatttgtcataaatggggtttacattaatatagcaacaaaaatcaattctgtg

SEQ ID NO: 161734 - DNA, 368 bp, Arabidopsis thaliana landsberg
ctcaaaatcttatacctaaaacatagataaaatcaataaaaatcgggttatatcaactcccccagacttagcttttgcttgccctcaagcaaaacacaaaagccgaacccgtggaaaaggttttgaaaacaaaggaactcccaacattctctagcctattaccatgatcattcaaactaagtccatatgcctaacaagtttaatcaaatcctaaccaacatgtacttctctacaagcttacacaacattctagattccatgcctaagttccacaactatacccaccaggctttcatcgctgggtctcatcaaacaagccaacattcaagatccttctaaactcattcttgtacaataccatgataaat

SEQ ID NO: 161735 - DNA, 421 bp, Arabidopsis thaliana landsberg
aacttcggtttgaaactgcagttccccacccttggtacgttcttcttttagccttttcacggccactagagtgccatcagctaaacgtcctttatacactttaccaaaaccacctctacccaatacatttttattgctaaagttatccgtagcaactaatagttcacgcaaggtaaaccttttgagttgtcctaaatgaacctctgggtcttcttccgctgcaaaatttggtccaccaaaacagataaaaatcagcaaaagaagcttcaatgggaaaatagatgaagagagttgactaaccaggtacatcaaaaaagtggtcctgtggttttcttttgagccaccaaacaaacgcaatggctggacagcaaaaagaagtgctgcacctgcagcaactccccctgctattgctgcagtcatt

SEQ ID NO: 161736 - DNA, 739 bp, Arabidopsis thaliana landsberg
cggtactctcctctcaagaaagcttggtcggatatctacacaccggtctttgatcagatgaaaatcgacataaggatgaatcttacattttgatgcccctaattagttttgactttttgttcattttatcacatgaccaatcataatgggccgtagcagtttaattcgggtcagtaagttgggtcatgattcgggtcggatacttattcccgttctatagtataaacctagattccaatttcgcttgatttccgatgaattgatcgactgggaaacagagaaccaccgtttctacagttggatatggctggtgggcaaatagagaagctagtcaaatacaagagcactgtcaaggatccaggaactcctggatttctcagaattgtatgaagattacacttttcgctcttatttgagttatattatctctcagcttaactgtttcttttgcaaaatcgaaaaatttgcagagagaagggatgttgctcttcgtccctaatgatcccaaatcagattctaagctcaaagtacttactcagaacatcaaaagtattgtttgtaccttttctcattaacattgcttattggataatagatgttgtgttgataaacgatttcagttatgatgatagctgcatagtcattatcaaatttcactgtgtttgttcaatctctcaggtcaaaaatataccaaagaaggatcaaataaacctccgtggctcaatctcaccaacaagcc

SEQ ID NO: 161737 - DNA, 462 bp, Arabidopsis thaliana landsberg
agcagacctattagggatgaaaatcatctgagaaatgactattcgaagaaaacgaatgccacggtgcatcaaaacactgctttaacaagctaactgcattttgtactcgcactataaacagtactcatcgaaacgatacttggatacttgagatgatcaacatcagattctttcgaatcattttgcatcatcaggtttttggccaccagctacgctactggaagaactgtggtatcgtacgctcgaagaagatgaacacttgtagagtgagagctttcttctattgagttgttgttgttgtttctcttacatctctttgtcttctctggcctttgcaatgtatccttcaaaatacaatttcgcaaataactgtgaagataataaatccgaaaatttttggagatctctagcttctagttttaagtctctctaccttatcagaagtagatccaggggttttta

SEQ ID NO: 161738 - DNA, 552 bp, Arabidopsis thaliana landsberg
catgaaatcgaatgaatttaattgtgatacacaattcaagccaaattgaattcagaatttaacaacaacatgtaaattaagatttaaagaaccagtgtatgaatagatattaatgtgaaagcctcgagtgggtcatgaaaatgaaatgtcacggtggatggtgccctagccgaagttcaagatcaagctcatccactgatgttcctgtcgcttctttcatcgagccaatgctctcatcatctcctgtcgaatattcaataagccgaggaggaacttctactggagaattcaacattgaaaacggaaggttgctcggaggaaacgaagtcgtaccataaagattcaccatgtcaccagaattaccaaaaatgccactagggttttgcagttggtagaaatgggacaaaccttcaatgttactcgccgtggattgtattataagtgtcgttgtaggcaacggcggagcacaagaattgagtaacatccccccgtggccgcttctagccgcagccgcaacggtggaaccttgatgagccctagatgaggcgcggt

SEQ ID NO: 161739 - DNA, 138 bp, Arabidopsis thaliana landsberg
tatcactaacaatcaagatgtgattagaagtaactaagtcaagccaagcaataacatgttttggtgtgttctagcagtcctaagtgaacatgcagaaaacagaaaatcaagcagaaacaataaaacactcgaccaaca

SEQ ID NO: 161740 - DNA, 258 bp, Arabidopsis thaliana landsberg
ggaaaaaaagttccaactttgaaaagagatggtaattcaacccaactgtatacaattttctgtaatattaccctctaagtttatagaatcagttttgtcttagggttagtcctcaagcctgatctaaagatgagaaaaattacagatgactttggttatatgagaaacataatctggtgtattacctgcacaataaatctcgaattttcctccgtcccagctagtctggtagtatcaacctctccatgtaagcctgta

SEQ ID NO: 161741 - DNA, 128 bp, Arabidopsis thaliana landsberg
agggattggcttgaaaagatggatttggctttaacaattttattcgaaattgcctacttagttagagatcgctaatgagaattagatcagtgtctaagcttggcttgaggatttctatcacaggagtg

SEQ ID NO: 161742 - DNA, 138 bp, Arabidopsis thaliana landsberg
ttcagaaatcaatttcatattaatattaacggtacagtcttccccggttcggtttaaaaccatggggtggattctctataaaaatggttgtttattatagagaggatgaagcttatgaagaaccttttcctcaagtca

SEQ ID NO: 161743 - DNA, 234 bp, Arabidopsis thaliana landsberg
aaaaaaaaaaaaaaaaagaaaaaaaaaaaaaaaaaaaaaaaaaaaaaaaaaacgaaaaaaaaataaaaaaaaaaaaaaaaaaagaaacaaaaaaaaaaaaaaaaaaagagaaagaaaaaagaaaaaagcaaaggaaaaaaaaaaaaaaaaaacgaaaaaaaaaaaacagaaaaaaaaagaaaaaattaaaaaaaaaataaaataataaataaaaaaaaagaagaaaaaaaaaat

SEQ ID NO: 161744 - DNA, 106 bp, Arabidopsis thaliana landsberg
gatgggaccgttgatgatgcatgcaaaaagggccaaacttactaggtccatcaaggcgccaagctccttttgtatgtccccaggaatattattggtaataagattc

SEQ ID NO: 161745 - DNA, 118 bp, Arabidopsis thaliana landsberg
tgcctttatcgcccaaatcagggatcgtgatggcagcatctgtccaaatatccgcgttgctgactgtggacgctaaatagataaaaatggtgttcacaatggccggcttgtggtataa

SEQ ID NO: 161746 - DNA, 446 bp, Arabidopsis thaliana landsberg
aaccttgcaaccgtgaaaggcttccagtcccacttcccccttccccacttaagctgcggaatgaaggaggaccatcagatccgacagtaaagttgcttgtaggagcagctttggtagcttcttctgtttcccatgaaaccccttcaacatccttttcaataaacttgctgttattctccatgctaacaatcttctccacaggactcattggttcaattttcgccatctttgtttcaacaatcagatccttatcactgacctcattaaccactgttgactgcaatacagactgttcctttacatcagagtcttccttaagactactaacttgagaggtagagtactttacatccaactctctttcctctggagggctcgaacggatttcttgatccgtcattagaatgttctctggcaaatcatagaccgagctagtaacagacgta

SEQ ID NO: 161747 - DNA, 478 bp, Arabidopsis thaliana landsberg
aaatagcttctttcattctcttacaaaagctttacaatcaaataaaagttaaccaaagatataaaaatggaagtctcaatacatatactgcttcttcaccgatctgtgtcatacctacaaaacttaatagcagtaaaagttttgattgcaaagacctaatgaataaaaaagcaacactggtaatttcaatgcagtttgatcgaagatttcagtcgtcactaagagaattaccagtcaccatcttcatggattcttcatcttcttcttgtgcctctgcttcttcttctgcattggtgttttgactttcagcctctatgggctcacactgcttgttcaatgcattttcagattcttgctcctcttgtttctcatctgaatgaagcggggttcgttcagactcaactttctcatcagtttctggatctaagtctccatcttgattaatagtttctggttcagagctttggctctctagcga

SEQ ID NO: 161748 - DNA, 190 bp, Arabidopsis thaliana landsberg
aacaaaacaaaatcaagaaaatttaaaggcaagatagtttttgcatacatcaagtttaaagttagcatcataaaaattagcaatcaagcttaagttgtttgagatttattataataccgtgtgaatataacatagtaataatatttaaaggcgaggtccatgagatgttcaagttcacccagagccaagg

SEQ ID NO: 161749 - DNA, 224 bp, Arabidopsis thaliana landsberg
cttcgactctttttatagtaatgattagaaaaaaaataagaaacaagatctgatttgtaattggaagcaaccaaggtgaaccggaaataagttggtttgccacattgaaccgaaccagatatagcatttatcatcccaacacaaagaaaaaccttaccaagagcaattttgtcacaatagatttgtaattctacactattgttagagagtttttttttataatc

SEQ ID NO: 161750 - DNA, 102 bp, Arabidopsis thaliana landsberg
taatttcccaggtttttggttttaaagattcaaagagacaaaatattcaaagatctaatttacaattcctctgtttcgactctcctttctttgaatcatatc

SEQ ID NO: 161751 - DNA, 251 bp, Arabidopsis thaliana landsberg
cagaaggatatggccacttgtaatgcaactcccaccacgtgagaagcttctgccgtgcttctttaggaagtttacctttctttttcttcttggatagttcttgcttcaaactgcttaagtatccactatacttcttcagcaaatggttcttgagttcccgatcttcggccctcgggtctatttccggtaattctgtttcccctccgctgttattctcttgttcttcgtctgatgatcccatattgtcactc

SEQ ID NO: 161752 - DNA, 215 bp, Arabidopsis thaliana landsberg
ctctattaataagagaagacgagttttgctttcgatactgtctttcaactattccgacacaaccaaagcttctggaaacgttgtcgtttgttatcaataatggctgttgtagaagaaccgatactttcaagattggatcgtattgatttcatggtgaggaagttagaggagatgaaaggaagctcgcctagaagctcgagcccatcgactccatc

SEQ ID NO: 161753 - DNA, 433 bp, Arabidopsis thaliana landsberg
agaagataacggcagaagcaaacaattgtattcaagttatacagaagctgctaatgcaaatttgaacccgttgccatcaccccccacccaatggatcggtacacagccaggtggtaattttgtcggtggatactatagggatggagttgggtacagtgaaacaaatggaaaatcggtaaagaaagtaatttaccaggccaagacacaaccaagtcatcgaggtgcaaacttgtgagatattagttgaggcgcataaggaggttcttctgtacaggtgagttcctttcttttgctgcaatggtcttatgtatggtagcatcatctgccatcagttctcttaaatttctggctaaaggcaaatgtataatgtacctttggacatttcttttgttatatatatacttattacattaaacttgtttagagtccttaa

SEQ ID NO: 161754 - DNA, 147 bp, Arabidopsis thaliana landsberg
catatcataatccattaaccgcacggtccagctcaaaccggaaacaaagccaaatttgattttgccatcggtatgaactcaagaaatacagatagcaataacagtgcaaaggctgaagcgtctttatttgtaacagaagcaaacgaa

SEQ ID NO: 161755 - DNA, 449 bp, Arabidopsis thaliana landsberg
  unsure (1)..(449): unsure at all n locations
atcgctaagctccatgatggtggcttggctcacggtgatttgaccacatcaaatatgttagtcagaagtggaacaaatcaggctgatttaatcagctggtactaatcgattttggcttgagtgtcacatcgaccttgcctgaagacagagctgttgatctaaatatataccttgcctgaagacaaagctgttgatctaaatatataccttgcctgaagacaaagctgttactctnnnnnnnnnnnnnnnnnnnnnnngtgatggatcgtatactgacagcgtataggaactcctcaaagcaatggtccgccacatttaacaagctcgcccaagtgcggcaacgagggagaaagcggactatgattggatgtggccatgagccaagatctccaattgtcctgtccttaaaactttgagcacaaagccacccaaattctgctatatgatcg

SEQ ID NO: 161756 - DNA, 175 bp, Arabidopsis thaliana landsberg
atggagagcaagttgtacaatgcaatgtaaggaagaatctgtctctccaccacgctagtaacgattcccactgtggttcatgcctttatacttgacaccgagtccagagacacacccagtatggcttttgaagtagagacaagtggggattgtccgccccctaagatcggtttgt

SEQ ID NO: 161757 - DNA, 278 bp, Arabidopsis thaliana landsberg
ccaatttaccatgtactagagacattctaagtttttgcaagaaaagttgatctatggaccatatcttcgaatttatccctacattattaaaagggaagtacaaattgaaattttgtctaaatttggcttcaattttgatttcaattttggattttgttctttgctatttaaaatcattaagagtaatttggtcttaacaatctcctaaactttatatgatccgattgaatctaaaccgttcaataaaattaattcccttttaatctaaaccgttcaac

SEQ ID NO: 161758 - DNA, 164 bp, Arabidopsis thaliana landsberg
atttcaatgttaatgttttgactcctattaacggatatatctattgggcaggccttggtatatttcactctggtgtagaaggtaagctttaggcgctcgcttgtgttttcttgttcatatggttgaagtatccaaagatttgcatctttggtgtacttatagtt

SEQ ID NO: 161759 - DNA, 85 bp, Arabidopsis thaliana landsberg
ttttttttgtttctttttttttttttttgttttcttttcttattttttttttttttttttttttttttttttttatttttttttt

SEQ ID NO: 161760 - DNA, 434 bp, Arabidopsis thaliana landsberg; identical to SEQ ID NO: 58327

SEQ ID NO: 161761 - DNA, 231 bp, Arabidopsis thaliana landsberg
cagtgtgctctaaagtgaaaatagaaacaaaggctcgcccctgtgacaacaacgcggctggaccagaaacaaataaacacttgattcataaaccagatgaagcgtcattagaagccgtcggatgacatgcaggttgtattattagacgcaacacgtcctcaccattacttcatggataatgtcttccacaatcctttcccaatggatcacatctcctccaccatgctttga

SEQ ID NO: 161762 - DNA, 373 bp, Arabidopsis thaliana landsberg
gacatacgaaactctatcaagaccagctaaccctaacggctagtaggtgaaaaccagctatactcactaatatcttgcgtactcagttgccctaacggttagtaggtgctaacatggtttcaaaatacaagatcaaagcattaaattcaaatttgattctagtccataagtccctctcactcggcgggcgtgcaagagttatagttctttattcagatgagctagttcaggcaattatacaagattctaccaagtataaaatacctaagatcatgtactaggtggcgttctggacatacatgcattaagattaaactcaactagaaataatagtgtaaacgatcaaaaaaagccatagaaaccgttaacctag

SEQ ID NO: 161763 - DNA, 548 bp, Arabidopsis thaliana landsberg
ttcttggctagacatatttcctttttttgaaaaaatcttctgtgtgcttttgcaattatgcttcagatatatccaaccaagcattggctggtaggatcatcactgccttcgaaatttaatccagctattgtgcaaaaggttctcgatgagctttctcccaataatgttcggtaagtctctgttcctggaatgcatgccttgctgcctactatattctaaatgtcttgtaaactaaataggttttcaccaagctaactttgcattggccatatgatctctattttatgcaaaatttccattggctttttggcggtttactttaagcagccctcagtccccaatgtgttatgttcatacaatttacatgtagttcaagcattgaatcctgactgcttacggcctagtaagcttttcttgttgccgaatctaatgccattatatttgtagaatcttttgggagtcaaataaatttgaagggcaaactgacaaggttgagccatggtataacactgcttattcacttgagaagataaccaaattcaccattc

SEQ ID NO: 161764 - DNA, 207 bp, Arabidopsis thaliana landsberg
gccatcacggtgaacgatctgtgtcttttgacgaatcttttagattattttattttcccttcatacaaagccagtgaggacgaaacttgatcatatcatcacctagagctaaccagagaatcccgcagacttttctgtcatggtttggttttctaaattcattgttcctcctgggcttttttctgctttctttttttttctattttt

SEQ ID NO: 161765 - DNA, 178 bp, Arabidopsis thaliana landsberg
caaaatgtcttaatgattcaatgtggtgaactggtgatattgcagctgcagctccgagagcaatggagaaatcgaagatgagagcttaaaagatggaacatgacaaagctttctaattatacaaaatatgtgcgatctcttttggtggtgtttttaaatttcaaaacatcaatatctc

SEQ ID NO: 161766 - DNA, 129 bp, Arabidopsis thaliana landsberg
ggggggggggggggggggggggggggggggggggggggggggggaggagagggggggggggaggggggggggagggggggggaggggggggggggggaggagggggggggggggggggggggagggggg

SEQ ID NO: 161767 - DNA, 155 bp, Arabidopsis thaliana landsberg
agattgaaacaaccgtaggagagaagatagcaaaagaatggaagagagctttatctctctttttttttttcctttcttttgcgaaaagtagtaatgttctccaacggtcaaattatgatggtcggagagattatataataggaaataggagcggg

SEQ ID NO: 161768 - DNA, 406 bp, Arabidopsis thaliana landsberg
gactaggttaacttgagagtctctgttgcggtggcacttagatttggttaatgaacttgttgtctagggttaatttattgagcatgtcaatgacctgtaaactgagaaaacgaaaccactcaattaccccatcctcgggaattgtttatctgattgacttctttgtttactctactgtagtttactgcatcctgttatctgtcgcttaatttctgcaaatagctgtgttagtcgagtgttttactgtttctgtttgattttctgttttctgcatgttcacttaggactgctagaacacaccaaaacctgttattgcttggcttgacttagtgacttctgatcacatcctgattgttagcatcacacccatttggattgacaacctaaaatagtacaacgatatgat

SEQ ID NO: 161769 - DNA, 299 bp, Arabidopsis thaliana landsberg
cttgtgctatataaattacccctttattattcaaataataatctcacaaaaatataacatattagacatacagaaaagaaattgcctcaaaaaatgaaaaaagttatataaaacgaaccctcaaaaaacgtcaccgtgccttcactatcttctcccaagtcatgtgccttgcttcttttgaatgcatcttaggaaaaccaatccatatgtattatttggttaattaactctaaaatcttttacctctattataataaatcaattataaatagcagtccttgtggtgggtaactatttag

SEQ ID NO: 161770 - DNA, 300 bp, Arabidopsis thaliana landsberg
aaattgcttagaagcagtaaacatatttgttagtatttctatggtcaaaaagtgtcacaatccaatgcatttaactaatcataagaattagggatggagtaggcttttgtagacaacatttatatccattttctcccaaaagagggtaaaaccaacaaaaaactgcttagaagcagccaatagctttgttagtgtctctatcgtcaaactgtgtcataatccaatgaatttcactaataaaatgagttagagatgaattaggagtgtttagacaacacttatacccattttcttccaaaa

SEQ ID NO: 161771 - DNA, 125 bp, Arabidopsis thaliana landsberg
caaatttgaaatagaagatgacaataagacacaattagaaacagtagtggtaaatagaatgtttaaacagagaagaaggaacagaacagagtctctgtcttcaaaaattctgaagacacatcaat

SEQ ID NO: 161772 - DNA, 230 bp, Arabidopsis thaliana landsberg
  unsure (1)..(230): unsure at all n locations
agcatagatgtctggctcttgtccgttaacgtttgtcttttcgacaacgtttgatcggctctcttctgacaccatcttgtttctcttttacggtggtggttggcttgtgtctggcttccgnnnnnnnnnnnnnnnnnnnnnnnctagctaagttctagaaattcaccatatagctctggtgtttcttttagcttttggccagattgtttttggttcaaaattatgctttc

SEQ ID NO: 161773 - DNA, 293 bp, Arabidopsis thaliana landsberg
atatgaactgggttcaacgcaaaatctacctttataatgtcacattcgggctctacatgcttgattggtgggaacgatacctcttcagtatccttttttcctcactctatccctccatgcttcattcgttctctccatcgattttggtttatctgtgctccaatttcgatttaccctttcattagaaagatgcaagttttgatttttacatctttggtgatatatggtggcattgtgttctgttctcttgtgttgtcgtcttaagcattgtgtctgttcaattttagaatttt

SEQ ID NO: 161774 - DNA, 844 bp, Arabidopsis thaliana landsberg
aaacaggttctcgacctgattttgggggctagagtttttatggagacttatgtcgcaatgtcgttgggctctgcgtctggcatcacttgcgtataagcggtggaagctgttttttccgacatcggtggctctgtttaccactgttggctgacacttccagtactgattggcttcttctgcaacggtggctggttacgtctccatcgattcatcctctggcgattcagatggctagtactggcttttgtctggatttgtttttagtctttcattctctcgtttctctttagcttcagttattttgtgtttggaccgatgctttggatttgattgaagttttgttcgtaggtttgaatgaaagcaagccccaaatagcaaaatttccttaacgattgaaaagtttttgattaaagaagaagatgaagaagatttatagatttgtatcaagtggaggagtcatatttgcaacaaatctcaattggaatttcgccttggtttgtttgagcgaagaagatgaataatctttccggcgatttctgcttggaatgaagcttccgacatcacaacaactttccggtgatcggagactccctcctcctcttcaacttcccacgtgtcttccattctctttttcacttgtcacgtgctctttgcgctgttcacgtcacttttccttctggcaaaggaatttatttgggctttgggcttttgttgttttatgggttatgtttgttttttaaattgtaggctttgtttctttggcaatgtaaaattgggtttgttcacttggctttgtaacattaataagacacttgtgccaaaaaaaaaaaaaaaaaaaaaaaaa

SEQ ID NO: 161775 - DNA, 422 bp, Arabidopsis thaliana landsberg
tccgttgtctcgacatcttccgagcaactcagtattaaggaatgggagctgcgcttcaagcttctgagagaaaataggtatgtaattggaacattaagttgcctttttgggttcaaagtttcattggctcatcaagttccttctaatatgagtaacatacgtgatttaaagtgagctgcagagattgcataagcaatttgtggaaagtaaagtactgactgaagatgaattctgggctacaagaaaggttggttctttgtttgatttttttaaaaattttgttctcttcaatgtcttcatagttaccgactttattctggctgcagaaattacttggtaaagattccatcagaaagtcaaaacagcagctcgggcttaagagcatgatggtttctggcatcaaaccatctactgatgggcgg

SEQ ID NO: 161776 - DNA, 192 bp, Arabidopsis thaliana landsberg
tatgtttgttttgacagtggcaaacgagtagtgtttccgagatttttttttttccttcggatttaaccatttgtataatgattttttctccggcttttgatcatacctggctatgtagattgtaatctgccgaaggtttttaaaaaaaaaataagcacgtaaattcaatgatattttacattttagattcca

SEQ ID NO: 161777 - DNA, 132 bp, Arabidopsis thaliana landsberg
  unsure (1)..(132): unsure at all n locations
gagggggggagggggagggggggagggggggggagaggggggagagggggggggggaggggggagagagggaagggaggggggggaagggggggggggagggagggggggggggggaggngggggggggggg

SEQ ID NO: 161778 - DNA, 252 bp, Arabidopsis thaliana landsberg
gggggggcggggggggggggagggggggggaggggggggggggggggggggagggggagccgaggggggcggggggggggggggggggggggggagggggcgggggggggggggggggggggggggggggggggagaagagggagaggggagagggggggggggaggggggggaaaggagggggggggggggggagaggggggggggggagggggggggagggggggggggggggggggggggggagggggg

SEQ ID NO: 161779 - DNA, 112 bp, Arabidopsis thaliana landsberg
  unsure (1)..(112): unsure at all n locations
ggggggggggggggnngggggggggggggggggggggggagggggngggggggggggggggggngggggggggggggggaggggggagngggggggagggggggaggggggg

SEQ ID NO: 161780 - DNA, 187 bp, Arabidopsis thaliana landsberg
agcgtgttggagtaagcaagcgaggggcatatcacagaagcaagctcagaggaaagtgaagaagcggttgaagaagattcttcgaccgccattgattcgatagcgagatcatttcttcgcctttgggagattgttggagaaggaagagtgagatttggtggtggtgtaggttcggcttgagatttga

SEQ ID NO: 161781 - DNA, 367 bp, Arabidopsis thaliana landsberg
caaaaacataaacttgtcatacaaggtatctcaatttcttgatcttgactgttttgtttttcaagatttggctgatgagtcaatacctatcttgagcaatgtagtagccgacggcgagaagtttgtaaccggcgatgttttcgacagcaaggttgatgagagtagcgataagaccagtgaagagaccaacaagacaagctaatgtccattttaagaatatgtattgaaacacttgtgcttttgatctgcttctccagtcatgcttgaacagatcattctcgtttattctgtcaatatttagattaaagattaaaagaagacccctgaattcaaaattatgcagagaagaagaagaagaagaacatac

SEQ ID NO: 161782 - DNA, 185 bp, Arabidopsis thaliana landsberg
ttaattaattaataatattgtacattactaaatatttaattatttgcacttttaatttcttttcatggtttatttgaattaataaacttaaatttacagcttgaacttgttgattgagttaactattatgaaattcaaagtttaaacgacaatgaacgaattttttttgtttcgttacattgata

SEQ ID NO: 161783 - DNA, 213 bp, Arabidopsis thaliana landsberg
tttaattgctttttgtgcccaatttcaggaaataaagtttgaaccgtgcgtaatgtgtgaacagattgataagaagacttctttcaggctgtgtcaagtaatgttaatctcattgtatcaaatttgatgttttacagtttgttctcttcattgaaatgagtttctggtgtacagattgaagatggagatatcatttgttatcagaaacctctt

SEQ ID NO: 161784 - DNA, 271 bp, Arabidopsis thaliana landsberg
  unsure (1)..(271): unsure at all n locations
tctaatcgaatcactttggggtgttgtgttaatcgctgttctcaagatctgagatttacagggagaagtgagctggaacaaggtgccggagtagatggcgatcatatctgcgttggtggctcgtggaacggtggtgttatcggagtttagcgctacttcgactaacgctagnnnnnnnnnnnnnnnnnnnnnnnnnnnnnnnnnnngaaacgatagcgatagccatatctcccctctcaggatcgctacatcttccatgtgaaacgaacag

SEQ ID NO: 161785 - DNA, 138 bp, Arabidopsis thaliana landsberg
gtctctatcccaagggattagccgtttagagcggttattggctttaacagtcggttcttattggctgcttagttagagatcgctaatgggaattaggtcagtgtctagctatgcttgaggatttctatcacgggagtg

SEQ ID NO: 161786 - DNA, 180 bp, Arabidopsis thaliana landsberg
atccgcgaactgggcccattttataagagtctgaattataggataaaagcaacaatataaaaaacttgtaaattattagagcgaagaacaaagagtatgaaatgataagagtttgagacgaaagaacaaaagatagaaggaagaagacaagactctcctcgattaaaaaccaaaccacac

SEQ ID NO: 161787 - DNA, 271 bp, Arabidopsis thaliana landsberg
gggggggggaggggggggagaggaggggagggggggaggaggggaggggggggggggaagaggggggggggggggggggggggggggggggggggggggggggggggggggggggggtggggggggggggacccggggggggagaaggggggggggggggtgggggggggggggggggggggtggggtggggggaagcggggggggggtgggctggaataaggggggggggggggggggggggggggggggggggcggggggggggaaggg

SEQ ID NO: 161788 - DNA, 147 bp, Arabidopsis thaliana landsberg
gaaaggagtgaatagatatgttgttagcacgatgattatcacctcttgagagaaggttggctaatactgagaacagtgtagctacagatggaaactcgaaaaggagcgacgataatgctttgggaagtaaaacaactaggagcttga

SEQ ID NO: 161789 - DNA, 101 bp, Arabidopsis thaliana landsberg
ttcatatcacagtaccgtctttaatggtggccttttcgacaaccacagtgattccagatcgaatgtagaatccttcctctggtctattagccttcttaaca

SEQ ID NO: 161790 - DNA, 191 bp, Arabidopsis thaliana landsberg
catccatgtggcagacattgcacttatcgagatctttccagtcaacacggacaggtcggtaaccagtaggctgattttgatgccttcccaaactatttttgcacatggaaacatgggacgatggtctggattttgataaatcctgctacgtaatggtatattagggtgagacacatattaagtgtagacac

SEQ ID NO: 161791 - DNA, 137 bp, Arabidopsis thaliana landsberg
gtccttcgacttcgatcactttagcgtgaaccttgatggtaacactgtcggggatgtccatcgtttcggaagaaagaatcgtcttcatcttctccgatctttgttttgctctccctgacggctctctggtttgatca

SEQ ID NO: 161792 - DNA, 1141 bp, Arabidopsis thaliana landsberg
atgagagagagcaaaaatcaaatcaatccaccattgttgaagaagaagaagtttcttagagaattgaatctcaaatttatgtcaaaacttagatttaaattgcaaaataaatcacaatctgaaagaaatcaagggctcttactctccaattaagataatttattctttgacttgagattgaaattaaaaaacaaaaatcaaattaccagagccacccatttgctcaaggcggtggagaagcatgtgacggaggtggtggcagatatcgcaagggaggcggtaatgtatacggaggaggtggtggttacgagagacatagcagaggttacagatctggtggaggttgtggtggaaaaagatatggtggtggtggccgtgagggaggtggctaaggaggaggtgacgctggaagttacggaggaggcgtagtagggtttggtaatcaaagatagtgtagtttattgacactgttagattgttgagagatagggaagatgatgataaaccttataagatttaaatttgaattttgaatattgaagttgtcctataatatttaattttgattctggaaaaatagagagaggaacaagagaagttttcttaagacaaatggcgaagattggaagaaatgttgctaatgagaaagagaaaataagtttgagggcaaattggacaatttaacaaggcaaagtgtcttcttctttttaagtgccttaatctgcattaactttccaaaaagcgtctaagtacataatattttcataaaatatcgcgaatttaaccaactattctcggatgtctctctcacaatttcattcattctctaaaagtaaattgtgaagtttttaccataatctaaaacatcaaatgagtttaagaagtaaaaatatttctaaaaataactgaatagagtttaaaatactatattttactccaaaatcaaataaattttttaaaacccagacccgatcggttcaaacggttcaccgggtcacggttgaatggtgagtttttgtggattttcccgggtttgaaattgttgggtattagcactaaccccaaaccggaaaagtgttcgggttacgggttaaccggtcggaccggacggttcgggtcgggcgtgaaaacactggtttag

SEQ ID NO: 161793 - DNA, 628 bp, Arabidopsis thaliana landsberg
atgaattatctcataatttttatgttaattactactatgcattttgagctaaatcaagcaacacattgcaaaaatcatgtagtaattcataacgagctgagtcctggtattattctgaacattgcatgccgaaagggtagcatagacgataaacctacaagatttcacaaactaaactttaaagatccttcttatgtcattgaattcgaggataattatcctaatgatgaaacttggtattgtttgcttagtcacggaactagaccaaaatattggtatgatattcaagtatatcgtcaaggcattcaaccaaaatgtaatcagttgcgcttatggattgcaagaatggatggaatttggtttacaagaagatatgaaagtccaccagggcacgtacttgattggaaaatctagtaatgttctcgtgcttttattttccctataattaactaatgtttatgctagtggtttttgttttgtgtcataataagtaatacgccataaaagctaattaagtcatcaacataaattggtggtagaatatatggcaaaatgttatatcaaaatatgtgtccatttgatgtctatgtatttcaacattttaaataataagacaatatacttctat

SEQ ID NO: 161794 - DNA, 361 bp, Arabidopsis thaliana landsberg
aaatagagcaaacacaatggctttggctctcaggttcttcatatgcttcgttttgacggtgtgcatagtttcatcagtagatgcagaaatctcatgtggcacagtggtaagtaacttggctccatgtgccaactacctttcaaaaggtggtgtggtaccggatctgtgttgtgaaggagttgaaaagttgaacggtatggctcaaaccacaccggaccgccaacgagcatgccgatgcctacagtccattgcaaagggcatttctggtctcaacccaagtctagcctctggtcttcctgaagagtgcggtgttagcattccctatcccatttccttgagcactaactgcgacaagtaagct

SEQ ID NO: 161795 - DNA, 812 bp, Arabidopsis thaliana landsberg
ctattcaatatcacgtttaactcgtttttgttattcaatggttactccttgtagtagattagaacctttgtcactggatgtttttggttcacatctaaatctgcctttgattctgaatgtagtggaccttgtgtgtcatacttacttcggagaagagcactttataatgacatgtcaaggtattgaagcctaccatatgtagaattgaacaatgagatttgtttcttctgtttctcataaacaatgttattgtgtttcgttttgtgaaggcacacttgttgtggtggttacatgccttgtagtggcaagtgtggagaaagcaaatgccctcaattttgtcttgccaccgaggtacaaaataaagcctttgatgttcatgtcgataaacaaaatgagataacttgtgatagaatctttctcctaaaaatctttatttgattttgttaagatttcactttttttatgatcttgtggttttgacatttctttaggtgtgtctctgtttcgggaactctgtggcatctactcgttttatgttgcaagatgaattcaacatccatacaacaaaatgcgacaattgcataattgtactccctactttccctctttgttatcacttattcactttcgtcttatacatgtttgtgtgcgtcaacattttcccatcttctttcgttgttttgtagggatttatgttctgcctcaaccaaatcgcttgcattttctctcttgtcgcttgcattgttggaagtgatgaactctctgaagcgtctcagcttctttcttgcttggcggatatggtctattgcacg

SEQ ID NO: 161796 - DNA, 565 bp, Arabidopsis thaliana landsberg
atgttgcatatttgtgttgttttcatctgatttagagctgttgacgagctaattggaagaagcgaacctgatcatatcaaaccactcgaccccctggtcgagtagatgtttcacgacttcaacagaccactcgaccccctggtcgagtagaagacctcatcacttcacgtcactactcgaccccatgatcgagtaccaccaagacaaccactcgatctcatcaccgtggtcgagtatcatcacctccaccacatcaccatcactcgatcactccacccgaccacaaggtcgagtatcatcatcaccatcactcgatcactctaccaccaagccgagtaccacagtccccatcactcgacttcatactcgattgctagcttaagagtcttttccattccgcactcaactagagactcgagcacaaggaagaaaagaagactccatgtaacacccgccccgccatttagactaagacaacatgttattcatctgatcttgtcaaaaacgttttctttaaacttcacacacgaacaaaatattgtacacaactcctcacgcttactaa

SEQ ID NO: 161797 - DNA, 2417 bp, Arabidopsis thaliana landsberg
ccatcaatggcttcaactccaagagcaaaaaccttcaaatccccaaccaaaactccgtctaacatctatcgcaaatcgtatctatctccatcttcaacctcacacactcctcaaaccccagaaactcacactcctctccgtagatctgctcgtcatgtttctcgtaaaatcgatctgggaaatgacccaatcgatgctccaggaaatgacccaatcgaaggaatgaatctaattcgaaaacgagaacgtgcccccagaaaaccaaccactgatgtcgttccatcgaagtcgaagaaaacagaaactccgaagaagaagaagaagatagattccttcactcctgtttcaccaattagatctgagacgattaagaagacgaagaagaagaagagagtttattacaataaagtcgaattcgacgaaaccgaattcgaaatcggtgatgatgtttacgttaagagaagagaagattcgaattcagatgaagaagaagatccagaaattgaagattgtcagatttgtttcaaatcagatactaacataatgattgagtgtgatgattgtttaggtggatttcatttgaaatgcttgaaaccgccattgaaggaagttcctgaaggtgattggatctgtcaattctgtgaggttaaaaagtctggtcaaagtcaaacacttgaccttcctaagccaccggaagggaagaagttagcgagaactatgagggagaagctactttccggtgatctatgggctgctcgaatcgacaagttatggaaagaagttgatgatggtgtgtattggattcgtgctcgttggtatatgatacctgaagagaccgtttcggggcgtcaaccgcataatctgaaacgagagctttatttgacgaatgattttgctgatatagagatggaatgtattcttaggcattgttctgtcaagtgtcctaaggagttttcgaaagctagtaatgatggtgatgatgtgttcttgtgtgagtatgagtatgatgttcattggcgtagctttaagcgtttggctgaattggctgatggagattctgatagtgatcaagagtggaatggtaggaaggaggaggaggttgatgatagtgatgaagagatggagcttgatgatgaagttttgaagagtaagcgaggaggtttgactagtgcaagaggaggtgcgaactctcgtaaagggagattctttgggcttgagaaggtggggatgaagctgattcctgaacatgtgagatgtcataagcagagtgagttagaaaaggcgaaagctactttgttgttggctacacgtcctaagtcacttccttgtagaagcaaagaaatggaagagatcactgcgtttataaaaggctcaatctctgatgatcagtgtttaggtagatgtatgtatattcatggtgttcccgggactgggaagactattagtgtgttatctgttatgaagaatctgaaagctgaggttgaagcgggaagtgtaagtccatattgctttgtggagataaatggtctcaaattggcttctcctgagaacatttacagtgttatctatgaggggttgagtggtcatcgtgtaggttggaagaaagctctacagtctctgaatgagaggtttgcagagggaaaaaagataggtaaagagaatgaaaagccttgcatacttctcatcgacgagcttgatgttctagtcactagaaatcagtctgttttatacaacattttggattggcctaccaagcctaactccaaattggttgtgttgggaatagcaaacactatggatcttccagagaagttgcttcctcggatatcaagccgaatgggtatacagagactgtgtttcggtccttataaccacaggcagctacaagaaatcatttctacaaggttggaaggaatcaatgcttttgagaagacagctatcgaatttgcttcaagaaaagtagctgcgatatcaggagatgcaagacgcgcgcttgagatatgcaggcgtgcagcggaagtagcggattaccgtctaaagaagagtaacatatctgcaaagagtcagctggtgattatggcagatgttgaagtagccattcaagagatgtttcaggcacctcatattcaagttatgaagagtgtatcgaaactgagtaggatcttcttgacggctatggttcatgagctttacaaaacaggaatggcagagacaagctttgacagagtagcaacaacagtatcgtctatttgcttaaccaatggtgaagcttttcccggttgggacattcttctcaaaatcggttgtgatcttggtgaatgcagaatcgttctttgtgaacctggagagaagcacagattgcagaagctgcagcttaattttaatagtgatgatgtcgattttgcataattcctatc

SEQ ID NO: 161798 - DNA, 448 bp, Arabidopsis thaliana landsberg
caatctagaatctctctcatttgtatccatacatcttcacaagcttcaagaatcaaacttcaaggcaagaaaatggctttggtgagaagtctctttagcgcaaagaagattcttggcggttctttagtaaaaacaagcaaggcaccgccaaaagggtttcttgcagtgtacgtcggtgagagccagaataagaagcagagacattttgtaccagtctcatacttgaaccagcctttgtttcaagatcttctaagcaaatgtgaagaagagtttggttttgatcatccgatggggggcttaacgataccttgtcctgtagatacgttcatcaatgtgacttctcggctccaatgatcatgatccaacattttgtttttccgagttagatatagacttaattcattgtaaatagcttttttctctttcttcttgaaagagtacttgttct

SEQ ID NO: 161799 - DNA, 428 bp, Arabidopsis thaliana landsberg
tttttggcgggaaaacgtgatttttgcggttttggcgggaaaacatgattttatggttttggcgggaaaacgtgattttacggttttggcgggaaaacgtgattttacggttttggcgggaaaacgtgatttttgcggttttggcggaaaacacgattttacggttttggcggaaaaacgtgattttttctgttttggcaggaaaacacgattttactgttttggcgggaaaacgtgattttacgattttggcgaaaaacgtggttttggcgggaaaacgtgattttacggttttggcggaaaaacggaattttacggtttctgcaggaaaaaatgattttgctgttttggcgggaaaacgtaattttacggttttggctgaaaaacggaattttacgagtttagcgaaaaaaatgattttgcggttt

SEQ ID NO: 161800 - DNA, 633 bp, Arabidopsis thaliana landsberg
tcaagaaaaacagcaatggcaaaacaataccaagctctctttctactcttctccgtcttctacctcttctcgtcggtgctcacgaccgccacagtcaacccggccggaactaccacaaaagcactaaactttattcaatcctcatgcaaatccacaacataccaatccctgtgcgttgaaactctctcggtttacgccaatacgatcaaaacaagccctcgacacctcttggatgcagctatcaccgtgagtctgaaccaagcgctgtccacgaagctcttcatctcacacctgaggaagagccagttccaaatccttcaggactgcgcaccatcgaccgatacgttcagtacagattgcgagtgttctgtccaagcactccaagaggtggtgaattgtaacagttggaccgactgcttgtttcacgtaaagaatgctgaagtgtgtgccatttcgggtgagagtcatagcgtcgagaacacttgctccagcccgttcgcggatccgggaaagatatctgccaggggccggatctcggatgccgtaagaaaatcacttcatacccggttctctaagttgcgccaggaaataaacaatgccaaaatgttgttcaaggcctttcctaataagcat

SEQ ID NO: 161801 - DNA, 4099 bp, Arabidopsis thaliana landsberg
  unsure (1)..(4099): unsure at all n locations
atggcgagttcaagccctgttacacctgggctagtacgtcttttgattcgtttgaattagagatcttgcttgatttagcttttgataacttaagatttcttctgttgagctcttgttagtttggtagtgatatactgagagtgatttgttttcgttttcctggaaattgcagatgtcggtggtgttcgggattgtgccggtgatcgtggcttggctatactctgagtatctgcactatgctaaatactcggtctccgccaaaacgtatgttgatacaacgtttttaagtgatgatggagttttgctttgatttcgttattgatttctcacttgggtgtttgtctatgttagtaggcactctgatgtcaatttggtggaaattgcgaaagattttgttaaagaagatgacaaagctcttttaatagaagatggaggtggtctccaatcagcttctcctagagccaaaggcccgaccacacattctcctctcatcaggttccattacttcttccgaagcaaccactgacctctgtagtttttctttttcttatgcttatatgccggggttctacgcaggtttgtcctcttggatgagtcgttcttggttgagaacaggctgactttaagggcaatgtgagtattggggtccgtttctagagtaaagttttgtatgttcaaaggtccattatcctgaagattcccaaattatctaaattattttttttaatgcagaattgagtttgcagtacttatggtatacttttacatatgtgaccgcacagatgtcttcaattcatcaaagaaggtgatgatgatatcctgcttagtttattctggaaagatttatctagctagttacagagtctttacattgttcagcaacatcttatatacactcgttttttatcgttaaagttggtctaaaatgttagatggaaaaaatagacccataagattgtgaatttgacgtgacaaaataagaaagtttgtaaatttgataagtcatgatggatatcctgcttgtgtcggttcattcgtatgtgcttctatgtgtctcagtagcttacattgttaatcttttgacacagagttacaaccgggatctctttctgttcctttacttccttctcatcatcgtttcagcgataacttcattcacgatacatactgataaatcaccattcagcggaaaagccatcatgtacttgaataggcatcaaaccgaggagtggaaaggctggatgcaggtttgtcatttaacttttatgttagtgttttatctgccttttcatttgccgctacctcatcattgttttcttattctggtgttgtaggtccttttcttgatgtaccactactttgctgctgcagagtactataatgcgatccgtgttttcattgcttgctatgtatggatgactggatttgggaatttttcttattattacattcgcaaggactttagccttgcaaggtttgcacaggtaagagctatgtcctcccggcttttttcttatttttggctgtcacctacttgaaattctaacatattcttggtctacagatgatgtggcggctaaatttcctggtcatattctcctgcatcgtcctcaacaacagttacatgctatactacatctgcccaatgcacactctgtttactctaatggtctatggggcacttggtattatgagcaagtataatgagatgggttcagtcatagctgccaaattttttgcctgcttcgttgttgttatcatcgtttgggaaattcctggcgtttttgaatggatttggagtccatttacactcctaatgggtaagtgagaacccaaatatttgtttaccaagataaacaatttgctcatgcctcacaagacagctgtttagaaaacaaaacttgaaaacaacaattgcaggttacaatgatcctgcaaaacctcagcttcccctcttgcatgagtggcatttccgctctggacttgatcggtacatatggataatcgggatgctatatgcatactaccacccaactgtcagttcccaatactagaacttcacatcaactctgttcacaaatggttagctcagtgataaagacttaccgtttcatttccttgattatgtatcttataggttgaaagttggatggataaactggaggaagctgagatgaaattcagggtggctatcaaaacatctgtggcactgatagcactaacggtattacaagtcatcatttgactttctttcaggtgaaagaagcctcttgcatattgttcttccagctaatctatctttgttattatgaaacttttaggtgggatatttttggtacgagtatatatacaagatggacaagttaacttacaacaaatatcatccttacacctcttggattccaataacgtagtccactttacctgcaaatctctatacaaccactcttctaagaaccagtccttacttgtgtacctcgttttgcttttctttcagtgtttatatctgtctccggaacatcacccagtctttccgcggctacagtttgacccttctggcgtaagtaaaaaataattcagtcaatagatatgtttatcctcttataacgattttttcaagaaaaatttgttcatgaactttcaggtggcttggaaagataacactggagacatatatctcccagtttcatatatggctcaggtatgtcacacttttgttgccgaagttctcaattgtagagtaagtgggaaattgatggtggagcatgctaatacaataagctattaagatttttcctgacccattgaactatgaaataatctaattcacccacagatctggagttcctgatggtcaacccaaattactactatctcttgtcccggattacccattgttgaacttcatgctcactacttcgatttacgtcgctgtaagcaaaccctgctacaacagatagaaacaagttgaaagccagacagatacaaacaaactgattggctttttgttgctctgttttcagatctcttataggctctttgagcttaccaacactttgaaaacagccttcataccaaccaaggacgacaaacgccttgtctacaacacgatctcagcactcataatctgcacttgtctctactttntctcatttattcttatcacaattccccaaaaactggtaagtcaaaatttttatctttttgtgtgggagaaagcttttttttccctgggagttgagttcggatgatactgttagtgcatacacaaagcgaggacgaatgtcatcctctcatattcgattgaaccatctcacgttttattatttcactggaaacaaacaggtgtgaagcacttttgaaccggaccagagtggactattcgaatgaattcataggagttgaactacgcgatatggtagatatacgaagatagaaatcagaggtagatgcatacaatgttgctgtaatgtcatctttctgtatatttatttatgaataaggtgttctttcttgtttatttgtgtttctgttcacgatgatgttaagacttattattgtctattacaagttaaaggaaatccatatgagtaattgtatagctataaaatccagattaatcttacatcaaagtaaaatatgatggacttgcaaaagccattactttaatgtaaggaaacattgatatacttagatagaaagtgtattcatagcatgtgtgtcaagcttgtcctctattgctcggtaggcagagaaagtgtccgagtcttcccatttggagaaattatacgcgggcccaaaggaaagcaaaaaatgaggtactgatattaaaaacaataacagtaccttatagtcaccccggtatagattgttagacatgctaaagagacaagataaccaaccgaggaagagcgtgtacaaagcatgtccgatctccatccaaaacttatccgatagctgaatcagccctaaccctccggtgaacaacgagatggtgaataacgacatggacaattcaaactctttgtttgtcaatagctcatatattaagggcaatgccaacgctaaatttgcggaaaatgtcgaaaacaaaacctga

SEQ ID NO: 161802 - DNA, 6514 bp, Arabidopsis thaliana landsberg
atggagacttctcaaaaggtgattactacggtgatacttcaaggagggaactacttaacttggtcaagaacaacaaaaacggtgttgtgtggtcgtgggctttggagccatgtaatttcatctcgagctccaaaggaagccaaagaagaaggagatgaagaaggaacggaagttctatctcccgaggaagagaaatggttccaagaagatcaagcggtccttgctcttcttcaaaactctcttgaaacctctattctagaaggatactcgtattgtgaaacggcaaaagagttgtgggatacactcaagaatgtgtatggaaacgaatctaacttgacccgggtgtttgaagtgaaaaaggcgatcaatgagctaagtcaagaagatctagaattcaccaaacactttgctaagtttagatcgttgtggtctgaacttgaaagcttgagaccgggaactcttgacccgaaggttctccacgaaaggcgtgagcaagataaagtgttcggacttcttctcaccttaaatccgggttacaatgacctaatcaagcacttacttagatcggagaagttaccaagtcttgatgaggtatgctctaaaatccaaaaggaacaaggttcaaccggattgtttggtggaaaaagtgaactcatcacggctaacaaaggagaagtggtggctaacaaaggagtgtacaagaatgaagatagaaagatgctgacatgtgaccattgtaagaagaagggtcacaccaaagataagtgttggttattacacccacatctcaagcccgccaagttcaaagactcaagagcccatatctctcaagaagctcatgaggagcaaagtcaatccgggtcatccaagggagagacatccacaatatcatccggagattatgtgaggaagtcggacttggaagctctcatcaagtctatcgtctctcttaaagaatccggtatcaccttcttctcacaaaaacctagtagttcaattgttatagattcgggtgcttctcatcatatgattagtaattctaatcttcttaacaacatagaaccagctctaggacatgttattattgctaatggtgacaaggttccaattgaaggcatagggaatttacgactgtttaataaagattcaaaagctttctttatgcctaagtttacttctaacctcttatccgtaaaaagaacaactaaagacctaaattgctatgctatttttgggcctaatgatgtatattttcaggatattgagacgggaaaagttattggagaaggtggctcaaaaggagaactctatgttcttgaagatgtgtcaccaaactcttctagttgtttctcttctaaatcgcatttaggcatttctttcaatgttttgtggcatgctaggctaggtcatccacatactcgagctcttaaacttatgttaccaaatatgtcttttgatcatacaagttgtgaagcttgtattcttggtaaacattgcaaatcggtttttcctaaatctcttactatttatgagaaatgttttgatctagtacattcggatgtttggacttcaccatgtgtttctagagacaacaacaaatattttgtgacttttatagatgagaaatcaaagtacacttggataacactcttaccttcaaaagatagagtgtttgaggctttcactaactttgagacttatgtcactaatcaatttaatgcaaagattaaagtgtttaggaccgataatggaggagaatacacaagccaaaagtttcgagatcacctagctaaacaaggaatcatacaccaaacaagttgcccgtacacaccacaacaaaatggagtggcggagagaaagaaccgacatcttatggaagttgcacggtcaatgatgtttcacacaagtgttccgaagaggttttggggtgatgcggttctaaccgcgtgctaccttatcaatcggacaccaactaaagtcttgaatgacttatctccctttgaggtactaaacaacaccaaaccgtctattaaccacttacgtgtctttggttgtgtatgttttgttttagtacccggagaacaaaggaacaagttagatgcgaagagcactaagtgcatgttccttggctattcaacgactcaaaaaggatataagtgctttgatccaaccaagaatcgcacattcatatcccgagacgtcaaatttcttgaagatcaagagtatgataacaagaaggattgggaggacttaaaagatctagctcattcaacctcggatcgcgttgcaactctaaggtttctattggatcatttgggtaatgaaacaacaccaacgaccgagaatacgcaagaaacacattcaccaaatcaagaagacttgcatcaagggagtgatagtaatgaggaagagtatttacaacatcaagaagaccttctcaatatacaagaagatcatgaatccgtccaagagactcaacatgactcaagtgactcaagtgatgatgaaaaacaagaacaagtcctagttcttccaactccatcacttagaagaagcacaagaatccgtcgcaaaaaggaattctttaatgctcttgcggtagctcatccattccaagcaacatgttctcttgcccttgtacctaaagatcatcaagccttcctctccaagatttctgaacatcgaattcctcaaacgtatgaggaggcaatggagatacaagaatggcgggatgcggtggccgaggaggtgaatgcaatgaagcgaaatctcacttgggatgaagatgagttaccaacgggaaagaaaacggtgagctctcgatggatattcacaatcaaatacaagagtaatggagatatagagagatacaaagctcgcttagtagctcgggggtttacacaaacctatggatccgactacaaagaaacctttgctccggtggccaagcttcatactgtccgggtagtcctcgccttagccacgaatttatcatggggattatggcaaatggatgtcaagaatgcatttcttcaaggcgaactcgaagatgatgtgtacatgactcccccacccggcctagaagacacaattcaatgtggaaaagtgttgcggcttcgcaaagccatatatggtctcaaacaatctccacgggcgtggtaccacaaactaagtcggacactcaaagatcatagcttcaagaaatccgaatccgatcacactttgttcacactacaaagtccccaaggtattgtggttgttctcatttatgttgatgatcttatcatcacgggggacaacaaagacggtatacaaaccacaaagacctttcttaaatcatgttttgatattaaagatctaggtgaactaaaatattttctcgggatagaagtgtgccgctcgaatgcgggtctttttttatcacaaagaaaatatactcttgacttgttgaatgagacaggttttatgaattctaaaccggcgagcactccacttgaagatggctacaaggtcaatcgaaagggggagaaagaagatgagaaatttggcgatgcacctctttaccgcaagcttgtaggtaagttgatttacttaacaaatacaagacctgatatttgttttgctgtgaatcaggttagccaacatatgcaaatcccgatggtgtaccattggaacatggtggaaagaattctaaggtatctcaaaggcagctccggacaaggcatatggatgggaaagaactcaagtaccgagatagtaggatattgtgatgcggactatgcgggtgatagaggagatagaagatccacaaccggttattgcactttcatcggaggcaaccttgcaacttggaagacaaagaaacaaaaagtggtctcatgttcaagtgctgaatcggagtatagggcaatgagaaagcttaccaacgaactcacttggctcaaagcgcttctcaaagatcttggcattgaacaacacacacccattaccatgcattgtgacaacaaggccgcaatatacatagcctcaaactcggtgtttcatgagagaaccaagcatattgaagtcgattgtcataaagtccgagagaagattgtcgaaggggttacgctaccgtgttatacaagaagtgaagatcaattggcggatatcttcaccaaggccgcaagtctcaaagtttgcaacttcatacatggcaaactaggacttgtggatctatctcactcttgatctcaagttcccctaaccatgaacatcacactctttttcccttagtaaagttttctcccatgtggttttctctactacggtttttaatgaggtgatggatcatgtgttccaagcttagacttgcgtgagtcttacgcttgagggggagtattgagcaagacctaataaaaagcatccatccgtacaaataaagaaaagaggccgagtgttgtgtgtaagctacaaggtgttgggccgaacacattgagaagcctatagggagcttctagaatgagtgaaggcacacaaatatctcttgtagccgttgaagagaactcacgagtggtcttagcttcatggtcaaccaaggacctgtcactctcaccattaagaccaaggaatctcttctctcatgtctctttcattcgcatgttatgtgtaaacggctatgttccctttgtgtgtccttaaaatacaatgtaaacacacaaaggtaactaaccaattctagtaatatgttttggtcattctcactcataacaatgctctcttgttcctcatgattctcttacccttactcttactctttccaaactacaattccgcatattctttcagtgacctctctcgaaacctcggcatcgacgtgtttattctccggctaggctctcgtcgagcggtggttgtaacgtcagcttcagctgcggaggagttcttatctcagcaaaacgatgttgttttcgccaacaggcctctcgctactttaactgaatacatgggttacaacaacacgctggttagcacagctccgtacggggagcattggcgcagactccgccgtttctgcgccgtagatatcttgtccaccgctcgtctcagagacttttcagatatacggagagacgaagtgagagctatgattcggaagatcaacgtggaactggtaacatcaggaggcagtgtcagattgaaactccagccgtttctttatgggcttacgtataacatcctaatgagcatggtcgctggaaaacgagaggaagacgaggaaactaaggaagttcggaagctgattagggaggcgttcgatttcgctggtgttaattatgtcggagattttctcccgactctgaagctctttgatcttgatggatacagaaagagagcaaagaaactcgcttcgaaattggacaagtttatgcagaaattagtcgacgagcatcggaaaaacagaggaaaagcagagcttgagaaaacgatgatcactcgtttgctgtctcttcaagaatcagaacctgaatgttacactcatgatatcatcaaagggctcgtacaggtacatgagtttttaattcctataattttgaatcgttaataggagtgatcaagattgattcatcaaagattcaaaggattcattgcaggtgatgttgcttgctggaacggacacaaccgcagtgacgttggagtgggctatggctaaccttctaaatcatccggaagttttaaggaaactcaaaacggaacaaaacgaggtttcgaaagaagggcgtgtgtttgaggaatcagatactggcaagtgtccctatatcaacaatgtgatctctgagactcttcgtttgtttccggcggcgcccttacttgtcccacacgcttcatccactgactgtgaagtcgctggatttgacattccacgtggcacctggctatttatcaatgcgtgggctattcagagagacccaaatgtatgggatgacccagaaactttcaaaccagagaggtttgaatcagagacccatcgtggtaagtttctgcctttcggaatcggtaggagagcatgtcctggtatgggcctggcccaactagtactgagcttagctttaggctcattgatccagtgtttcgattgggagagagacaatgacgttgccgttgacatgtcggaaggaaagggtcttaccatgcccaaatctgtgcctttagttgccaaatgcaagtctttaccaatcctcgacaaacttgttctttaactggatcatttatctttcactttgtgatactttgtgtattaatttgatctattatcatcattaagcgtagttataaataaaaatttattttattttcctgaatagcttaagagaaatttgatcttcgtcttcgtcactacgtccccagctctcgagctttgttcactcgatttcctctatacatttccttaaaacccaaaattcttaagcctaatccaaaggagaaaaaaacagagcatttttcttcttctccaatttaaacagttccctaataa

SEQ ID NO: 161803 - DNA, 1729 bp, Arabidopsis thaliana landsberg
caatcattcaaggacaagctattagagctatggcttttgacaagaatgtagctgaatgactcaaccagattgagttgttcttgctgcgatctaaatgtcaagttcaaagctctgaattcaaaaatcaagtgtgtggagagtcaatgtgcatcaggctcggcttcgtagcatcctcagcaacttccagggaaagcagtccaatatcctaaggactatgttgctgctgatgctatcaccctccgccaagaagatgagtctcctccaagtgatcagactctcaataagaaggacagtatgattcgacaagggagaaattcaactcaaattgttgcacctgccatccaacaattcatttggactatagagcacacacctttgctgaatactcaccattctaaaaaaaaattcaaaatagaaaaacttaagaaggatcagaatcattagatgattagcagtgtcatctcccatgaaacttacaagaagaaagtcatccaagaaaagcttgatgatcctggttcattcactctgccatgctctctaggaccattgacattcaataggtgcctttgtgatttgggaccatctggtagtcttatgtctctctctacagctaaatggctagggatcatggaatacaagttctacaacctaggtttactcttagctgatggttttgttgcatatcctcatggtctaatagataatctgcctgtcaagattgaaatgttgagacacctttaaattttgtggtattggagatagatgaagaacgaaaagatcccctgatcctagacaggccattcttaggttcagctggagcagtcatgatgtcaggaatggaaagattaatctgaaccttggaaaaggcatcaagatgaaattttgggaaatcaacaacaggaggtcaataatttggaattcaagacattgacgttgatgaagaaacagaagctggaaccccacccagatttaattatacttctcaactgagcaagctgaagagaacctttgaccacaagaagagagcaatagaagtgttagctcagactgaagatcctacagaagatgactcgtctcagatgagataaatatttaaatggcaaattagagtcatagagggattatcttcaagggggatgaagcggaaagatcaactatggatgtttgaaaaaagtgttaataagttttcaatgggtattgacctagagaagatggaaactgcactagctattaaaaaggacgaagatttcacaacagaatggtttgcaccaaaagatcaaaaaggagttcacttagaggaaagaagcttggagagcaagtttttgggtgaggaggaaagcccactaaaccctctgctgaagaagaacacttgattcttgattctgttgctgaagaactcctggagctcaggattggatataaagctcaggaggatacaattggaaagttaactcataagatggaagagttaaatagcaccattctggaacttcaagaaatggttaaaggctaccccagttttgaaattgaggattggtcaaaggagcctggttcaaaagaagaagactactctgctgatcaaaaagaagcttattttgaagaaaaatcaaatgagtactcatcctaccatatgtcaagaaaggatgcaaagtatgattcagacactgaaaattcaaccactaaagatgagggcttctcagctcctctcttcaaccttttttctgactaa

SEQ ID NO: 161804 - DNA, 5136 bp, Arabidopsis thaliana landsberg
  unsure (1)..(5136): unsure at all n locations
tgcatatattctatcctagctgacagatcagtaaggatccctcatggtttgctcgaaaacctaccaatcaagatcggagctgtggagataccaactgactttgtagtcctggagatggatgaagagcccaaggaccagttgattctagggagacatttcttagcaactgcaggagctatgattgatgtcaagaaagggaagattgatctaaaccttggcaaggattttaggatgacctttgatgtcaaagacgcgataaagaagcctaccatagaagggcaactcttttggatcgaagaaatggatcagttagctgatgagttactggaagagctggcagaagaagatcatctgaacagtgctttaaccaaaagtagtgagatgggtttctgcatttggaaacattgggataccagaagctgttagactcccataaagcaatggaagaatcagaaccctttgaggatttgaatggaccagcaacggaggtaatggtaatgagcgaagaagggtcaacacgagttcaacctgcacactcgagcaaatactcgatcttgtctgccaacgaatttggggagccgatcatcccaacttcagatgactggtctgaactgaaggcgccaaaggttgatctaaaaccacttcctaaaggtctaaggtacgcattccttggtccaaactctacttaccatgtgatcattaatcctgagttaaatgatgatgaagtgaacctgctattatttgagtttagaaagtataggagagcaattggttattcattatccgacattaaaagaatttcacctagtttatgcaaccataggatccaccttgaaaacgaatcctattctagcattgaaccacagaggaggttaaatcccaatttgaaagaagtagtgaaaaaagaaattttgaaacttcttgatgctggtgtcatctatcctatctctgatattacttgggtttctccaatgcattgcgtccctaaaaagggtggaatgactgttgtcaaaaatgaaaaggatgaactgatccctactagaactataactcgtcatagaatgtgcattgattatagaaagttaaatgctgcatctaggaaagatcattttcctttaccattcattgaccaaatgcttgaacgtttagctaatcatccatactattgctttcttgatggatacaatggtttctttcaaataccaattcaccctaatgatcaagaaaaaaaacactttcacatgtccttatggaacttttgcttataagagaatgccatttggtttatgcaatgctcctgcaacatttcagaggtgtatgacctctatattttcagacttaatcgaggagatggtggaggttttcatggacaatttttcagtctatggcccctctttctcctcatgtttgttgaatcttggcagggtattgaccaggtgcgaagagactaatcttgttctcaattaggaaaagtgtcatttcatggtgaaggaaggcatagtgttgggtcacaagatatcagagaagggtatagaggttgacaagggaaaaattgaagtgatgatgcagttgcagccaccaaaaactgtcaaagacattagaagtttctttggtcatgatgggttctacaggaggtttattaaggatttctccaagatagccaagctgttaactagactattatgcaaggagaccgagttcgaattcgatgaggactgcctcaaatcttttcacaccatcaaggaagctttggtatctgctcctgttgttcgaactcctaattgggactatctgttcgagattatgtgcgatgcatcggattacgctgtaggagctgtactaggccagagaatagacaagaagcttcacgtaatatatattacgccaggcggacgttgcatgaagctcaaggaagatatgcaacaactgagaaggagcttctagctgttgtattcgcatttgagaagttaagaagctatttggttggatctaagttcactgtctatacagaccatgcaactttgaggcatctgtatgccaagaaggatactaaaccaagactgttgagatggatacttttattgcaagagtttgacaaggaaatagtaaacaagaaaggcattgaaaatggtgcagttgaccatctgtcaaggatgagaattgaagaaccctttccgatagacgattcaatgccagaagagcagctcatggttgtagagttcttcggaaggagctacagtgggaaaaagttccaccaactgaatgctggtgaaggagaatctccatggtatgctgataacgtcaattacatggcatgcggagtagagcctcccaacctgacaagttatgaaaggaagaagtttttcagagacatacaccattactactgggatgagccttatctttacactctctgtaaagataagatctacaggagatgtgtctcagaagatgaagtggaaggtatcatgctgcattgccatggctcagcatatggtggtcacttcgcgacgttcaagacagtgtccaagattcttcaagcaggcttttggtggccaacaatgtttaaggacgctcaggagtttgtttcaaattgtgattcatgccagagaaaaggcaacatcagcagaagaaatgagatgcctcagaatccaatcttgcaagttgagatctttgatgtatgggggattgattttatgggtccattcccatcttcacacggcaacaagtatatagtagtcaccgtagattacgtatcaaagtggttcgaagctattgctagtcctaccaacgatgcaaaagttgtgctgaagctgttcaagatcataatcttcccgagatttggagttcccagggtagtaatcagtgatggtgggaagcatttcatcaacaaagtttttgagaatctcttgaagaagcatggagtaaagcacaaggttgccactccctatcatccacagacgaatgagcaggttgagatctccaatagggagataaaaacaattctgaaaaaaactgttgggattacaaggaaagactggtgtgcaaagctcgatgacgcattatgggcttacaggacagccttcaagacctccattggtacaactcctttcaatcttctctatggaaaatcatgtcacctacctgttgagctcgagtacaaagcaatgtgggcggtaaaacttctgaactttgacatanaaactgctgaggagaagcgattgatccaactcagtgacctcgatgagatccatctagaagcttatgagagttctaaaatctacaaggagagaaccaagcttttccatgacaagaagatcatcactaaggatttccaggttggtgatcaggtgctgctattcaactctcgcttgaaactctttccaggaaaacttaaatccagatggtctggccccttctgtatcactgaggtccgtccttatggagcattcgctctagctagtaagagtggagattttacagtaaatggtcaaaggctcaagaaatacttagcagaccaaatccttccagaggtgacatcggttcatctccaggaacctcttgatgattaaaggagtaaaggagtcaagctatgactttaaacaagctcacttgggaggaagtcccatgactatctctgtaaataaatttttttattttcttgttatttttgatttgtcttagttgtgattgtggttctctggaacaaaggaacaacgtggagatagagtaaaaattcaaaacttttactctacagaagacctggagatcgagtgtatagcccgttgaagtacaaaattttgaaaatcttctgttgcacctggagaccttgcattcgagtatattggtcgagtatgtgtgatgtttaaaacccaaaaatttttaaatcatcattttactcgaccaacagaagctacagagtcttacagggagtttatcaagtttacagtagatttcctgcagttttcccagtcaatagagtgtggaccacgcgctgaggataagatggagagagaatctcaaactcaatctccaccaccccttttgaaacttcactcgacctctgaaacctaagccgcgctcgacttcgctgaaatcactcgatcgccgcctgaaagaattctctgccgtctcagacgagttccacgactcactcgactaccgattccggttcaacctgaatcactcgaccgctacgtaaccgactctccaatcattctactcgaccacgtatcgccatctctcaccaaagagttactcgactcaatttcactcgagttcctcgctatactcgaccgtttcactttgcccttcgccatcactttgttctcaccacactcgaccttctctgcgctgccaaaatcgagttccccgcctcgttcaccgtcgaagtctcaagaactactcggttacaaacgcaagagtcgaccaccaaattgtggttccatcctcaccaattctgactcgccgaagaagtactcgatcacaaattttcacttgaccacaagttttcactcgacctcctgcaacagagccactcaacttcaccgacattttactcgaccgacggagctctactcgacctcttgtactcgacctcagcctgattcaatctaagccactctattcaacccgtgaaagagaaacttggaaagggttaaggttactcgagtacttgattgtacttgtccgtttaggtctatattgtctgttgctaacgattttggctttattgttctctttgaaactaacctattgatattggaattttgacttctaagtcttttgcatgataatcatgagtaattacagtggcagttcttcagttgatcctgactacaacatggatgagaaagagtcatcgtcttcaaggccagagagagaacaaagagaatatgatagtttcagaagaaacgctgagatagcctgtgggaagcaataacagagaggtatgacagagatgtatgagcttatagatgaggatctggaagacgagtacatgcctgagcttgctcgcagagctaccaaacttctgcacaaacctgatgtattgcccgctgaggaatatattaggctcttcaaattaaatgagttttgtagcacaaggtatccatgctcgaccacgcttgcacaact

SEQ ID NO: 161805 - DNA, 1561 bp, Arabidopsis thaliana landsberg; identical to SEQ ID NO: 21812

SEQ ID NO: 161806 - DNA, 6810 bp, Arabidopsis thaliana landsberg
ttcatggaaatggagacaaaagctggaaagcaaaagaagagaagtgttgactcggatgatgatgtctctaaggaaaggagaccaaagcgagcagcagcttgcacaaacttcaaggagaaatctctccgtatctctgacaaatctgaaactgttgaagctaagaaagagcagatcttggcggggaggatcgtggccatacagttaacttcttctttggagagcaatgatgatcaacctcggccaaaccggaggctgactgattttattttatatgattcaaatggagttccacagcctgtggagatgctggaacttggtgacatatttattgaaggtgttgtcttacctttaggtgatgacgaaaaggaagaaaaaggtgtgaggtttcaatcttttggtcgggtagagaactggactatatctggttatgaagatggttccccggtgatatggatctcaactgtgatagcggattatgattgccgtaaaccttctaagaaatacaagaaattatatgattatttctttgaaaaagcttgtgcttgtgtggaggtatgtaagaacttgtccacgaatcctgatacaagtcttaaagagcttcttgctgcggttgttaggtcgatgaatggaagaaagatcttttctagcggtggagtcatccaagagtttgttatatcccaaggagaattcatatataaccaactcgctggtttggatgaaacatccaagaatcatgaaaccaaatttgttgagaatcgtgttcttgtttctctaagagatgagagtcgtaaaattcacaaggctttgtctaatgtggctctgaggattgatgagagcaaggtcgtgacatctgatcaactaatggatggtggtgaggacgaggacctaaaatatgctaaactactgcaagaggaagaacataggaaatctatggatcggtcgagaaataagagaagttcaacaacttctgctccaaataagttctacattaagataaatgaagatgagattgcccatgattatcctctcccatcttactataagaacaccaaagaagaaacagatgagcttgttctctttgaagctggctatgaggttgatacaagagacctaccttgcagaacactgcataattggactctttacaactctgattcacggatgatatctttagaggttcttcccatgaggccgtgtgctgagatcgatgtcactgtctttgggtcaggtgtggtggccgaagatgatggaagcgggttttgtctcgatgattcggagacctctacgcagtcaaatgatcatgatgggatgaacattttccttactcagataaagaatgtgtggttaagtttgaggcagaaatggtctttttcacaatccaaatagatatggcctggtaagctttctatatttcattgcatgtttttcccttatttgttactcatgttgcttgcggatcaggctattgcctattgttaaaatcgagttttggttgcatcaaattctcaaattattcaaattgttgatagagttttatatttgttcaagtatgcggagatattgaccaacttcgctatatttatatgaaaagaattggtttaattgactttgaaaaattgggtagtgattttgtaaaaattatgcaacataaatgatgtatttattaatttgattttttttttttttagtaaagggtttaacatttttttttttttactagttctttatttactttttgggacgatgattgttattataattatttatttttaattgtcttatatgaactaaagttttttttttcaattgtctctatgcaggtaccgacttgggaaaccgtcaaagcaatatgctccttggtttggaactgttatgaaaacagtaagggtagccataagcattttcaatatgctcatgagggaaagtagggttgctaagctttcatatgcaaatgtcataaaaagactttgtgagttagaggagaacgataaagcttacatttcttataagctcttggatgttgagagatatgtggtcgtccatggacaaattatcttgcagcttttcgtagagtatcctgacaaagatatcaaaaggtgtccatttgttactggtcttgcaagtaaaatgcaggatatacaccacgcaaaatggatcatcaagaagaagaagaaaattctgcaaaagggaaagaatttgaatccgagggcggggattgctcctgtggtatccagaatgaaacctatgcaagcaacaacaactcgcctcgttaatagaatttggggagagttttactccatttactctcctgaggttccatcggaggccattaatgctgaaaatgtggaggaagaggagcttgaagaggtagaagaggaggacgagaatgaggaagatgatccagaggagaatgaactagcagctgttgagattcaaaattctcctactcctaagaaaattaaaggtatttctgaagatatggaaataaaatgggatagtgagattcttggcaaaacttctgctggtgagcctctctatggaagagcctttgttggaggggatgtggtggtggtaggtagtgctgtcatattagaagttgatgatcaagatgatactccggcgatctattttgtggagttcatgttcgagagttcagatcagtgcaagatgctacatgggaaactcttacaaagaggatctgagactgttctaggaacggctgctaacgagagggaactgttcttgactaatgaatgtcttactgtccagcttaaggacataaaaggaacagtaagtctcgatattcgatcaaggccgtgggggcatcagtataggaaagagaacctcgttgtggataagcttgaccgggcaagagcagaagaaagaaaagctaatggtttgccaacagaatactactgcaaaagcttgtactcacctgagagaggtggattctttagtcttccaaggaatgatattggtcttggttctgggttctgcacttcatgtaagataagggaggatgaagagaagaggtctacaattaaactaaatgtttcaaagacaggctttttcatcaatgggattgagtattctgttgaggattttgtctatgtcaaccctgactctattggtgggttgaaggagggtagtaaaacttcttttaagtctgggcgaaacattgggttaagagcgtatgttgtttgccaattgctggaaattgttccaaaggaatctagaaaggctgatttgggttcctttgatgttaaagtgagaaggttttataggcctgaggatgtttctgcagagaaggcctatgcttcagacatccaagaagtaagaactattttttatatctggtaatgtgttcagtggtgaggtttcttcataagtttatctgacaatcttttttctttctttttgcaatttcttaagttgtatttcagccaggacacagttgttctccctccaggtgctctagagggaaaatgtgaagtaagaaagaaaagtgatatgcccttatcccgtgaatatccaatatcagaccatattttcttctgtgatcttttctttgacacctgcataaggttctctcaagcaggtatatacctctcttcacttcgtatttgtcaattatttgtgtacctagtttcttaaggaattcatatagttgtgtctaggatttatatgttatgattattgttgttctgatacaaagttgaactttttctctatactgtcttgtaacagctgcccgccaatatgaagccaaagttctctactattaaggacgacacacttttaagaaagaaaaagggaaagggagtagagagtgaaattgagtctgagattgtcaagcctgttgagccacctaaagagattcgtctggctactctagatatttttgctggttgtggtggcctgtctcatggactgaaaaaggcgggtatgtattatatccagtcaactcttaatcttccaaaatgcttgaataagttgtattaatattcatgctatatgtaaaaggtgtatctgatgcaaagtgggcgattgagtatgaagagccagctgggcaggcttttaaacaaaaccatcctgagtcaacagtttttgttgacaactgcaatgtgattcttaggtaaatagccaacaagttatcgcttactcttttagtgtggctattttttgcattgtgatcagttgttgtgattaattgcagggctataatggagaaaggtggagatcaagatgattgtgtctctactacagaggcaaatgaattagcagctaaactaactgaggagcagaagagtactctgccactgcctggtcaagtggacttcatcaatggtggacctccatgtcaggtatatatttcagattgtggctatacttgtgtaaatttttcgttgaataagtgaaaagcccttaacctgtgcaatttggcagggattttctggtatgaacaggttcaaccaaagctcttggagtaaagttcagtgtgaaatgatattagcattcttgtcctttgctgactatttccggccaaggtattttcttctggagaacgtgaggacctttgtgtcattcaataaagggcagacatttcagcttactttggcttcccttctcgaaatgggttaccaggtaaagtcctaacgcttttgttaaattgatttctctttagtagaagttggcatgctctgtgaagaatggtttgcgaagtacaaaaattgacttaaatctcttaaatatgatgtttctatgatgtttcccaggtaagatttggaatcttggaggcaggtacatatggagtttcccaacctcgtaaaagagttataatttgggcagcttcaccagaagaagttcttccagaatggcctgagccaatgcatgtctttgataatcccggcagtaaaatctcattacctcgaggtttacgctatgatgctgttcgtaatactaaatttggtgcacctttccgttcaatcacggtgagagacacaattggcgatcttccaccagtagaaaacggagaatccaagataaacaaagaggtattgtttaataattacaccactagaagaaagtatctatacatttacattaaataaaataacatgaactcatgtttcttgtgtcttgtatgtagtatggaactactccagtctcgtggttccaaaagaagataagagattgaatcatgccatttgttgcagtatgagaaactgtctttgcagaacaaagattgaggaatccatttctaatctctaataacattgtcttctgaaattagtcacaaaacattgtgtgctgatatggtaatctgtgaatttcagatcgactcaatcaatttgataatagagcagaaataaagttcaagactagttctctttcatgtgactggatttatttcgtcgcatcttctacaaacaacagattcgtatgacctaaataacgtttcctaaaccgtagaaattctcaatctaaacccagaaatcaattccattctaggcacaacgcaccgattcgttgtttgacataaatcaaaactaacctggagctgcgtgatggccggaatctgaagtagctcaccaggtcgacgcaggacgaaattagatagagacggcgatggagacgccgagaagcgagaagagtgatgacgaacgttgagcttctcggtgtatacggcgtcgttcgttcttttaggaaataatcaaacaaattaataaatttccatattattagtttcaataatgggcccagcccagtaactcatattttgggttaccgtgtaaaagaaacgacgacgttttttcctttgttgtggatctttgttctgtcagagatgaacaatttgttggtctttggtggtaagataaaacaactttttggtttctgggattggtacgttcgaacatctacgatcaacataccacatttgataagtatcgcattacatacactacaattaccaagccgatggctcggtacttcggttgtgttagaataacagagaaagtagcaaaatgaagagtagatggattttaaccaaataacgagtgattgatacaatgaagggttacattatactacttcaagagctgctttacatgaactgtttcaagaactccgtagcaacgagtcttcctcttgtattcactgactccttcaagtcccttatttctttctctatatcctgcaatttccatggttaaaaaatagtcacacttcaagtttcaaatctattttaagcggagattagcatgttggaggacataatcagagtaactaatctcttttgactcttgtagaaacaattcaaattcaaagacggatataatgacctttgttaaggcaactattcagaatactacttctcaagttatttccgtgagaaacacaacgacgtaaggatgcatcactaacattaggtttgatgcaaccaagacatatattgattgttaggatgctactaatgggagcaaccaaggtcatagaataaaaagattaggtttcgagagagacttgcctccataaactgaataatgaaatcaattagcttctgtttctgcatctcttcgcagtggtagtttgttataagaaagcttatgtcatagccctgttcaaaagaccaacaaagaaaccaattgaagggaatcagggaatgaatcgttcacacgctgcaggggaataaacagtaaaacatctaaagccaaggcatgcatttccgcacagtgagatgattcatgattcatacaagggaaaagacaggaaaggtgtggtacatacagactatctatcatcctaagc

SEQ ID NO: 161807 - DNA, 1642 bp, Arabidopsis thaliana landsberg
cactctaacccacaagtcattacagaaactctcctccaggtatggacctctcctctatctccggatttttaatgttcccatcatcctcgtttcctcggcctcagtggcctacgagatcttcaggacacaagacgtgaacatctcctctcgcggtgtcaccgcggttgatgagtccctcgtgtttggatcttccagtttcgtcactgctccttacggagattactggaagttcatgaagaagcttactgtcatgaagcttctcggaccgcaggcacaagagcagtcacgagacatccgtgcagatgacataaagcggttttgcaggaatctgctcgataaagcaaggaagaaggagagcgttgagattggtaaagaagcaatgaatctcatgaacaacattttgtgcaagatgagcatgggaaggagtttttcagaggagaatggtgagacagagaaactaaggggattagttaccgagtcgattggcttgatgaaaaagatgttcttggcagttttgttgcgcagacagcttcagaaacttggaatctcactattcaagaaggatatcatgggcgtttccaacaaatttgatgtgctgctagagaaagttcttgtggaacatagagagaaaccggagaaggatcaaggtacggttatgttggacgtgttgttggcagcttatggagacgaaaatgcagagtacaagatcactaagaatcacatcaaggcttttttcgtggtaaatgttcctctcatattatgtgaatttttgtcgagaaatgatatagagttgtatgacatataattgtttgttcaatcataggaccttttcattggagccactgatacctctgtgcaaacaatacagtggacaatggccgagatcatgaacaaccgtaacgttcttaagagattgagagaagaaattgattcggttgtaggagaaacaaggttgattcaagaaaaggatctaccaaagctaccttatttacaatctgtagtcaaagaagggctaagattgcacccgccattgcctctcatggtaaggacgttccaaagaagttgtgagatgaaagggttctacatagcggaaaagacaacacttgtagttaatgcttatgctgtgatgagagatcctactacttgggaagatcctgatgagtttaagccagagaggtttctaaggcaagaggaggagagaagagcactgaagcacattgcttttggaagtggaaggagaggctgtccaggatcaaacctagctactattttcataggaactgcaattggaacaatggtgcagtgttttgacttgagcatcaaaggagacaaggtcaaaatggatgaggttggaggactcaacttgaccatggctcatccccttgagtgcattcttgttcctcgaacccaacctttcatttctaaccagcagattccaagtttgtaatttccatgaatcctaattattgtttttattattgtaattccaacctttcatgaccaaacggttcaagtttggtttttattttattttcacggtttacaatacgaaaccgtaattattgtggtctactgttggatttgtcctgaaataagaaaaagttaaaagtgtccttgtcttgtcgtctctttctctcttcag

SEQ ID NO: 161808 - DNA, 3587 bp, Arabidopsis thaliana landsberg
gtcccatccctaccttcttctcctccacctctgcatctgttcctcctcctcggccatcgccttcaccaccaatcttagtacgttctcctccgccctcagtgcgtccaattcaatctcctcctcctccgccttcagaccgtcccactcaatctcctcctcctccttctcctccttcaccaccttcagagcgtcctactcaatctcctccttcgccaccttcagaacgtcctactcaatctcctccgcctccttctcctccttcaccgccttcagaccgtccctctcaatctcctcctccaccaccagaggatactaaaccccaacctcccaggagaagtccaaattctccaccaccaacattctcttctcctccacgttctcctcctgaaatacttgtcccaggttctaacaatccatctcaaaacaaccctactcttagacctcctcttgatgctccaaattctactaataatagtggaattggtactggtgctgttgttggtatcagtgtagcagtagcacttgtggtcttcactctttttggtatctttgtctggtgcttgaggaaacgagaaaaacgcctttcagctgttagtggtggcgatgttacaccatcaccaatgagctctaccgcaagatcaggtatactaggctatgtaaaagttgttacttgtgtttgcgtttcttgattctcattacattttgatattcttatgtacagattcagcattttttaggatgcagtcatctgcacctgttggagcaagcaagcgttcgggcagttatcaatcacaatccggtggcttaggcaattcgaaagcattgttttcctatgaagaacttgtgaaggcaacaaatggtttttcacaagaaaatctattaggtgaaggtggatttggttgtgtatataaagggatattacctgatgggagagtagttgctgtgaaacaactaaagatcggtggaggacaaggtgacagggagtttaaagccgaagttgaaactcttagcagaattcatcaccgccatttggtttcaatcgtgggacattgtatctctggtgaccgtagattgcttatctatgattatgtttctaacaatgacctttacttccaccttcatggtaaagaaaaagcatctccaagattacattttatatatatacacacaccactgggactgacactatctacatgtctcttaaacaggagaaaaatctgttctagactgggcaacacgtgttaaaattgcggctggggcagctcgtggactagcttatcttcatgaagattgtaagttgttgcttaaccactagtttaaccttttcaatcaaatgctagtctctaaactcttgtctattatcaggtcatccgcgtatcattcacagggacatcaagtcgtctaacattcttttagaggacaactttgatgctcgggtacaacattagtcttgctattttagatttttttcaaggtttcagttaaatggtgacttgaacagtatttgatctctcattttttttgtaggtttctgactttggccttgcaagattagctcttgattgtaacactcatatcaccacacgggtcatcggaacatttgggtaggtgcttgccttgtttgattagttagtcgcatattttggcatctagttgatatttttcattcatctactttagctatatggctcctgaatatgcatcaagtggaaaattaacagagaaatcagatgtattctcctttggggttgttctgctggagttaatcactggacgtaaaccggtggatacatcgcaaccactgggagatgagagccttgttgaatgggtacgctcactatttgaacctttcttaacatgtaaacctgtttcttgaaatcctcttgacctttgcattatttgtttttcaggcccggcctttgataagtcatgccatagaaaccgaggaatttgattctttagcagatcctaagcttggaggaaactatgtagaatctgaaatgtttagaatgattgaagcagcaggagcctgcgtgcggcatttagctaccaagagacctcggatgggacaagtaaaaacattttcttttcttctttccttgataagagtttatttacttaaaacttgcaggaatcttgaaatatattttgcagattctgagagcttttgaaagtttagctgcggaagaccttactaacggaatgagactaggcgaaagcgaggtctttaactcagctcaacagtcagcagagatcagattgtttagaagaatggcatttggtagccaaaattacagtacagattttttctcgcatagtagttacaatagcagagacgcaaacgtgtaaatatcatacacagattgttctttttcttctctcgccattagtggcaacaaaccattaagaaatatcccagttgtgtctcaaaaattcaccatctttcgcgactaaaaccagcacatcaaagctgagccttctcagagtgattgaaacagtaagaatctccctctggttttgccttctcttgatttgtgctcatgttttgtttccttattatggtttaaactaaagacactactaatacaatatgtagaaacagaggattacagaggagctagtggttgaacagaaagatgagaaaaagggatatagatgggtacaagagaggcttcgtttcttacatgaaattacttttgtatctattttttctattcttatacgttcaagtttgcacattatgtgacattacttatataataaatcaataaaaatcaatttgtctcactgtgtcattgtgtattcatgtggctcagttttttagttgcagaaagactgatttttaccattgtgagttaccatgttggagagtagtagaatcaaagaaaacgaaagattgttagttgttttgacgtccaagcttcctaaaacaatgcttctaaaagcatcttaaatcccatgtgatcctataatatgtgtaaaaacaaacacatgggtgttgctttgcgttgcatttgttgataccaatattggcaaggaacatattcctttgacacaatctgatgtcacctcttaacttctgttttctctatctctttcctttatatctttgttgttaccttaacagttttttttttttaatgcatctttgagtaataatggaagaagattgtggtgcttttgcagcagattgtgttatcttctgttgctgctgcgagtgttttatcttacaagtctttatctttattttctttaagattccttgtaaactttctcagaagatgaagaagtttgtgactagaaggcttggacgaaagaagagaagagacacggaaatcgtcctaccgacaaaggacgatgattgcagagaggagcatgggtctgaagttagttgcatggaagacgtagaggagatgttgcaggaactttccatgaaaggagagtttgtgtttgggagtttctggagacaaggagactctgcagcaaacgattttgatttcggaaactcacaatacgaaatagctaattacaaagatcatcgttccttgtcattgctcattacacaagatgtcttattagagcgttaa

SEQ ID NO: 161809 - DNA, 4956 bp, Arabidopsis thaliana landsberg
  unsure (1)..(4956): unsure at all n locations
atggcgggaaactacaattatggcggtactggcggtttctattgagattggatgtacaagagatttgatgaagtgacggggaatttgtcagccgaatacgtcgcaggagttgagcaattcatgacattcgctaatagtcagccaatagtacagagtagtcgaggtaaatttcattgtccttgtagtgtatgcaagaatgaaaaacacatcatctcgggtagaagagttagtagtcatttgtttagtcaaggatttatgcatgatttttatgtttggtataagcatggagaagaaatgaatatggatatcggaactagttacacagataggacgtattttagtgagaatcatgaagaagtgggtaatgttgtagaagatccatatgtggatatggtgaacgatgcatttaattttaacgtggggtatgatgataactataatgaggatggtagttataagaatgtcgaagaaccggtacgtaaccattcacagaaattttatgatttgttagacggtgcaaacactccattatacgatggttgtcgtgaaggccagtcacaattatcgttagcttctcgagtcatgcaaaataaggcggatcataatatgagtgaaaggtgtgtggattcggtttgtcaaatgttgataaattttttaccagaaggaaaccaagccactagttcgcattaccagaccgagaaattgatgcgcaatttaggccttccatatcatacaattgatgtttgtcaaaacaattgtatgcttttctggaaagaagacaaaaaggaagatcaatgtcggttctgtggtgcacaaagatggaagccaatggattatggcgttcaaagacaaagaaccaaagtaccatatagtcgtatgttgtatctacctattggttaccgattgaagagaatttatcagagccataagacggaagcggctatgcgatggcatgccgagcataaatcaaaggagggagaaatgaatcatccttcagatgcggcagagtggagatatttccaatcgttatatcccctgtttgccgaagaaccccgtaacgtttatctcggattgtgtattgatgggttcaatccatttggcatgtctcgtaatcattcgttatggcctatgatcctcactccatataacttaccccctggtatgtgcatgaatacagaatacttgtttcttacaattttgaattctgggccaaatcatcctcgaggtagtctcgatgtcttcctccaaccccttattgaggagctaaaagagtggtgtgataacactgtattttactcattttaggcatgtatttatcatcatttcgcttagtgatcactcattgtttcatatcattttgcatcacatttagcttattttgcacacttaggcatttaggatcatcttgcatacatattgtatgttttggtgtgttttcaggtgcaaaaggagcttactcgaccctctactctatcacaccactggggaaggaggagagcagctactcgaccaattannnnnnnnnnnnnnnnnnnnnnnnnnnnnnnnnnaccacttgataaagcggctttttggcccgttttagctattgttttcttatgtttcagagagaatttggtaccattctatagccaataagagtagaaacacgtattctagatgccaagaaggttttaagagttttgaagctaagagtatcaaaagacgatcactccagtacttcagaagtttagcatccttccgaggtatttcccatcacgtcaacgagatatttctgtatgtatggatagctagaagagtcaagattcacgtcgaagtcgaatcaaagcaatccattaagccttttagaagatatggcccgaagagtgaagacatgtcctagaatcggcgatttggaaataataagtccaaaacacatccggctgaggagacttgaaccgggcagctccgagtagctcaccacataccatttggtcacgcccaagtcattccctctttgcgccgccgtcattaggctcctgtcctaaagcccactactcggcctgatcagttacttattcatctttttgttatggtttactcaaccccacttttgattagctcctttaccatgagcgagtagatctgtagttgggtttgagggggtttcaaaggggatatcatgaggactaatagatcaaaagtctaagttggcggtttctattgttttgtttgatcgtttacactattctttctagttgagttgaatcttaatgcttgtatgtccggaacgtcacctagtacttgaccttaggtatttcattctttggcaaaatgtcgttgcacacccgccgagtgatagggacttatggactagaatcgaattggaacttaatactttgctcttgtattttgaaaccattttagcacctactaaccgatagggcaactgagtacgcaagatattagtgataatagccgcctttcaccgattaaccattagggttagctagtcttgatagagtttcgtatgtctgagaatttggaagtaaacaaacctaaccatattatcacttagattgagatctataccttatttattgaaccatgacatcaggagaaacccccgcagacctaatgcttctctcttattgcttacagtttagtttagttacttgtctttaattttggttacttattgcatacaacaaccccctctcttttattttggtcctagcttcactctcttcttaaggatttctctgaactacttctctccacgttgattcgatcctaaaatactactccgatatactgtgcacttgcagtagtcgtgtggtctttcaggtaaacgcttgaggcaaaataaaacacgcatcaatctttttggcgttgttgccggggagagattcttagttccacaagtccaagaactagagtgaactctagtacacttgcttttaagtttttgtttttgtttttctttgtttcaggaagcttaaaggatgaattcaagaaattatccgaatagctactacccgaatgtgaatcatgggtcaaaccgtggatcacatttctcaactgaccacaacacgcctgatgcatcccaaatgcatggcgagtcttggcaatcttggctgtctaatggaggagcttttgggccgatcactactctaacgatcaatccgccgccttcattcagaaccgcccacaagctaacccctcggttagcccattcccggaggtcaacgcgtcggaggacttcactcttctcatccttatggagttgcccgacatgaatatctcggatatgaccaaggatacctgcaagaggtgatgagtgtagatgttcatctgaacaactatgcttaccaaactaatgagccctaccggaccgccgaggcgaaagatagactcattggtctcattcgagactttggtgtagatgttcatccgaataattatgcttaccaaactaatgagccctaccaaactgctgaaccagaagatagactcattggtcttctccaagactttgttgatagccatcaagaagatgtgaagagaatcaacttaaagctaatggagatggaagccaaatttgaggagaagttcgatgacctcactaatcgactcgaacatatggtggggacacttgttgatatcgataacactctcctcaatcatcaagacgatctccacgaccaaaacacgagaatcgtcaatgttggatttgttgttgatacagttgagagtcatctgaattggaagatggaggagctagagaagaagctcaccaaatcaaacgaattgtcggaatggaaaagcaaccaatcttgccaagaagaagatgagtttcctaaggcccaagcccgatatgaggaggaaaacaaaaaaagaaatcggattcctagtgcaaaaaggataagatctaaattcctattccgaaaatggaaatcttgacccaataaaaaccctagggatttcaatccctaatgttcctccccaagaccaaatcgagcaagaagaggacttagaagaagaagaagccatctcattagaagaatactagatggccgaacacaattctagagaagaaagccttgaaaccgaaaaataagaactttgccttgagagtcaaggaaaccgattcgaaaaactttcagaagaaagtgatgaactcaccgaattttctagtgaagaaggagaagacgaagagctcacgaatgtccactcttgcatggcaatccgactaccagtggaggagttcccgcaaactctagcttcaggcaacttgggtccatagaagaagctaaacctaagagaagtttggatcctattcaagccggtaaggaccttgatgcaaccagaagaggccaaccaagtcgttttcggaccccctatccgagaagtgccaaagataggtattcggcccaacactaccaaccgcccgttttgcccttgctaccaacctgagaccgttctcacatgccttggaagcacaagactcatgaagaaagccttgagatcttggtgagccaattcttagatcaacaagctttggatacaagaaagctcaatgcaaggctcgatgacatcgaagttactctcttgagtaaagtcgacggcctctttgtaaaattcaagaaatcagaaaacctacgggttaaagaagctgaagctaacgaagaaaggttcaagaagatcgaagaggagcaggagagacaccttaagagcgcccaagataacaccatcaacactaaggcattgctgaggcaaataacaaattcggataaggactgtgatgcgaagattggagccttatctgacaatagtgtgaacctgggaagccggatatataagcttgaggaccatttgtatgaggaacaaagaagggtcggtgatttaagttaccaacaaaatatgtttcatgagaccttatccgagggcccattctagcagcgagcaatgacaact

SEQ ID NO: 161810 - DNA, 1403 bp, Arabidopsis thaliana landsberg
tacgtaaaacccgatctttgtcaactccacctctttttaagcctcttagatttgtgattctcactatgaaagtaaaaaacatatagctacttgttttgaatatatatatatatatatatatatatatatatatatatatattttgggccaacaaaaaattatgtgtaatcaattttaactaacaaggcaccaatgagcaatctcgtctaatttttttattcgtgataaattctatttcgatttggtttaaccgtatttacaatgttacagagaaggcatgttatttaatttcttgtgatggcaggttccatttctatgctgacgacatggcacgacaagtagaggctcaccatttctgcagtcacgtgaacgaagagatgcgtcagtgtttgatctacgacggtccggatgcaaacgctcgtctaattggattggagtacatagtgtcagagaagctgttcatgactttgcctgacgaagagaagaagctttggcactcgcacgagtgggaagtgaaaggagggttcttgttcatgcctggtgttccaggtgccattcagcgtaaagatcttgataaagtcgctaagacttatgggaaagttttccatttttggcaagttgatttgggccatgagcttcccattggtttacctaatgtcatgatggctgttacacgcgatggccagcttttccacgagatgattcagggtacgtaagaaaattcgtatattagttatatcatgtcttatattaatgtgagatttcttgtggttttacattttaattttcttagaaaaaacaatagacagtgtttagtttaatgttgaaaaaacggtctaggtagttatgactattattttttaggcattgaaattaagcgtttttgtcattaaacaattataggctgtctatatttaactcttaaccaattatcgtttaattgtcaattatttgctcgttgacttttcaatttatatttatgtagaacggcgtctagacatgtttagctaatgctccttttatttatggcataatgtagtaaagactaaagatcattggtaggttatgcttggatttgggtatggattcagagacagataagcggtttagggtatcaatagagaaacaacctagacggctttagctagcaatggcattgatatggcacactgtagttagtatatatcatttgtagttgatcagatttggatttgatgatggatgcagaggcagagaagcggtttggggtatcggtagagggggagagggactcacgggcgtatatgtctggacctgagctcgggatccatccattggcgaatggaggaggcaaagggatgaaactagagctacgagaggtcgatatcaagccggttgagtctgtcggcagcgtctttgtctga

SEQ ID NO: 161811 - DNA, 1919 bp, Arabidopsis thaliana landsberg
cggagccgaagctcatatcactcatccatcgtatattctccctcgtcatgtctatgaattcaacgtcgaagacttttatttccctttgccctcaagtacaagtcattctgaaggagggaaaatttcatgtgattgaacaaggcttatggagcaggaatcaaaagtgggacgacctactgagcgacgacgactcaactgaagcacgagaagtctcctggagaaagaataaatgggactgtctcccttttaactgggagaagttcatattacctaaagaagaaggtacccatttcctctgccgaggttgctacggcgagaaccatgaagataatagcaaggctccggtcgagatcaaacaccctcttcatcctaaacattctctccagcttgccttgttcaatgatgacaaaaccaggcaatgctattgctgtcacgaacttctccgtgacgataccgcaagtatgttttatttttgctctccttgcgattttgggctcaagtttacatgtgccaagaaatcaccagtcttgtctattgaccaacccaagtggcataagcatacacttgctctgtttccaagtctggatccccaaacttgcagcctctgtgccttgaaacattcaaatttgcttttctatatatgtcccccttgctactttatcgcccatcaaagctgtttcagcttacctcatgtcatacggatttctcgccacctccattttatcttttttacccattctttcccaaaaggagattggatttgtggtatttgccgccggaagattaacaatgattacggggggtatcattgcatcaagaaaggttgtctttatgcggttcattcaaaatgtgccactcaaccaaatgtttgggatggtatagaacgtgaaggagagtcagaagaagaagtggaagaacttgagccattcgaaacgataagcgatggaatcatacaacatttcagtcatgaagatcatcatttgacacttgatgagaacattgacagagattacaacgagaataagttgtgtcgtgaaggcagctccactccaatatattccggtactttccattacgtatgcaatgtgatttcattcttcatgaagaatgtgcaaaactgtctcgcaaaatacatcacccagtacatccacatctgcttactctagtgggaagatctgaccttgttatggatgctacgaaatcatgttcaatttgttcttggaggtgcacaactggtttcttctatgagtgcagtgaaagagaatgtcgttttaaggtacatgtgcagtgtgccacaatttccgagcctttacttcatgcaagtcatatggatcctttgttcttaacatcgaaaccaaatgaggaacgaagatgttcggtttgcaaagagttaggacattgttccacaaatgaaacattcaattgcattgagtgcgactttgctttgtgtttcaagtgtgctactttacctcaaaaggtgaggtataagcacgataagcatatgcttactctttcttatggagaggaaacaagtaccatgacgtattggtgtgaagtttgcgagaaaaaaataaatccagaaggagcggttttatatgtgtgatgagtattgttgtgtcacccttcacattacatgtatgcttggggtggacctatacatgaagtctggttcattttggctctattgcagtagcaaggtaagcgttttacccaataatcaccatatgtccagacctatttgctccttttgtaagaagcgttgtccacacaacatagttttccaatgtttaggattaatatcgtgttccacttcttgtattcgcgttaaggattctaaaaagatgaccatgtaacttggcttgacggacatcggttgagcaacaagatattattgaaattttatggggtatatacttatt

SEQ ID NO: 161812 - DNA, 900 bp, Arabidopsis thaliana landsberg
cagctattaacagacttttctgacttttgttttaaatattttaatttactaactccattgtatatcgggggggaggtagagtataaagataacttaatgggtcaaacacggttagcgttttcagaagcaccaaatgaagctcttcctcctgagtgcagacctaactttggtgctgcattacttaccaaagataacttcaaggtaagttcttttgactatattgactctcggacttgatatcagtttgtttactgttctgaatcgcaatatgtttttgtttgtccaggttaatgagacttacgattgctggtacacattagggatttcaaagataaagctttatcgggatagctttttcggttgccaagcagatgatctttctttcactgacattgctaagcaatactctattgtgtaagttcttctgttttctctcattattatacatttttcattataactaaacacatacaaactgtaatagcacaatgattgaggtcgaagtgatatacgaatgttctatcatctgtttagtttctcagtcttgccttgtcctggcattgtttttttacagaattgatcctctttcattgtttttttttcagaatctctaaacttttacagtcatggcttaatggagaatcaacaccaaagtactggaaatatgatgtgatcgctggcattgtctctggcttcgcaacttccataatcacagtcttcatcataaggatcttaagacatgcaaaatcttggttccctcaagcttgttgttcagttaagagccagttttctaaggtgaatatattggtacaagtgaaacgtgcatgtttgcttcttgtttacttctcggttctcggatggatggctacacaatacttaaaaattctttttcaaatgctt

SEQ ID NO: 161813 - DNA, 1382 bp, Arabidopsis thaliana landsberg
atggctaaaagtaaacctagccagtcctctttctccggttaccccttgtacaagttatctctaatcgttatttatctcatcgtccttgtggaagcagtcacggccggtggttcagactctacatcatcctattcctggccacctcacccctcaaagaatctcaacaaaccggtggttctattaatctcctgcgatggtttccggtttggttaccaattcaagacggagacaccaaacattgatttgctcatttcgagaggaaccgaagctcagaccggtttaataccggtttttcccaccatgacgttcccaaaccattactcaatcgctacggactctacccggcttaccacggtataatcatgaacaaatttaccgatgcggcaactggagaattctacaacaaaaacctcgatcctaagtggtggttaggtgagccgttgtgggtaactgcagtgaaccaagggctcaaggctgctactgtctattggtcaggctctgatgttaccaaaggctcttggacctgcccaaaaggattttgtaaaacgcctttcaatgcttcatttcctctcgaagaaagagtcgatacggtcttgagttatttagatcttcccgagagcgaaatcccggatttcatgactctctatcttggcgaaccagataaacagggtcatatatatggccttgatgatcctcgggtcacagaagcagtcgcgaaggttgataaaatgatcggtagggtcatccagggattgaaggaaaggaaggtgtttcgtgatgttcatgtgatactgcttggtgatcacggaatgattactaattgtgacaagaaggtgatttacattgatgatttagcggattggatcaaggtacccgcagattggatccaagcttattttccagttctggcaatcaatccgcgttggggcaaagatgttgcgaatccagacgagaagaacagggaactcgtggcgaagatgaacgaagctttgagctcaggaaaagtggagaacggagagtttttgcaggtttacttgaaggagacgttaccgaaaaggctgcattattgtgagagttccaggattccgccgatcataggaatggttggagaaggtgtaatggttaaacaaaacagaactaacgttcaagaatgtttcggaaatcatggatacgacaacatgtttttctccatgagatctatctttattggatatggtccaagatttaggaggggaaagaaagtgccatcatttgagaatgttcaggtctacaatgtcgttgcagagattctcggactccgaccagctctaaacaatggttcttctttgttcacgcggagccttctcttgccttttggattatcaacaagggaaatagaatga

SEQ ID NO: 161814 - DNA, 1082 bp, Arabidopsis thaliana landsberg
  unsure (1)..(1082): unsure at all n locations
tgatgcatcatatcgagaacacaatttcggagtatctcatcaagaaccgccaccacagcgcaaccaccagctacgaatcgagggaagaagcggcggaggaggaagcctagggtttgcaaaaacgaggaagaagctgagaatcaacgaannnnnnnnnnnnnnnnnnnaagaaatcgaagaagacaaatgaatcaacatctctctgtcttgcgatctctcatgcctcaaccttttgctcacaaggtttaacttttatggatatatatatatattttttaatgtttgtaaagtttcaagtagggtttcaatttttatggataatttttttaaatggtttactatttcgatttgggtttcaattaatatttacaattcactgaaaaagattaaattttcatcttgagttttattttttatgaaagattcattctaacggtttaaatctatttgattttcaatatttatggccaattctaaaaaattgattttttattaaatatatatttgggtttttatttgtttacttatatgttgttttggtggatttatttgtttccccatgaaagggtgatcaagcttcaatagttggtggagccatagatttcatcaaagaacttgaacacaaattactatctcttgaagctcaaaaacatcataatgctaaattaaaccagtcggttacttcttcaacaagtcaagactcaaatggtgaacaagagaatcctcatcaaccatcttcactatctctatcgcagttctttcttcattcatacgatccgagccaagagaataggaacggctcaacaagctcggtgaaaacccctatggaagatcttgaggtgactctaatcgaaactcatgctaacatcagaatcttgtcgagaagaagaggtttccggtggagcacgttggccaccaccaaaccgccgcagctttcgaagctggtggcttctctacaatcgctgtccctctccattcttcaccttagtgtcacaacattggacaattatgctatttactccatcagcgctaaggtaataaaattaaaaccctatcatctgaaccggactaaaccggattag

SEQ ID NO: 161815 - DNA, 799 bp, Arabidopsis thaliana landsberg
acatcttgcttcattcaacgacactttcattgtgggttctgtctaaattgcgttccatttcatcatttatgctgttgaaactgacctcgtatatctccaattccagcatgttactgatttgtctggtcgtgaactcttgtccgtatcaccggtaagcatcttttgatttcttcactggtccttgctcattcctctatatgtggaacgagaccacaaatgttatactcttttgtggatatgacttgttagatgaattgttatgtagtgtctcaattctcttgattagttcttgttgtcctaaacatttcgataactttcctcttttgattttgattaggtggaatgaaggtgaaagctgatagagatgagtcctcaccttacgcagctatgttgcagcacaggatgttgctcagcgatgcaaggtacttactacatatatgacctgagacattcattacaaaactaaattcctcatccttgttaatgaatgtaaactactattctaaacacaggaacttggtatcactgccatgcatgtgaagctccgtgccacaggtggaaacaagaccaagacacctggtcctggagcacagtctgcccttagagcccttgctcgttccggcatgaaaataggccgtattggtaagcttcataacccatagtcttatctcagctattttcccttttgtattgtttcctcatcatttctaacaccgtacttgttgttgcagaggatgttactcccatcccaacagacagtacccgcagaaagggtggtagaagaggaagaaggctctga

SEQ ID NO: 161816 - DNA, 1097 bp, Arabidopsis thaliana landsberg
ctgagatccgatccgattcggatcctaccgactcaaacgagccacctgattcggatcttgacctcaacatgacgtacactctcggacccaagatcactaactgggatcaaaaacggaaactttggttaacgcaaaacccagatttccccagtttcatcaatggtaaagctaaggttttgcttttaacaggttcgcctccaaaaccttgtgacaaccctattggtgatcattacctgctgaaatcggtgaagaacaagattgattattgtaggattcatgggattgagattgtgtataacatggctcatttagacaaggagcttgctgggtattgggcaaagcttccaatgatcaggagattgatgttgtctcatcctgaaattgaatggatttggtggatggacagtgatgctttgttcactgacatggtgtttgagattcctttgtctagatatgattaccataacttggttattcatggatatcctgatttgttgtttgatcagaagtcttggattgctttgaatactggtagcttcttgtttaggaactgtcaatggtctttggatttgttggatgcttgggctccaatgggacctaaaggacctattcgggaagaagctgggaagattctcaccgcgaatcttaaaggaagaccggctttcgaagcggatgatcagtctgcattgatctatctgctgctttcgcagaaggagacgtggatggagaaagtgtttgtggagaatcagtactatcttcatgggttttgggaaggtttagtggataagtatgaggagatgatggagaagtaccatcccggattgggagatgaaagatggccttttattactcactttgttggatgcaaaccgtgtgggagttatgctgattacgcggttgaacgttgcttgaagagtatggagcgagcattcaactttgcggataatcaagtgctcaaactgtatgggtttggtcacaggggattgttaagtcctaagatcaagaggatcagaaacgagacaacatttccattgaaattcgtagacaggtttgatattcggagaacaacaccgctcaagattgaagcacgaagctag

SEQ ID NO: 161817 - DNA, 1417 bp, Arabidopsis thaliana landsberg
atggctctgctcttgaactcgacgatgactgtggctatgaagcagaatcccgcgaccgcggtatcttttatgcagactacttgtttgggatctagtttttctcctcctcgtcatcttcaagtttcgtgtgttgccactaacccgaggcgagtttttttctttttagatcttcaattcttcgcgttgatctcaatgtattgttaataactttttcactcattgggttttatatacttgcatattaacatatgttctataaattacaataagacacgaacctgatcaaaataacagtgttcttaattaacgatgaaaatgttacagcaagacgtttcgacccatcaaagaagtatcaaaccaagtgacacacacaataacacaagagaaactggagatcttcaaatcaatggagaattgggcccaagaaaacttattgggtgacctcaaacccgtcgaaacttcatggcaaccacaagactttttgccagaaaccaaagacgaagaccgattctacgaacaagtgaaagagctaagagatcgaacaaaagagatccctgacgattactttgtagttcttgtcggagatatgatcaccgaagaagcattaccgacttatcaaacggttatgaacactctcgacggagccaaagacgagaccggtgttagtctaacaccgtgggcggtttggcttagagcatggacggcggaggaaaatcgacacggtgatttgttgaataagtacctttacttatcaggtcgtgttgatacgcgacatgttgaaaagactattcaatatcttatcggatccggcatggtacgttctttttggtattggccaaattgttacactcccataaatataagtgtgcttaaaatgtaaattataatttctttgggaccatattgataatgtttataattatttttcaggacaccaaatatgagaacaatccctataatggctacatctacacttcttttcaagagagagcaacttttatctcccacgccaacacggcgaagctagccacgacatacggcgacacaactctcgccaaaatctgcggaacaatcgcggcggatgagaagcggcacgagatggcgtatacgcggatcgtcgagaagctattcgagattgatcccgatggtaccgtacaagctctagcgagtatgatgaggaagcgaatcacgatgccggctcagctgatgcacgacggtcgcgatgacaatctgttcgatcattacgctgctgtggcgcagagaatcggagtgtataccgcgacggattacgcagggattttggagtttttgttgcggcggtgggaggtggagaagttagggatgggtttgtccggtgaaggaaggagagcacaggattatctgtgtaccttgccgcagaggatcaggaggttagagg

SEQ ID NO: 161818 - DNA, 234 bp, Arabidopsis thaliana landsberg; identical to SEQ ID NO: 10405

SEQ ID NO: 161819 - DNA, 2956 bp, Arabidopsis thaliana landsberg
  unsure (1)..(2956): unsure at all n locations
taacgattatggtttcattgttatctttgagactaacctattgatatttgggttttgagttctaaatcttttgcaggagaatcatgagtaactacagtggcagttcttcaattgatcctgactataacatggataagacagagtcgtcgtcttcaaggccaaaaagagaacagaaagaatatgataacttcaggagaaaagctgagatagctcaagggaagagagcaatgacagagaggtatgagcttatagatgaggatctgaaagccgagtacatgcctgagcatactcgcagagccaccaaacttcttcacgaacctgatgtattgtctgctgaggagtatatcagtttctttaaactgaatgagttctgtagcacaagatatccatgctcgaccacacttgcacaacttggattactggaggatgttcagcacctgtaccagagttgtcatatggacactctgatggcatatccatatgtagcctatgaagaagaaacaatttagttcctctccacactgtaagtggagctttaccaaggtatgacctctgatgatttggaatgcgaaggattgggattcttgcgattctctatgtttggtttccccagtggaacaggtactaagcccaagtatgacagagaagagttgaaagacttgtggattaccattggcagctctgtaccgctgaatgcttccaggtcaaagagcaatcagatacgcagccctgtcatcaggtacttccagcgttctatagccaatgtactctactcccgagagatcacatggactgttactaactctgatatggagatgatcgcaatggccctcaagggaactcttcgccaaactaagaatggtatgtctctccaaggtgaaatcaatgacacacctctctctgtacttcttctgatccatctgtgtggatacaagagttgggctgtcagcaataaccgcaagagagcaggaggcgctctgtgcataggtggtgttgtgacaccgattctgatagcttgtggagtcccaatcatatctgtcggactcgagccgcgagcaatggatatcgagcacctacgtcactgtgaattcctggagtttgcaatggttgacgacttccacaggttcaggtttgagcactctacaaacaggagagctaacatccttctccctagccctgaggttacacgaataatagagggagataatattgattttcgacctgaggttggacgcctctactatgagaacgctccgccattagatgaggaggatcttatagaataagcagcctggatggtttggatgaagacagagcagnggagtttgacactagcgtgtatcattaagatgaacatgtacctccagcgagggagagtaagagcttgagtgaggctcataggaacaacaataagctgcagaggtggtgcaagaagcatgacacgctgctcgccaagtgtttcaagactatcaagtttctgacaaaggttttgggatttgtaaagaaaagaaagagttcttgttagctattgaagatgggcaaaagcccttgcttttagaatgttaaaaacatgaaccttagttgataaagaaatccaaatccgctagatgtatcaaagtgttgagaaagcttctcctagagttaagagaaaagaaaagaatgattagaaaaggggcttaaaagattcatgaatgcaaagggtagagttaagttcttatattgagattggagatgggattactattagagcttcatttgatatactttgggtacatgggatcttatctctgtatgcatagcttgggacttacctttagcattctactaaagcttaatcattttttgagagatccccagttactgaagcctattctgtaagggaccatctttgtctcttgaccttttaccttagccaaatgagttcattgatgatgcattgcttgattcacgttccagaactaatgaatgttaaagggattggtagatttaaaaacatgtgtaggtcgagcatatgagtncgattgattgataatgaggcatggctaacgtttttaagtagaattcaatcatattgcagcttagaactttcaacttggacattgatttcatctggtttatctggtgctttggctctgagtccccgctttcaaacctcacctccagcttgttcttgatggtttgcttgagggcaagcaaagactaagtttgggggagttgataagtgtgtattttgcatgttttgagcatccatttgtcatcagtttaacatcatatcatcactgtttaataccatttctcatcatttgtcatgactttatatgtttaggatagatttgcatgcatgttgcatatttgcgttgatttcaggtgatttggagctattgacgagctatctggaagaagcggacctggtcatgtcaaaccactcgaccccgaagtcgagtaggagtttcaagatctcaacagatcactcgacccccaggtcgagtagaggacatcactacttcgaccacatcacttgaccctgaggtcgagtgtcttcatcccatcacctgaccatcactcgatcacatcactcgaccacgaggtcgagtgtcttcaccttcattgccagaccactactcgatctcataactctacctggaagtcgagtatcaccatcaccaccactagagtgcatactcgatgacaagcttcaaagccttcttcattccgcactcaaccagacactcgagcagaaggaagaaaagaagactccagctattcactcgacctcccattcgaccacatgggtcgagtacagttcttaatccgtcccaatacttcgtcgttttaagtattagggtttcggaatatttggctataagtagcatgtacttcacattttcgcagagaagaggtttttattctagttttatttttgcagacctggtgttctagacttttgtaatccgga

SEQ ID NO: 161820 - DNA, 381 bp, Arabidopsis thaliana landsberg
atgacgacaaatccgaaaaactattgcgttaggcctaattatggacttattcttccaaagtcgacttgtaaagtccgttctcaaatctttttcttgtggaaacttttttttttcccttcaactgccaaacttgttcttggactaggaatttgatgaatctttgtttggtgtttatctagtaaccatgcaagctcaaaaggaagcccggcccatctgatatgcagagcaatgaaaagtttatgattcaaagagtaaaagctagtcctgcagtcacagccaaagaagttactcttgagacggcactgatcactcacattgttgatttgatgaataattcaaaatttggtttttgattccttaaagcatttgtttcattttcct

SEQ ID NO: 161821 - DNA, 958 bp, Arabidopsis thaliana landsberg
caacaagaatttagttatcaagaaagtgtgaggtcgtctcgaaacctttgctcacttgattgaaaaataaagctttctttccgttaattcttagattttgagatgggttggctgaggaagaagaaggagaagccaaaatccgatagagtggccaagagaggggccaagttgttagaagagctcatcgaattcggccatggcaaatccaatcccatcatattcttctctgctgatgaaatccgcaatgccaccaacaatttcagcgactctaatcttgtttctcgaaaagaattttactaccactcgtattcaggtaagaacgggaaccatcccatgattctcattaagaaagatcttggcttgtcgagtctcttcagagtagatcttttgagccgcgacatagcagtttcatcgatggtgagtggtcacaaaaactttttgaaattggttggatgctgtcttgagtttgaagattcagtcaaggtttatcatgatgttaagaaacattacaaattagaaataagtgaacagccatggaaaaggagaatgaagatagctgaagatattgctactgctttagcttaccttcacactgcgttccctaggccctttgtatataggattttgtctcattggaatatcttattggatgaagatggggtcgcgaagctgactgatttctctcactgcgtctcaattccagaaggagaaacttttgtccaggttgaggcagcacagggattctatagttactgtgccgatagctacattagcagtggcgtagtctcagagagaacagatgtctctgccttctggaatgtttatgggtataaggcttctagtaggaaacgaaagcttctccgagcattatcaagtagaagaagaataagaaagtgaaggtggatttgtcagtaacatcaatagacatgctcgaattttcctgacacaaaaaaaggaa

SEQ ID NO: 161822 - DNA, 2838 bp, Arabidopsis thaliana landsberg
atggctccatgttcttcgtctggctctagtagctgttggaagtatgacgtcttccccagcttccgaggggaagatgttcgcggaaactttctcagccacttgatgaaagaatttgaaagcaagggaattgttacattcaaagatgatctaatcgaaagaagccagacaatcggattggagctcaaagaagccgtaagacaatctaagatctttgtggtgatattctcaaagaactatgcttcttcaagctggtgtttggatgagttggttgaaattttaaagtgcaaggatgatatgggtcaaatagtgatgactgtcttctatggagtagatccatctgatgtgcggaaacaaactggagagttcgggatcgctttcaatgaaacatgtgctcgtaaaacagaggaggagaggcaaaaatggagccaagctttgaactatgtgggcaacatagctggcgaacacttgctaaactggtatgtctttgatgaaattgaattatttccttatgttccaagtggtaaccacaatagaggaaacaagcacaaaaaatggttaataggaactacgttgagtagaatagattttcattgattgaagggaatgtttgttgaatgaattttcgaaaatagagtagtagcctatggcaaaagaagaatgttatatctatgattagtttttttttcacaacaatttaatggaaatgttttttttctttcttttattagggacaatgaagcgaaaatgattgagaaaattgcaagagatgtttcagaaaaactgaatgttacaccatgtagggattttgatggcatggtggggattgaggctcatttgaggaaaattcagtctttgctagatttagataatgatgaagttaagatggttgcaatctctggtcctgcaggcattggtaaaagtaccattggcagagctttacatagtctactctctaataggtttcatcatacttgttttgtggataacctgaggggaagccatcccattggtcttgatgagtatggtttgaagttgcgcttacaagaacaacttctttcaaagattttgaaccaagatggttcgaggatatgccatttaggtgcaataaaagagaggctatgcgacatgaaagtgtttatcattcttgatgatgtgaatgatgtcaagcaattagaggctttagctaatgaaagtaattggtttggtcctggaagtaggattattgtgacaaccgaaaacaaagagcttttgaagcaacatggtatcaacaatacctactatgtaggatttccttctgatgaagaagctatcaagatcttatgtagatatgcttttagacagagctcttcacgtcatggttttaaaaagcttacaagaagtgtaacagagctttgtggtaagctcccgttgggtctacgtgtggtgggttcatctttacatgggaagaatgaggaagaatgggaatatgtaatacggaggctagaaactatcattgatcgagatatcgaacaagtactaagagtcggttatgagagtttacatgagaatgaacaatcattatttctccacattgcaatcttcttcaactatgaagatgttgatcttgtgaaagccatgctcgctgaaaatgacttggatatcgcacacgggttgaaaatcttggtaaacaaatctctcatatatatatctaccactggggaaataagaatgcacaagttgctacaacaagtgggcagacaagccattaacagacaagagccttggaaacgcttgatcttaactaatgctcaagagatttgttatgtccttgaaaatgataaagtaagttatttctaaggaaacctttacacttttaaaaataatcttacctattttactaacagtttctttatattcaaaacatgattttgggtactggagttgtgtctggcatatcatttgatacatcaggaattagcgaagtgattttaagcaatagagctcttagaagaatgtctaatctccgattcctaagtgtttacaagacaagacatgatgggaatagtataatgcatatacctgaggacatgaagtttccacctcgcctaaggttactacattgggaagcatatccgagcaagagtcttcctcttggattttgcctggaaaatcttgtcgaactcaatatgaaagatagccagctcgaaaagctctgggaaggaactcaggttagttaccatagtattctgtgttttcattttagcagtagttaaatagcaacatatgaaataagaagtttctcatttgaagttctgatgttccttctctcttctatgatttgacattcagctgttgacaaatcttaagaagatggatttgtcaagatcagttcatttgaaggaactcccggatcttacaaatgctacaaatctggaggatttgaatctaaatagttgcgagagtttggtagagattccatcctctttttcgcatcttcataaactaaagaagttgtggatgagttactgcataaacttacaagtcattccagctcacatgaacttggtatccctagaactcgtcactatgactggatgctcaagattcagaaaaattccagttatttcaacgcacatcaattatctggatatagcacacaacacggagttcgaagtctgtgcatgcatcaattgctttgtggtgtcgtctccactatctcaatatgagctacaatgaaaatttcatgggattaacgcaccttcccatgtctttaacacaacttcatcctaagatattccgatcttgaaaggactcctgattgcatcaaacctcttcatcagcttgtttcacttgatctaa

SEQ ID NO: 161823 - DNA, 1533 bp, Arabidopsis thaliana landsberg
  unsure (1)..(1533): unsure at all n locations
ttgggtggtttgtgttcttngagtttgaggttaatttttacactgacttagtttttgtggaatggttaaggctgtctttaagcaatttggaggagggggatatggctctggtttagctgatgaagcagaactcaatcagcatcagaagctagaaaagctttacatatccactcgtgctgctaaggttgtttttcttaagcttttgactagtttgaagttttgattactattgattttggactcattcgttcttcgttttcagcattaccaaagagatattgttcgtggtgtggaaggttatatagttacagggtcaaaacaagttgaaataggtgatttttttgaccctttgagttttaacttattgtatttttttatgtctgttatagacttgaattggctcacaggcctgtctttcattttgcactcatttttcatcaggtacgaaattgtctgaggatagcaggaaatatggttcagagaatacatgtacgaatggtaacgtattaacacgggctgcactgaactatgggcgtgctcgagcacaaatggagaaggaacgtggaaatatgttgaaggctcttggtacacaggtttgtctttctcatcttccatcaaagtgttaagcaatagcacatatctgttgcatgcaatataactacacaaataattactttcctgccattgttagtggaatgactgccatttgtgggaagatctatttcttttatctggaataatttgttacatactccttaaaagtcaattaatgtcatggtgttcacttggttctttctttattgcggtttggctactacaatcatatgtcaatcctgaatttgttaggttgctgagccattacgggcaatggttttgggagctccattggaggatgctagacatcttgctcaacgctatgacagaatgcgccaagaagctgaagctcaggtacggtgaaagataataccatgaagctatttaattaccgttagtagaatatgggttttttcctcttccaagaactagtcattttattattcgcatgatagaactttacttatgcgcctgctttaatccaaacaggctacagaagttgccagacgccaagcaaaggcgagagagtctcaaggtaatcctgacatcttgatgaaactggaatctgctgaagcaaaacttcacgacctaaaatcaaatatgacaatattggggaaagaagctgcttctgctttagcttccgttgaagatcaacaacagaaattgactcttgaacgacttctttcaatggtagtgcgattggttacaagatccatttctaggtcaactttgatttacttacccatatgtaacaactgtatttttcattcctgatcacaggttgaatctgaacgcgcctaccatcaaagagtcctccaaatacttgatcagctcgaaggagaggttggtgtgcattagttttacagctatcagtttcctgtgataatagtattcttgtcgaacaatcagttcatcattatatagtcaactaaggacaaa

SEQ ID NO: 161824 - DNA, 17832 bp, Arabidopsis thaliana landsberg
  unsure (1)..(17832): unsure at all n locations
aagcgattgatccaactcagtgacctcgatgagatccgtctagaagcttatgagagctctaaaatctacaaggagagaaccaagcttttccatgacaagaagttcatcaccaaggatttccaggttggtgatcaggtgctgctattaaactctcgcttgaaactctttccaggaaaacttaaatccagatggtctggccccttctgtatcactgaggtccgtccttatggagcagtcactctagctggtaagagtggagatttcacagtaaatggtcaaaggctcaagaaatacttagcagatcaaatccttccagaggtgacgttggttcatttccaggaacttcttgatgattaaaggagtaaaagagtcaagctaatgactttaaacaagctcacttgggaggaagtcccatgactatctttgtaaataaatttttcttttcttgttatttttgatttgtcttagttgtgtttgtggttttcaggaggaaaggaacaacgtagagatagagtaaaaattcaaaacttttactctacagaaggcctttagatcgagtatatagcccagtggactagaatttttttcgttgcacttcgagaccttgcactcgagtacattggtcgagtatgagtgatgtttaaaacccaaaaaattttaaatcatcattttactcgaccaacagaagctacagagttttacagggagctcaccaagtttacaacagattttaggatttcctgaaattttcctagtgaagatagagtaatgatttagaacaaagagacaagcgagggacccactgctgcaccctatgtctcccacgcacctaaccaagagacaagaaatccaactccttcttctcacaaccactcgacctctcaccttatcccatctccatacaccactcgaactcgacgaaatcaccatcccccacctatcacttactcgacctcgttatctccacctcacctattaaacactcgacccctcctcattcatcaccaccaacaaaccaaactctcatctctcttctctcaaccactcgaccccatccctcttgaatcaacgctcctttatctcctttactcgacctcgtcacctcctcctcaccacctcataaactcgacttcatttctcccacttctctcccataaaacactcgacctccaaacccatctcctccccacaaccttcactcgatcgccgcttctcaccgcctctccatcatcgctgcctgctcactctctccaaggaaacaactcgagctctccatttcactcactcgacctaaccatctatctccgtctctcatttgctcaacanacagccgtttctcctctccaaggaatacactcgaccactacacagccttctctagctcacgaatccactcgacttcacgcaagagcgcctccgcttctccaccaccgattcaatcactcgaatcaccgctcctctaacaacactcgacctccgccatcaattcgccttcaacacttctcgctcaaaatcactcggccacagctctcatcacctctccactaccacaaccactcgaccccttcacaccaccgtcttctcttcttccgcgagctccactttacttgatccccaatcaccatcttcttcatcgtttcatcactcgattgcatctaccaaccgtctacaatcactcgacttcttctcacatcatctcatcaccaatccgtgtctctacactcgtcattcactactcgaccgcctgctctctccaaggacactactcgaccttgccgttcggtttcctagaccgaagctcctgcatagcctcgtcgctttcaccactcaagctccatcgcttcactcggccttccataatcacttgaccaactacccataaaacgaaaaagaaaatcgagaaaaaagttcacaaccggctttggtatactcgaccggtttactcgacctgtttttgctttgtgcggtttgtgtttttggtttgctgttactaacgtattaacgtttatctttgagttttgtttgttttcaggtttcatcatgagtaactacagtggagaatcctctatggaccctgattacaatgtggatgaagctgagtactggtccgctagaccgagagagcaacatgtttaccagagcttgagggatgaattcgaacgctctccagcccgacgtaatcagaaaagagctgaaatcgccagaggaaagagggcgatgtcaagtagatatgagctgattgatgaggatatcgaaactgagtatgagccagagtcatggcgcaaggagacgaagctgctgaacaaacccgacgaggttacagtggaggagtatatcagattcttcgagatgaatgacttctggggaacgcggtatccgtgctatgagactttagcccagctggggttactagaggacgtgcagcatctgttcgagaagtgtcatctggagacactcatgtcttacccttaccctgcctataaggaggagacgatcgagtttctttccacgctgcaagtggagatctatgaggcactcacggactttgagctggataccatggggttaggcttcttgacgttctcagtgaatgaacagcggtatcagctatcgatcaagaagttggaagaactatttagtttccctagttgaaagggaaccaaacccagatttgacagagaagagcttaaggatttatgggccactatagggaacaatctaccgctaaactcggcgcggtccaagagcaaccaaatctggagtcctgtgatccgctacttttagagatcggttgccaacgtcttttactccagggagtctacaggcaccgtgtctaacacggacatggagattatagattatgcgcttacagggattctccgccggacgaagggaaagaatgtcttgagaggcgatctcaacaacgcaccaccagtaatgcctctgttgatccatctgtgtggatacaggaagtgggcgttgacgaacggaaagaagaaggtgagaggagcactatgcgtgggtggcgttgtgacgccaattctgcaagcctgtggagtaccgctcaaggaaccagggttagcaccgaggatgatggacttggatcatttgcgccgatgtgagtttgacatggttggcgactttcaccgctataggtctgagcattcattgattagaatcgccaacattcttctcccctgcattgacgctactaggattctcgagggaaggaacattgatttcaagcctgcgcttgaagatctttatttcgagggcagtccgccaactgaggagattagtcacaccgaaggagctacaacagaagatgttgatgagacagatgatatagatgaggcggagtttgacacaagcatgtatcatttcagtgagcatatacctcgagcgagggatagcaagagtttgagcgaagctcacaggaacaacaacaagctgcagaagtggtgcaagaaacaggataagttactcgccaaatgcctcatggctatcaagtttctgaaggacaagatcagctgctcctcttccactacagctattccgcagggacagctccctcaggacatgccctcgaggagatatgacgcgcctgagccaagtcggcacgagcctgagcctagagagcgggagattccgcatgtccctgtgaggtattcatcattcaagcctcgtgaatctgggaggacgaggaggaccacactcactcgatctagcactaggagcggacgacttctgcagtctcgtagtttacgcgaccgcggtgctggctgtagcagaaggagagaggtcgagtatcctcagagcggtgctggccgccacagagctgatgaggtcgagtacccacctgctggagctgatacagaacaaggtggttcgtctatggcctaggagcaatcacaggcagccattgacgagcaactacgttcattctttgactgaggtaagcgcctcactttaccattgtattataccatctattgtgatttgtttcttcattttttttgtttctgtgattggatttgtcctgagtactctcttccatgtttattcgcacagtggactgtgtgatttaagtttgggggagggctcacgaagtgtgcgttgcattgtgtatatttgtgagtctgcatcatctaaggcatagaaaaaaccataaaaaaattgaaaaaatttcagaaaataatttcacaaaaacagagtgtcatgtagattgcatcacattttaggattgtatatagagtgcttgcatataggattgtcgcatatgcataggggattatgatgagatagccttgtaagcattttggttcatcgttgctagttgtttgatgcatagtcaatgattgaagtaaaactgcaccatgtcttgaatgctctactcgatcacactgtcattatctgatatcattccctatcaatttgaacctgaatctaacttgcaattatcatgtcttagcatcgaatttgaactcatggtaccaaatacatacttgggttttctttaaagttttcaccacccttgctaacgaaagtagcggcttccatcattgaagtagtttcacatgaaaaggggacattccaccgaggagtgtcgcgcctttanaagttaatcgcagctaggggcaaaactaaaaaaggttcaaacccaaaagttgaaacccctcctcccgacgaacagtagcaggagcaaactcccaaacaaaagaaacgggaacgaacgccgggggaggtgactctcncccccccactaggagagaacgcatagacctagtctttgtagaactcgatctaggtggcaggacaggaagatcagtcaccacaccttcccccgcccccataagaaaaacatgaggtttccattacgcctctcgaaattctgcagaagcgagaccgagcacctctccccgtaacgcatcgatttcatcatgggagggtctcagctctgcaacgacttaatcaattcgatcaaaactcatcagaggaaggcagattcctacacaaaagcaaaagcctgatgatgtgagaccccgtcccggacgtctcggcgtccggcgacgttggactcaagttcgcgcctcttcccggccgaacctcttaattttttgcgattcaacatagaattgcctttacgaggcttaattctataatcgctctcttattacacagcggaagtctttctaaccttagaattgccttgcgattcaactcttgtacaggtttcatcgtctttgtcccttagacttagatcaatcctttactcggtcaagacatgcatattgttcggtaaccattctaggcctaacaatcgcatattcctttatcctattttcacggtcgattcccaaacgtctatcctaactagtaagctacatcgtcacataccttggccaatatgcggatttgattccctagcccgtgtgtcgccttattctattcgttcaatgattcgtatccgatcgtgcattgatgaacgaatccctatctttacttagccatacaaccaaccaaccccactggtctaagtacaacgatagagattggggatcgtacgattcccttggttcacgatggccaaatcaagctcttggcttattggtccatccgttctccaagcgtacgcccctccggttacatagtagaccattgagccctcggcttatcgaactatccatgtttccgatccggtcgtttaacgctacgaccgcccttgggttactaaccgtttacctgtccggtccatggtggtcagtaaagctttcggcttaatgatccatccatgcggtccgaacgatatccttatcacacccaagggtccgtggatttatccaccggatcatcgtaggctagcccatgaaatccttcttccgtcggccttaggtttgctcgcgggtcctacatttgttttgtccatcggttcccaccgtggactttctcgttggttatccgtcgagtcacccttttgtcttatcgatctccaatcggtttcaccgtggctaaggagatagatacatgaaggcagccgcgatattgatgctatatggtgaatcacgttccttacccattcttggtgctttttccctttaccggtaagattgtatccatgggcgacccttgggtgtggtcggatgcacttatccttgtgctttttcgaacacttttctcaatccatcccatccaatgatcggtctgtccgacccattccgtctgacgatcagcctgtcccatccgacccgtccgacgatcggtctgtccgatccgatccgtctggccgatctgatccgtctgtcgatcggtcctgccgatccgatccgaagatcggtctaccagatcagattcgtctctaagacgaacggtctaccctctccatcctctacactccatcgaaccgttggaccgggaggtagtatgcgcatcagttcggtcgagttatactcgccgatccgcaccccctttccgaccaacaacttcgggatgtgttgggactcttttaagaatgttttgtggtgtgtggatgattgtgagataattgtgagattattgtgagattatcccaaaggccttgggcgtcctcccttatatagggggcgaatggatgcttcccgaagcatcacatccgttccttgcacccttccgaaaggtcacatccgttccttgcatccttccaaaaggtcacatccgttccttgcatctattaggcgatgcaaccgttcgttggtacctgctcgaccttacaccttttggccgagacacctcttcacccgtgagctaccacagtctaccagctcgagtgtcagctgaccggaccacccagctgggtcagtacacgatcagctcaccgagctcagtcgagctgtcggtcagctcacctagctgagctagctagtcttccagctggtttagctcacctagcttagctagctagttcatcctagcttgtccagctcacctagctggttcagcttgaactttctcgttcttctgactaagtattttagtccgtttcttgaccatggtctagttttctcctaaaacaacctggcctctttatgaacgcgggacgcggtcgttacaagtctaccccccttaaactgaattcgtcctcgaattcggcgtgtgtaagatcttgcttactccctaactcgggacacgggcgttacaagttgtaacgcccgcgatcctcaataggatcgttggctaggacttggtccgagagaggaaggtggagtctcggacaagtgagaaggagctggccataagctcggacaaaggggaaatcatgcaggctaagctaggatcgtaaagaaatcacttgggtcagctcgcccaaagctcaagctcagctggaaggagtgacggttactcaggtcgagtgacagtccagctcgggcagctggacgagtgacggacgagctcgaggcagctggacgagtgacggttgaactcgaggtagctggacgagtgacggacgagctcgaggtagatgggcgagtgacggacgaactgggcggttatgggcgaagagatacaactcttcggaaaggtgcaactcttcggaagggcgcaactcttcggaaaggtgcaactcttcggaaaggtgcaaggaacggatgtgttgattcgggaagcatccattcgccccctatataaggaagggcgcccaggaccattccactcaccacaacacaccgaaaacacaagaaaactcaccattaaaactctctccctcttgggagaataaatagtcttaggattcggtagccgggctgtggccggcaataaagaaggaaggtcggatcgacctaacctcgagaaggaaggtaagggatcctagactttgagtctaagggttctaggatgtgaattagtagtcggatccttgaaaggaccgactagagggctgagtagtatccgggtcatgtgcatcctacacaagactcggtccgggtagggatcggctgaggcggggacgcggctcggcggaggaccggcgggtcttaactgacctgccgagaatcggccggactgatgcgcgatcttcccctctctgaattctctccacggatcggagtagtgtatggcatatagagcattgcatggacttgcatacatatgattaagtaaataagattacttatggctctatgactttcaggaacgaatggtgatcgtgggaaggacttggcttaggcgcgagagactcaaggccgggatgatgggtggtgatagttcagatagtctagggatcgattatatgacttgtaatagcttatatgcaaactcataggttgtatcgaatcctttgcttaattaataaagtgtccgattgtttgtttactctattcgtctcatatattgaatctcggaatcatatgaaacggattagactaggaaagaacctcataaacggttagggccgagtcacttagtggcttgggtcgagagaactcgcccggactttaggcagtccggatcggggcctttcaagttggtatcagagcatgcttggttctaggactaggtgttgggttaaggggtatcaccactcgtcggcttgagaatctcgcggtagttgttctttactcttttgcgattttactaggagttatgtggattaactttagaggtttcgcagatgggtaagagcagcaaaacgggaaagagtaagaaggacaagggcattgtcgaggagactttggttgaggaggaaacgatgatcaacgagaaaaccagagtcgggacagtgttcgatgggacagactcggccggacctgaggccgggaagaagtccataaatgaggaagcaccggagagtagtggtgcaagggacatcacggataaccggaacaatactccaacggcccaagaacagtgggatttgatgaagggaatgatggcgcaactagccacattgaccaaggccgttgtagcagatccggtggtcctaaaaggggataaccaaaaggacgatgactcggaagttgtggaagtgaatccacaaccgaattatgggcggaaaaggggagactatctgagtcttctcgaacatgtctcaaggctgggcacgagacacttcatgggcagtacggacccgattgtggccgatgagtggaggagtagactcaagaggaacttcaagtctacccgctgccctgaggattaccaaagggacattgcggtccatttcctggaaggagacgcccataattggtggttaaccgtcgagaaacgcagaggggacgaggtccggtcctttgcggatttcgaagacgagtttaacaagaagtactttccaccggaggcttgggataggcttgaatgtgcgtacctcgacctagttcaagggaaccgcacggtgcgtgaatatgatgaggaatttaaccgcctaaggcgttatgtgggacgtgaacttgaggaggaacaagctcaagtgcgccgatttatccgtggactaaggatagagatccgcaaccattgtttggtccggacattcaactcggtttccgaattggttgaaagggcagcaatgattgaggaagggatcgaggaggagaggtacttggaccgggagaaagcaccgatccggaacaatcaatccaccaaacctgcggataagaaaaggaaatttgacaaggtggataacactaagtccgatgctaagaccggggaatgcgtgacctgtggtaagagccacagcggaacttgctggaaggccataggtgcatgtggccggtgtggaagcaaggaccatgcgatccaaagttgcccgagaatggaaccagggcagtccaaggttctcggtgaagagacaaggacttgtttctattgcggaaagactggacatctaaagcgagagtgccctaagttgactgcggagaagcaggccggacaaagggacaatcgtgggggaaatggactgccgcctcccccaaagcggcaagccgtggcaccgcgagtttatgagttgtcggaggaagctaacgatgccggaaacttcagggcgatcactggtacgttctcacaactccctattcattatttcaataactgcatttgcattgcatcatgcatatgggaaaggggaggtactcagcattctaagggaatgtgtagggaccttgagagtatgttacgtagtaacgcacactctatttgattctggggctacacattgttttgttagtccagaattggttgaaataggtgggttcaggaaagaaccaaacaccgattatggaatggtacgagcgccggcggacaggcaatgtatccgaccggacttgttcggggcatctcggttgtagtgaacggtgtcaatatgcccgcggacctaatcattgttccactaaagaaacatgatgttatcttagggatggactggttggggaagtacaaggctcacatagattgtcaccgaggacggatacaattcgagagggacgagggtatgttaaaattccaaggaataagaacaacctcgggaagcttggtaatctcggcaatccaggctgaaaggatgctcgggaaaggatgtgaggcatatttagccacgatcacaaccaaggaagtgggggcgagtgcggagttgaaagacattccgatcgtcaacgagttctcggacgtgtttgcggccgttagtggcgtaccaccggaccggtcagacccgttcacgatagaactcgagcccgggacaacccccatatctaaagctccgtaccggatggcaccggcggaaatggcggagctaaagaaacagttggaggagttgttggataaaggattcatcaggccgagtagctcaccatggggtgcgccggttctgtttgtgaaaaagaaagatggtagctttaggctatgcatcgattatcggggattgaataaagttacggtgaaaaacaaatatcctttaccccggatagatgagttgatggatcaacttggaggtgcacagtggttttcaaaaatcgacttggcctcaggatatcaccaaattcccatagagccaacggacgtgaggaaaacggctttccggacaaggtacggccactttgagtttgtggtcatgccattcggattgaccaatgcaccagcagccttcatgaaaatgatgaatggggtgttccgggatttcttagacgagtttgttatcatcttcattgacgatatacttgtttactcgaaatcttgggaagctcaccaagaacatctaagggcggtgctggaacggctaagggaacatgagctatttgcaaagttaagtaaatgctcattttggcaaaggagcgttggttttcttggtcatgttatctcggaccaaggagtatcggttgatccggagaaaatacggtcgataaaggagtggccacgaccaaggaatgccaccgagattaggagttttctcggactagcggggtattaccgaaggttcgtaatgagttttgcgagcatggcccaacccttgactcgactgaccggaaaagacaccgcattcaactggtcggatgagtgcgagaaaagcttcctggagttaaaggccatgttgactaatgcaccggtattggtcttaccggaggaaggtgagccctatacggtttatacggacgcatccatagtgggactaggatgcgtactgatgcaaaaggggagtgttatcgcatacgcatcaaggcaattgcggaaacatgagaagaattaccctacgcatgatttggaaatggccgcggtagtatttgcgttgaagatttggcgatcatacttgtatggtgctaaagttcaaatctatactgaccacaaaagcctaaagtacatattcacccagccggagttgaatctaaggcaaagaaggtggatggaacttgtggcggattacgacttggatatagcgtaccatccgggcaaggccaaccaagtcgccgacgccctgagtaggaggcgctcggaagttgaggcggaacggagccaagtggacttggttaacatgatggggacattgcatgtgaatgccttgtctaaagaagttgaacccttagggttgggagccgccgatcaggccgacctgcttagtaggatccggctggctcaggaacgggatgaggagataaaaggatgggcactaaacaataagaccgagtaccaaacctcgaacaatggtacaatcgtggtgaacggtcgagtatgtgtgccgaacgatagggcattaaaggaggagatcctaagagaagcccatcaatcgaagttctcaatccatcctgggtcaaacaagatgtaccgcgaccttaaaaggtactaccattgggtaggaatgaagaaagacgtggccagatgggtggccaagtgcccgacttgtcaactggtcaaagcggagcatcaagtaccaagtgggttgttacaaaacctacctataccggaatggaagtgggaccacataacgatggacttcgtcaccggactgccaacggggatcaagtccaaacacaatgcggtatgggttgtggtagaccgattgactaagtctgcgcacttcatggcgatctcggataaggatggagcagaaatcattgccgagaagtacatagacgagatcgtgcggctacatgggattccggttagtatagtgtcagaccgagacacaaggttcacgtcaaagttttggaaggctttccaaaaggccttaggaactcgagtgaacctaagtactgcctaccacccacagacggacggacagtccgaacgaacgattcaaaccctcgaggacatgttgagggcatgcgtcttagattggggaggaaactgggagaaatatctaaggttagtagagtttgcatacaataatagttttcaagctagtattggtatgtctccctatgaggcgttgtatggccgagcttgtagaacaccgttgtgttggacgcccgtgggcgaacgtcggttgtttgnnnnnnnnnnnnnnnnnnnnnnnnnnnagagaatgaagttcttaaaaatcaagttaaaggaagcccaagatcgacagaaaagctacgccaacaaacgtcgaaaggaattggaattccaagtaggagatttggtgtacttaaaggcgatgacctacaaaggggcagggcgattcacctcaaggaaaaagttaagcccaaggtatgttggcccgtacaaggtgatcgaacgagtaggggcggtggcatacaaacttgaccttcctccaaaattaaatgcgtttcacaacgtcttccatgtgtcacaattacggaagtgtttaagtgatcaagaagaaagcgtggaagatatacctcccgggttaaaggagaatatgacggtggaagcatggccggtacggatcatggaccgaatgacgaaagggactcggggaaaatcaagggatttgttaaaagtcttgtggaattgtggaggccgtgaggaatacacttgggaaaccgagaataagatgaaggccaattttccggagtggttcaaggagatgggtaaagatcaacttgatgcggattcgaggacgaatccaattcaagggggggagacttgtaacgcccgcgatcctcaataggatcgttggctaggacttggtccgagagaggaaggtggagtctcggacaagtgagaaggagctggccataagctcggacaaaggggaaatcatgcaggctaagctaggatcgtaaagaaatcacttgggtcagctcgcccaaagctcaagctcagctggaaggagtgacggttactcaggtcgagtgacagtccagctcgggcagctggacgagtgacggacgagctcgaggcagctggacgagtgacggttgaacttgaggtagctggacgagtgacggacgagctcgaggtagctggacgagtgacggacgaactgggcggttatgggcgaagagatacaactcttcggaaaggtgcaactcttcggaaaggtgcaaggaacggatgtgttgatttgggaagcatccattcgccccctatataaggaagggcgcccaggaccattccacacaccacaacacaccgaaaacacaagaaaactcaccattaaaactctctccctcttgggagaataaatagtcttaggattcggtagccgggctgtggccggcaataaagaaggagggtcggatcgacctagcctcgagaaggaaggtaagggatcctagactttgagtctaagggttctaggatgtgagttagtagtcggatccttgaaaggaccgactagagggctgagtagtatccgggtcatgtgcatcctacacaagactcggtccgggtagggatcggctgaggcggggacgcggctcggcggaggaccggcgggtcttaactgacctgccgagaatcggccggactgatgcgcgatcttcccctctctgaattctctccacggatccgagtagtgtatggcatatagagcattgcatggacttgcatatgattaagtaaataagattacttatggctctatgactttcaggaacgaatggtgatcgtgggaaggacttggcttaggcgcgagagactcaaggccgggaagacgggtggtgatagttcggatagtctagggatcgattatatgacttgtaatagcttatatgcaaactcataggttgtatcgaatcctttgcttaattaataaaatatccgattgtttgtttactctattcgtctcatatattgaatctcggaatcatatgaaacggtttagactaggaaagaacctcataaacggttagggccgagtcacttagtggcttgggtcgagagaactcgcccggactttaggcagtccggatcggggcctttcaagttggtatcagagcatgcttggttctaggactaggtgttgggttaaggggtatcaccactcgtcggcttgagaatctcgcggtagttgttctttactcttttgcgatttaactaggagttatgtggattaactttagaggtttcgcagatgggtaagagcagcaaaacgggaaagagtaagaaggacaaaggcattgtcgaggagactttggttgaggaggaaacgatgatcaacgagaaaaccagagtcgggacaatgctcgatgggacagactcggccggacctgaggccgggaagaagtccataaatgaggaagcaccggagagtagtggtgcaagggacagcacggataaccggaacaatactccaacggcccaagaacagtgagatttgatgaagggaatgatggcgcaactagccacattgaccaaggccgttgtagcggatccggtggtcctaaaagtggataaccaaaaggacgatgactcggaagttgtggaagtgaatccacaattgaatcatggacggaaaaggggagactatctgagtcttctcgaacatgtctcaaggctgggcacgagacacttcatgggcagtacggacccgattgtggccgatgagtggaggagtagactcaagaggaacttcaagtctacccgctgccttgaggattaccaaagggacattgcggtccacttccttgaaggagacgcccataactggtggttaaccgtcgagaaacgtagaggggacgaggtccggtcctttgcggatttcgaagacgagtttaacaagaagtactttccaccggaggcttgggataggcttgaatgtgcgtacctcgacctagttcaagggaaccgcacggtgcgtgaatatgatgaggaatttaaccgcctaaggcgttatgttggacgtgaacttgaggaggaacaagctcaagtgcgccgatttatccgtggactaaggatagagatccgcaaccattgtttggtccagacattaaactcggtttccaaattggttgaaagggcagcaatgattgaggaagggatcgaggaggagaggtacttgaaccgggagaaagcaccgatccagaacaatcaatccaccaaacccgcggataagaaaaggaaatttgacaaggtggataacaccaagtccgatgctaagaccggggaatgcatgacctgtggtaagagccacagcggaacttgctggaaggccataggtgcatgtggccggtgtggaagcaaggaccatgcgatccaaagttgcccgagaatggaaccaggacagtccaaggttctcggtgaagagacaaggacttgtttctattgcggaaagactggacatctaaagcgagagtgccctaagttgactgcggagaagccggccggacaaagggacaatcgtgggggcaatggactgccgcctcccccaaagcggcaagccgtggcaccgcgagtttatgagttgtcggaggaagctaacgatgccggaaacttcagggcgatcactggtacgttctcacaactccctattcattatttcaataactgcatttgcattgcatcatgcatatgggaaaggggaggtactcagcattctaagggaatgtgtagggaccttgagagtaggtgacgtagtaacgcacactctatttgattctggggctacacattgttttgttagtcccggaattggttgcaaacaggtgggttcaggaaagaaccaaacaccgattatggaatggtacgagcggccggcggacaggcaatgtatccgaccggacttgttcggggcatctcgattgtagtgaacggtgtcaatatgcccgcggacctaatcattgttccactaaagaaacatgatgttatcttagggatggactggttggggaagtacaaggctcacgtagattgtcaccggggacggatacaattcgagagggacgagggtatgttaaaattccaaagaataagaacaacctcgggaagcttggtaatctcggcaatccacgctgaaaggatgctcgggaaaggatgtgagggaaaggatgtgaggcatatttagccacgatcacaaccaaggaagtgggggcgagtgcggagttgaaagacattccgatcgtcaacgagttctcggacgtgtttgcggccgttagtggtgtaccaacggatcggtcagacccgttcacgatagaactcgagcccgggacaacccccatatctaaagctctgtaccggatggcaccggcggaaatggcggagctaaagaaacagttggaggagttgttggataaaggattcatcaggccgagtagctcaacatggggtgcgccggttctgtttgtgaaaaagaaagatggtagctttaggctatgcatcgactatcggcgattgaataaagttacggtgaaaaacaaatatcctttaccccggatagatgagttgatggattaacttggaggtgcacactggttttcaaaaatcgacttggcctcgggatatcaccaaattcccatagagccaatggacgtgaggaaaacggctttccgaacaaggtacgaccactttgagtttgtggtcatgccattcggattgatcaatgcaccagcagccttcatgaaaatgatgaatggggtatttcgggatttcttagacgagtttgttatcatcttcattgacgacatccttgtttactcaaaatcttgggaagctcaccaagaacatctaagggcggtgctggaacggctaagggaacatgagctatttgcgaagttaagtaaatgctcattttggcaaaggagcatcggttttcttggtcatgttatctcggaccaaggagtatcggttgatccggagaaaataccgatcgataaaggagtggccacgaccaaggaatgccaccgagattaggagttttctcggactagcggggtattaccgaaggttcgtaatgagttttgcgagcatggcccaacccttgactcgactgac

SEQ ID NO: 161825 - DNA, 1424 bp, Arabidopsis thaliana landsberg
tcttttctatctctacatttactattaatattactactctgcctccgtcctcttaccaccgtagccgacggcaattctaccaacattgacgggtggtgcgacaaaactccatacccatatccatgcaaacgctacttcataaaacacagcggttttcgactgccaacacaaatatccgagttccgagtacttctcgtggaagcagccatggatcgggccgtatccgcttgggacaaattgaccaattcaagcaagaactgcacagatttcaagaaacaagcagttttggcggattgcattaacctctatggagacactgtcatgcagctaaacagaacggtgcagggcgtgtcttcaaaaaccgggagaaggtgtactgacttcgacgctcaaacgtggctaagcaccgcgcttacaaacactgagacttgccgacgcggctcctccgatctcaacgtctcagatttcactacacctattgtttcaaacacaaaaatctctcacctcatcagcaactgcttagccgtcaacggagccctcttgaccgccggaaaaaatgacagcaccaccggtgattccaagggttttccaacgtgggtttcccgtaaagagaggagacttttgcaattgcaatcagtgcgtgcgaatcttgtggtggccaaagacggatcgggacatttcaagacggtgcaagcggctattgacgtggcgggacggagaaaggtgacgtcagggaggttcgttatatacgtaaaaagagggatatatcaagaaaacattaacgtacgtctaaataatgataacataatgttggtcggagatggaatgagatataccattatcaccggtggtcgaagtatccaaggaggttacaccacttacagttccgccactgccggtaaattaatgaaatcattttatttgattttaatttattttttctcattaatagtaagatattttaaatttccgtacgaaattgagttttccgattaatcgataagattcatggtggagacgtataagttaattaaatcattcattgggatcttcaccaattattatcactatcattttttacagcattattatgactatatctaaataaacgtaaaagttaccatttgaaatttatttcatttttacctcacgatgtaacggttcgctaaattgcgtgtgatataggtatagagggacttcacttcatagcaaaaggcatagcgttccagaacacggcaggtccggcaaaaggccaggcagtggcactacggtcatcctcggacctctcaatcttctatagatgctccatcgaagcttaccaagacacactctacgttcactccaaccgtcagttttacagcgattgcgacgtttatggaactgtcgattttatcttcggaaacgcggcccgtgttttccaaact

SEQ ID NO: 161826 - DNA, 705 bp, Arabidopsis thaliana landsberg
tcagtaagagtaacctgaatttgtaaaatagggacaacatcaatggattgcctgatgacttgctgcttaagatattatcgtttgtcccaacatatgttgctgtatccacttgcgttttgtctaagcgatgggagtttatatggatgtggttgcctaatctcgagttcaaatctgtgtggaacccatggcctggaattgtggattttatcaacaagaagttgccaatacatagagctcccgttatagaaagattgtgtatccacataacttctaatgcacacattaaacctgaatatatcaaaaggtggattgaaatcgcagtttctcactatgtacgtgaactgcaaatcgattattattcgaagactgaaatcttatttccaagtagcttgtttacctgcgaatcgctcgtgaccttgaagctcaaccccgtgactctcaaggatgttccctctagggtttgtcttccctccctgaaaactttgcaacttgaagctgagtcgtttttcatagatggaaaatatcttcaacagcttatatctggttgtcctgttcttgaagatctatctctacgattttgttgtaatgcaatttaagagagtcctgtaatcatcccgtctttgcaaagccctcaccttttattggtaattcgaatttaaaaggtataagatagatactccttcattaagtatttaaacttagggt

SEQ ID NO: 161827 - DNA, 1781 bp, Arabidopsis thaliana landsberg
  unsure (1)..(1781): unsure at all n locations
atggtccaagaaaacgacagaaccggactcttcaattatttgttcatttggactcaaaccggaggaggaaaatcaaaaatgaaacatttcaatctgttatccattattctggttatcgttttggcgacaagctacattgatgccttcaccagaaacgattttccagaggatttcctcttcggagccggtacttctgcttatcaggttcgagtctgaccacatcaatggcaatcggggttttccatttttaattgttttgtctacaatttgagttttttgggggaatttgtggaaatagtgggaaggagcttttgatgaagatggaagaaaacctagcgtctgggatactttccttcacactcgtaattacaagcttttcttttgtgttatgatttttagttaaatgataattaagcgtctagtcttagtaaaattggtgtttaaccaatatgctgtcttaatttgacaggtaacctaagtaacggagacataacaagtgatgggtaccataagtacaaggttagcttattcaccaagcaaactcttgaatagttaattacagaaacattggctttgttattgcacatcagagattctgcttttgcatgtgcaggaggatgtgaagctcatggtggaaactggcttagatgccttcagattctccatttcttggtctaggcttataccgagtaagaagtcttcttaaacacgcttaatgttttcacgccggaactttacttgatgagcacttatctcatttagatggaagaggtcctgttaatcccaagggtctacagttctataagaacttcattcaagaacttgtaagccatggtgagactactcatggataccaaaaacttctgttgtgttgagtttggacttaaagtaaacttttacaggaatcgaaccacatgtgacactgttccactacgatcatcctcagtatcttgaagatgaatatggagnnnnnnnnnnnnnnnnnnnnnnnnnaggctaaataacctcattttagtaacttagttttcttttcatgcttcgcaatgtaaaaaaagaatggttgatataattcttgtcattgcagccaagactttacagcttatgcaaatgtttgcttcagagagtttgggcatcacgtcaaattctggaccacgatcaacgaggctaatatattcactattggaggatacaatgatgggatcacaccgcctggtcgttgctcctcaccgggtagaaactgctcatcagggaactcttcaactgaaccatatatcgtaggccataacttgcttcttgcgcacgcctctgcttcaagactgtataagcaaaattacaaggtacatatagtttgcataacaccattcttgaatgtgtgagttgatgacaagagaacaataacatactaaatagtacatacaatgtgcaggataagcagggaggttccataggctttagcatattgacgatagggtttagtccttccacaagctccaaagatgatgccattgcaactcaaagagccaacgatttcttcaacggctggtgagtcaagcacaaactgttccaaaagatatcctcataaaatgagaagaaataccaaatacactctttcaaactcaggatgcttgggcctcttatatatggagactatccggatacaatgaaaagaatcgtcggatcaagaatgcccattttctcggaggaagaatcagaacacgtgaaaggctcatctgactatataggaatcaatcactatcttgcagcttctatcacaaacagca

SEQ ID NO: 161828 - DNA, 3917 bp, Arabidopsis thaliana landsberg
  unsure (1)..(3917): unsure at all n locations
atgaagggcttttgacaccaccagtctttgtctacaacatttttcacttcgaacggtttcttgcctattaggctaagcttaaccctaatttcccaaattcgctactcaagatcttcctcccccgtcatgctaagtttccactccgctgctacgcttcccacacgtactccggctactcgatccggtctaccccggttaagaatctatgttcaagcaactgacttttctaaccggatggaaccggagttcctacgaatagggccgtcgttctttttcctccgacttggattccgacacaaagtcttcaactactactgtctcaactaaacctcacctggacgattgtctaacggtttgttcaaattttttcaagttcacaccttttttttttcccgaccatggggaattttatgatcatggggaatgtaagatttccagaaacaattgaacttggctggtgcacttcatatgctttgatttttcatagaacatagagaaatcagctcaattggcaaaattttctttatggttctagcgattggaaagttaaaactataaactttaatagcattggttggaaaattcgaaattttgaagaaattgagtgtgtttatagtatactgatcttttgatatacgcaaatttggatggatcattcctagttttatagtcaggcaaaagctagaaccttttatagcaaaaccatttcctcgagcttcgctacgattgttttcattgagctttatgttgttgaattgcaggttatagcattgccattgccccacaagcctcttattcctggcttttacatgccaatatatgtcaaggtatcttacatcaacttagctattcgaaatcatagtgaaagaatggattttgttatcttgtgttctctcacctgtatgtataagctttttatttgtctaggatcctaaagttcttgcagctttacaagagagtagaagacaacaagctccatatgcaggggctttccttttgaaggatgacgcgtcatctgactcatcttcgagctctgaaactgagaatattctagagaagttgaaaggaaaagagttgattaaccggattcacgaagttggcacacttgcccaggtactactttcttgccgcacgttagcactgtatgttttccctttatatgattatatctgtctgaatagacttagctgttgccaattttccagatttcaagtatccaaggtgagcaagtcatccttattggtcacagacgacttcgaataacagagatggtacgttaaaggaacatatctttttaaaggatcaaaagttcatgaaaagtaaagattcaattgttcagaagctctgtgtatatcttacacatgtgtgttctgcttatcaagttatggttctctgagtgtgaaaaccatgtgctttgtttctgttcaggtgagtgagagtgaagatcccctaaccgtcaaagttgaccatctaaaggtgtgtttctgttttcaagcctttccttttatgatacaagcatgggagcaagagatgcggtttctgttttcttttgaaatgctgaaatctttaacccttgtcacgtgttctttgttatttatttgcaggataagccatatgacaaggacgatgatgtcatcaaggcaacatactttcaagtgatgtcgacacttagggatgtcttaaagacaacttcactctggagagatcatgttcggacatatacccaggcatgttctcttcatatttggcactgcttgagagtaaagaatatgtcaagagtatcagtatcttactagatttatctaaaatagcatataggtgaattcaattatccaaagttagccgattttggagctgggatctctggcgctaacaaacatcaaaatcagggggttcttgaagaactggatgtaagtagttagctattagtctattactgtcacgttttgatgctgagattacctcaaacaggatgatagtccattcttagccagcttctcatatgtttttttcttcgatccaggttcacaaacgtctagagttgacgctggaattggtgaacaaagaagttgaaattaccaagattcaagtacgtcattccttcacttgtctgcatctgtccagctgactcgtgctactagatctttgtaaatgattagtttatatagaatgaatccttatctctttgaattcgtgtttaggaatccatagcaaaagctgttgaagaaaaatttagtggcgatagacgtcgtatcatactaaaggagcagatcaatgctataaaaaaggttttcagttcgcctctaattttacagctgctaatttatgatgtatagtattgttggttgatgactattaaatgtaccaatgcaggagcttggcggggagacagacagcaaatccgcactttctggttagtacgaacataaagtcttaaactatcttcaattacatgtagtcagtttatatcctagttagaaatttagaatttcactgcctcatggatcacaatgcattcatgagacgtcagtgtctttggtatgagtttggagagccgtgcactgttaattgtatgacaaccacaacttatagtctgttctttactgcagcaaagtttaaggaaaggattgagcctaacaaggaaaaaattccagcgcatgtattacaagtcatagaagaagagcttacaaagctgcagctgttagaggcgagttcaagcgagtttaacgtgacgcgtaactaccttgattggttgaccatattgccttggggaaattacaggttttttacttttcatatatctttttttttttttttttctgtttaagtaaagcagtaagtcttttggtatgagagactgatatagagacggatgagctctcatctcatggcaccatttgtttttgtgttcactgatttgaggaatctattttgttaaatttgcagtaatgaaaactttgatgttgcacgggcgcaaacaattcttgacgaggatcactatggcttatctgacgtaaaggaaagaatactggaatttattgcagtgggaagacttagaggcacttcacaaggtttgatacttatccagtaattgtgatttgatcttgttgaaaaaaacttgtccccttaaatttgagtaaatgnnnnnnnnnnnnnnnnnnnnngcctctccggccctcctggagtaggcaaaactagtattgggcggtctattgcacgtgctcttaatcgcaaatttttccggttctctgttggagggttagcagatgtcgctgagatcaaggtataatacctttgttttggtatacctgcaaatattagtcaaacatttgtgactgaattctttcctagaaacaaaaaaccattcttgtaattacatgtttaggggcatcgtcggacatatgttggcgccatgccaggaaagatggtgcaatgtctaaagagtgtggggacagcaaatcctcttgttctaatcgatgagattgataaggtaatatattttttgttttgatatttgtcatcatatggtagcttcttttattcatcagtacaatactgtttcaatctctagttaccaaagacaaatttctctgcaataaattgctatattgttcctttgcagctggggagaggccatgctggtgacccggccagtgctttgttggagcttctggatccagagcaaaacgcaaattttctggaccactatctcgacgttactatagatctatcaaaggtaattaaatgtggtcaaggaccaaattttgtatttcttttcttcatgatgttctgtccaccaatagatggatatgagtaccattttgtttcatgtgatactaggccgattgaatctaattgctgatccatttcattacaggttttatttgtgtgcacagcaaatgtgatagacatgattc

SEQ ID NO: 161829 - DNA, 4282 bp, Arabidopsis thaliana landsberg
agaaattaaaactatagtttaaattcaaaaataaacctttcaacttcaaaagccacaaaaattgtctcttatttttagtgggtttggtcttgaatcatcaaaatggattatatgaagtgaaaacataagcctcattaaaaaccttcctttggaaaacccggcgggacaaaaccaaacgcaaaaaaaaagagcactcatgaatcacttatccatcttgatgaggtccttgagcttgaatcaaaaccaaaagggtagtgacttggctcaagtcatttggtcggtcccaaatgttgttaagcatcccgcaaatggcttggttgaatagcttagctctagaacgagtcattggaacaatcggtgtgacaagaacatcctctgctacaagcttctcctcagctacaagctcatcctcagctacaagcttagctccttcctcggctacaagctcacattcaagcttcggttcattctccctattcttaatgttgtccatgatcatatcacaatcggtttacagggaaccagagttcatcgaactacactccaaagccggcctttctaaagtcatttcctcagagcaacttccagaggagaccgaccaaagagagtagaatgaaatctatgcttgagcagattcttgagagctaaacaaagcttgttgtggagtgtaatgacaagtttgatgctgtctacccagatcttaatgggaggatcgacaatcttagctctcacttgaagaagttggatgtacaggtagctcaaacagcacaattcattaagagacaagagggctttcttcctagtaatcatgatgctaacccaaggaagagctgtaatgccatcttgatcaaagaaggagattatgtgtgggaagaattggacattaaaggtgagttggagctcgctactgtagagttggtgtcgaccaacacctactagtgtcgatcaacaccatatggaacattgttttcagaatggttcctcacgagggtgtcgatcgatacacctctagtgtcgacactgaatccggactgcaccttgtgaggtgcgaatcccgatgcagccaagactgaagtacactcctcctgtcccttatccgaggaagacgtcgttctaagcaggagattcatgctgccaaatgcacaaccataatggagaagatcctccatactcttcctaaggatgcttcttagacatcttccgcttcactcaacaggtatgtcaagcgactggttgacaatggaattagctcagatgaagctaagctgcttaccagagacatcagtgcaatcatgctgtctaaggccaagaaggaaaaggcacagagagtagactcagctgagtacatccgcaccattactcctagacagaccactgagaagcttccagatcgaggtagttttgttcttgattgctctatctcctcaagcaggttcagccgctctttgtgtgatctgggatcaagtatcaacctcatgcctaagtttgtttctgagagactaggcatgactaactacaggccgactcgaatcactctcctcttcgcggatcgttccaaatgaatccttgaaggaattcttgaagatgttcctgttaaggttggtaactccctaatccctgctacttttgtggtcctggactagaagaaggaacccaaggatcctcttatccttggaagagcattcctagctacaggtggtgctaggattgatgtgaagagaggtaggatctctctcaaagtttgggatttggagatggagtttggcatggattgttcagcgttcactaagcctatcagtagtattgcctctagcacagatacacctcctctgactgctcaaaatcccaaaacatagccacacacatcgctcccatccgctcagctcgcccatgagagttgcagagaattggtgtcgatcgagaccatccctccagtcgatcgacaccctcggaatccacagacagaggattatgcacattctcttcagcccacacctctcgaagccctctgtgataagttctcctctatctcttctcctgctttaccttcgattaattccttggattattcgaagactgcttcacaagataacaagcctagagtccctcgaagcttgtttcttctgttgtttttgcagatgacgagaagagtgtcgatcgacacaccactgagtgtcgatcgacaccagtagctgctctaaccagattcgtttacacaccgccttggaaggcaaggatgcagcaacaatccaccccaccactccatccacatcctaaactccgccaagtcaagctactaactccaaacaagcgcttagtgggaggcaacccattggttttatttctcttttccctttcttttgttttcttttattttttatttatttttcccgctttctctggatttgaatgccactggggactgtgtcgtttaagtctgggagaggttcttactaatgatgcttttatttttgtttcttatcatttttcgttttgcagttcatttggttatttagtttatttcccaaaaaaaaaaaaaaaaaaaaaaaaaaaaaaaaaaaaccgttttctttagtctagttaggaatcatgaggtttatttctcttgtttattgcctgattgattaatgctgcaggttcgagtcaatccgactattggaaaatccagatgataaaccaacagacttgaggatatcctagtttccaactcaatccactaaggctggagctaatctcattgctcttccttttacctcgtcaaaacggttactcttcatagaactttactccttgttcataccagatactgagaccaatgtgaaaaagaaaagtattcctctccccttataaaaaaagaagcaagagattgatatgattttcggtagtatataggggtagaaatgtttacaatgaccccattattatacattattaggaatgattaattacaaaggttggaaatatgcctagggtgtcgatccagtatgcgagttcccctttgtttactcttaaaaaaaaataagtctaggagagaaagaatacgaaagaaaaaaataatatacaaagaatggtcgatttatcaaggtatagtaaaggaatgagtttagaaggttcttgaatattagtttgcttgatgagacccagcgatgaaagcctggtggatatagttgtggaatttaggttaggtatctagaatgttgggtaagcttgcggagaagtacatgttagttaggatttgattagaactgctaagcatatggatttgattagaatgatctaggcaatagactagagaatgttgtgagttcctttgtttttcaaacctcttccacgggttcggcttttgtgttttacttgagagcaagcaaaagctaagtttgggtgagttgatataaacctatcttttactgcttttagctaagatttaggtattagttttagagtttatttgttatttctaaagtcttttctactccttttcaggttattacatgtttgggattcatttggagataatggagcattctagaggaaagaagagaatatatgttgttgaagaaatccggagactaaaaaccgcgtaggtgtcgaacgacatcacccctggtgtcgagcgacaccaatacctgacggcaatttgaagacgcaacttattgatgttttgaagatttccaaattctgcctagaactttctcctatttataatcaaggcccaatacgtttttaagacatatatatatatagcttttagccacttcaaaaaccaatataaaaaactttgatctcgataaaactacacgtactttcagatttgttctaaaacctacgcctccaattgaaccgaccagttaaccgataattatacatcttgaattttatgataagtatgatgatatggtcacaattgtgtttgcttgacaaaaaaaaaaggtcacaattgtgtttattttgttacttttgatcgccaataaagggtttggaggatctaaaggaacacttcaagagctcgaaatttccatgcgaggctgagctatacctgccggtggtcttctcgcctccacgagatgggaagcagttaacagaacctgtctccatcaacataaccatcaacggctgcaccagacttaatcataatcattttgagcaaatagtcggtcaagatcactttctgagtggatcatgttccgccagtgaccatgataacagtcatgaagaaaaatataccggcagtagcgtagactgtggccggagtatcaccgtggaaggagaaacatctttctag

SEQ ID NO: 161830 - DNA, 1238 bp, Arabidopsis thaliana landsberg
actgcctcttaattcgaaattgcaaatttctaaataaaaggtgagaatgggacaattgatggacaaggagaacctttgtgtttgaaaattcaagagaggagaactaaaatacacaagaccttatttgattgagattatgcattctgatggtatccaaatctccaatctcactttcttgaattctccttcttggcatattcacccggtctacagcaggtaaattaaactcacccggttatcaaatttaacctattaaaccggttttgtttattaattaattttcaaatgcagaaatatatttatccaaggtttgacgatcttagcaccagtcacggtaccaaacactgatggcatcaacccaggtacgataacgaaatcataccgataaaatcttaaaattccaataaccggcttttaaaaatctggctgaaattatttccggtttattacagattcttgtaccaacacgaggattgaggactgctacattgtctccggcgacgattgtatcgccgtgaaaagtggatgggatcagtacggaatcaactacggcatgcctacgaaacagctcttgatccgacggctcacatgcatttctcctgatagtgccgtgatcgctctcggcagtgaaatgtccggtggaattgaagatgttcgagctgaagatattgttgccattaactctgaatctggaatcaggtatgtaaccaccccgttcacacatatgaaccggtttaaattcggtttggctaaccttaaaccgataaatctgcaggattaaaacagctattggacgaggaggatacgtgaaggatgtatacgtaagaggaatgacaatgatgacaatgaaatatgtgttttggatgaccggaagttacggttctcaccctgatgagcattatgatccgaaggcgttaccggtgattcagaacattaattatcaagacatggtcgccgagaacgtgacgatgcctgctcagttagctggaatatcgggagatcagtttactggaatttgtatctctaacgtgactatcactctatcgaagaaacctaagaaagtgctttggaattgtactgatgtttcgggttatactagtggtgtgactccgcagccgtgtcagttgttaccggagaagcagccggggacggttgtgccgtgtaatttcccggaagatccgattcctattgatgaagtgaagcttcaacgttgctactccagaagaaggaatatgtga

SEQ ID NO: 161831 - DNA, 961 bp, Arabidopsis thaliana landsberg
ttataatggggtgatttggacagacgaaagttacatgtcaaaggagcatctagacacagttatagattggatcccatcaatgaagaatcttaggttaagggacatccctagctatatacgtaccacaaatcctgacaacataatgcttaatttcctcattcgagaagttgagcgatctaaacgcgctagtgctatcattctcaacacgtttgatgaactcgagcatgatgttatccagtctatgcaatctattttacctccggtttattctattgggccactccatctccttgtgaaggaagaaataaacgaggctagggaaataggacagatgggattaaatttgtggagagaggagatggaatgtttggattggctcgatacaaaaactccaaacagtgttctttttgttaactttggatgcataacggtgatgagtgcaaaacagcttgaagaatttgcttggggtttggcggcaagtaggaaagagtttttatgggtgatccgtcctaatttagtggtgggagaggcgatggtggttcttccacaagagtttttagcggagacgatagaccgtagaatgttagctagttggtgtcctcaggagaaagttctttctcatcccgcgataggagggttcttgacgcattgcgggtggaactcaacattggagagtctcgctggtggtgttccgatgatatgttggccatgtttttcggagcaaccgacgaattgtaagttttgttgtgacgagtggggagtgggtatagagattggtaaagatgtgaagagagaggaggtcgagacggtggttagagaacttatggatggagaaaaggggaaaaagctgagagaaaaggcggaagagtggcggcggttggccgaggaagcgacgaggtataaacatggttcgtcggtcatgaatcttgggacgcttatacataaagttttcttagaaaat

SEQ ID NO: 161832 - DNA, 1471 bp, Arabidopsis thaliana landsberg
atgagtacaaagaaactgtacttccctaaaagactgtttcaaccaggcaaagaaatagataatattacaagggtatcaaagcattcatcaaacaaaattgtcatgaaggccagagaaagcattagagtcgatagagtacaagacattaatggacacgttcttgggtcctgtagtggaattcgttgaatgcaatgacatagccttttcaagccatatcgtccatcatttactcaaaagaaggatactaaccagcaatgacaaattgtggtttgtatttgctgatcaacctatgtgattctccctgaaagagttaacataacaacatgacttccaatagatgatgcatcaggaagtagtccaaatgtgaagagaagaagatagaaaagtggtagatagaagataatcagactttgaagaaaagcagaaaaaagatttgtggattaatgataaaatgtgatttgtcgatcttacatccaaaaaaatgctgccagaaggagagaatgagattgggggggttgttactagtggaggggatattgctagctcgaaatccgactaccttgctgccaattgagaatctgcagagagctagtgattttgaaaagttctgcaagtatcgatgggcgcagattgtttactcatatttcgtaactgaagtgaagaaactcaatattgacactttgttaaggaaacaatatggtcgatttgtttctacaattcacatatgggcattatcatcggttctgaagttgggagaaaagtttggcttagagatgaatcatctagtggaaatatttcattaattctccaatgaagatcaccatcgtctccaagtgcaaaatctataacaataattgcagatggtgacaaggtacattttcttagctatggctttttttatgttttaaacactgtttataaataaaaaaaatgttttacaatagttattacaatcaagttttaaggatttacaaagggttaaaggcaatttaaataatttacaagggattttaaaaggttaattaagaattgtgcattatttatacacagtttggaatttggtttatctttgcaggttgaagtgacaccaatagttggtgttaattctcatgaatatgaccacttggtttcacagaagaattctgaagacaaggatctgttagatatttttgatcttgtgatcaaagggtatagaatgagcaagaaggattggtgtcattgatggattcaagtggaacaaggacatgaaggtagaactgatcatgtattgaaacctgcaattgaaacacttgtgcatcaaagaagaaaaaggaaattaatgtcctttgatgagaaagtaaaattggtctatgaaaactgtgaagttcttaagaagaaagttgaaaggctaaagggctatttagggatcgaaagagtttctgccagttctactagagaagaagaaaaagaagaggatgaaaaaaacgaggag

SEQ ID NO: 161833 - DNA, 1221 bp, Arabidopsis thaliana landsberg
tttgcatccttttgcggcgtgttttgggcattttcacagtctattgaagggtttaaacactgtagacctttaatcatagtggacacccaagacttgaaaggtaagtaccctatgaagttgctgattgcctccggggtagatgcagccaacaaatattttccgcttgcctttgcggttactaaagatgtttctactgatatatggcgttggtttctcactggaatcagagagaaggttacacaaaggaagacctttgcctcatctccagtccccacccggacatcgtcgctgttgttaatgaaccgaggtctcaatggcaagaaccctgggcttatcacaggttctgtctgaatcgtttttgcgctcgatttggtgccgttttctcagactacaccctgaaggatcttgtgagccaggctggatccacgagtcagaaggaaaaatttgattcctacatgaaggatattgaaaagaagaatataaaagctcggaaatggttagaccaattccctcaaagtaagtggactctggctcatgacagtggtcggagatatggaattatgaagatagacgccacattgtgttacacaaagtctctgtttgcagtttttagagtctatcaattggctgatcatgtattaacaggctacgtgctgcttatgtttgatgagctgagacactcttttgaagagttgtttgatgaaagccgtgcttctcttaactgcggcgatgtgtacacgaaacctgtcatggacacgcttgaagagttcgagacatcttatgttacttacgttgtaatgcctatagacaacaatgcgtttaaagtcacaacaccgtcaactaataatgaatggatcgttcagctgagtgactgcacatgcacatgtggggagtttcaaagatgcaagttcccatgtttacacgctctagccgtctacaagaagctgaaaatcaaccctttgcagtatgtagatgactgttacactcttgaacggcattgcaaaacttatgccgccacattttctcctgttccagagctatcagcttggccgaaagcttctggagttccgacattgttccctcccatcattccgccacctccacctaccgtagcaggtaaatcccaaaggaaaaccactcctaaaactactaacccgaagagttaaaagttttagatgaatttgaatcgaacagaacccgagcattttggtggattatgcc

SEQ ID NO: 161834 - DNA, 620 bp, Arabidopsis thaliana landsberg
gacccaggtcgagttactttcatccattgccagacctctactcgacctcatcactctacctggaagtcgagtatcaccatcaccaccactcgactgcatactcgatgacaagcttcagagccttcttcattccgcactcaactagacactcgagcacaaggaagaaaagaagactccagctattcactcgaccacatgggcgaatacagttcttaatccgtcccaatacttcgtcgttttaagtattagggttcagaatatttggcaataagtagcatgtacttcacatttttgtagacaagtttttatctagttctattccgcagaccttgtattctagaccttttgtaatccggatttctctatatctattcagtattcagtattcatcttttgttcttgatatctattcagtattcagtattctgattgaatcctttgtttactctactgttgtttactgcatcttgttatctgtcgcttaatttctgtaattttttcttgttactcgaccacacagttgtctggcaacagactgtgcagtcgagtatctgtattttattttctgtctgttactcgacttgtcactcgacctcacctagtgctctgcaaagagttgt

SEQ ID NO: 161835 - DNA, 1374 bp, Arabidopsis thaliana landsberg
atggtaaggtaaatttccacaacaaaacttggtaaaaatctttaaaaaagaaaaaagaggtttagagatcgcatgcgtgtcatcaaaggttctttttcactttaggtctgagtagtgttagactttgattggtgcacgtaagtgtttcgtatcgcgatttaggagaagtacgttttacacgtggacacaatcaacggtccagatttcgtcgtccagatagaggagcgatacgtcacgccattcaacaatctcctcttcttcattccttcattttgattttgagtttttgatctgcccgttcgaaagtctcggtcatctgcccgtaaatataaagatgattatatttatttatatcttctggtgaaagaagctaatataaagcttccatggctaatcttgtttaagcttctcttcttcttctctctcctgtgtctcgttcactagttttttttcgggggagagtgatggagtgtgtttgttgaatagttttgacgatcacatggctgagatttgttacgagaacgagactatgatgattgaaacgacggcgacggtggtgaagaaggcaacgacgacaacgaggagacgagaacggagctcgtctcaagcagcgagaagaaggagaatggagatccggaggtttaagtttgtttccggcgaacaagaacctgtcttcgtcgacggtgacttacagaggcggaggagaagagaatccaccgtcgcagcctccacctccaccgtgttttacgaaacggcgaaggaagttgtcgtcctatgcgagtctcttagttcaacggttgtggcattgcctgatcctgaagcttatcctaaatacggcgtcgcttcagtctgtggaagaagacgtgaaatggaagacgccgtcgctgtgcatccgtttttttcccgtcatcagacggaatattcatccaccggatttcactattgcggcgtttacgatggccatggctgttcccatgtacgacgtcgttttattataaaaattatccttcaattgaccgttacgacgtcggtttttaattttaataatatgatgtttaggtagcgatgaaatgtagagaaagactacacgagctagtacgtgaagagtttgaagctgatgctgactgggaaaagtcaatggcgcgtagcttcacgcgcatggacatggaggttgttgcgttgaacgccgatggtgcggcaaaatgccggtgcgagcttcagaggccggactgcgacgcggtgggatctaccgcagttgtgtctgtcctcacgccggagaaaatcatcgtggcgaattgcgcccactcacgtgccgttctctgtcgtaacgacaaagcaattgctttatcctccgatcataaggttttgttcgtt

SEQ ID NO: 161836 - DNA, 2625 bp, Arabidopsis thaliana landsberg
atggcaatttcaatggcaacagatttgcagggaactaggattcctccaactacactccaaagcctgctttccagaagacctttcttcgtatcaacttccacaggacctatggtatttcatcttaccaagcccccccccctccaccctgggcagagaccccctccaccctcagcagagacaagaatggaattgatgcttgagcagattctagagagccaaacaaagctcgttgtggagtttaatggcaagtttgatgctgtctacacagatcttaatgggaaaatcgacaatctgagctctcacttgaagaagctagatgtacagctagatcaaactgcacaatctatcaagagacaagagggttttctttctggtaatcatgatgctaaccccaggaagagctgcaatgccatcttgatcagagaaggagatgatgtgtgggaggaattggacactaaagacgagttggagctcgcaattacagagatggtgtcgaccgacacccaacagacctactctatctccataagtaggttcagacgttctttgtgtgatctggtatcaagaatcaacctcatgcctaagtctgttgctgagagactaggcatcactcactacaggctaactcgcataactctcctcttatgggatcgttccaaacgattctccgaaggaatccttgaagatgttcctattaaggttggtaactccattatccctgctgattttgtaatcctggactatgagaaggaacccaaggatcctcttatccttggaagagcatttctagctacagctggtgctaggtttgatgtgaagagagggagaatctctctcaaggtgtgtgatttggaaattgagtttggcatggatggttcagaactaagactatcagtagcattgcttccagcacagaaacacctcctcagactgctcggaatcccaccacagagccatacacaacactccaacccgtccaggtcgccaatgagagttgcagaggaacggtgtcgatcgacaccactacccctgcagatcgacaccatcaggtttcacagatagaggattctgcacattctcttcagcccacaccaattgaggacctatgtgataagttctcttctctctcttctcctgttttatctttgattaattctttagattattcgaagactgcttcactagataacaagcctagagttcctcgaaagcttgtctctcctgttgttcttgcaggtgacgagaagagtgtcgatcgacacacacctgagtgtcgatcgacaccggaagctgctccaaccagatccaaggcggtgaggcagcacctatccaccaccactccacccacatcgtaaactccgccaagtcaagctattaactcaaaacaagcgcttagtgggaggtaacccattggtttgatttttctttttcctttcttttattttcttttatttttgctttatttttcccgctttctctggatttgaatgccactggggacagtgtcgtttaagtctgggggagatttttactaatgatgcttttatttttgtttcttattttgcagttcatttggttatttctttaaaaacgttttctttagtttagttaggaatcatgatctatatttctcatgtttattgcctgattgatgagtgatgcaggttcgattcaatccgactattggaaaatctagatggcaaaccaacagacttgaggatatcctagtttccaactcaaccactaaggctggagctaatctcactgctcttccttttacctcttcaaacggttagtattcatagatcttgattccttgttcataccttatattgagaccagtgtgataaaaagaatatgttcctctccccttataaaaaaataataataatgagagattgagacaactttcagatagtgtataggggtaggaatgttttctatgaccccattattatacattatttacaatgatcaattacaaatgtgtgaaaaatgctgagggtgtcgatccagtatgcgagttcccctttgtttactctctaaaaagaataagtctgggggagagaaagaacaccgagaaaaaaaatatataaagaatggtgaatttatcatggtatagtacatgaatgagtctagaaggatcttgaatgttggcttgtttgatgagacccagcgatgaaaccctggtggatatagttgtggaacttaggtatggaatctagaatattgtgtaagcttgtagagaagaacatgttggttaggatttgattagacttgttaggcatatggacttagtttggatgatcatggcaataggctagagaatgttgggagttcctttgttttcaaaacctcttccacgggttcggtttttgtgttttgcttgagggcaagcaaaagctaagtatgggagagttgatataacccgattttcaccaatttgagctatgttttaggtataggatttagagtcaatttgttatttctagagtcttttatagtcctttttaggtctttacatgttttggactcatttggagacaacggagcattttggaggacaacagagaatttatgctagtgaagaatgcggagactaaaaaccgcataggtgtcgattga

SEQ ID NO: 161837 - DNA, 3908 bp, Arabidopsis thaliana landsberg
atggccgaattaagctattggctcattggtccatccgttctccagacgtacgtccctccggctacatggtaaacgattgagccctcggcttatcgaactatccatgtttccgatccggtcgtttaacactacgaccgcccacggtttactaaccgtttactcgtccggtccatggtggtcgataaagctttcggcttaatgatccatccatgcggtccgaacgatatccttatcacacccaagggtccgtggattcatccaccggatcatcgtaggctagcccatgaaatccttcctccgtcggcgttaggtttgctcacgggtccaacatccgttttgtccatcggttcccaccgtggactttcccgttggttatccgttgagtcaccctttggtcttaccgatctccgatcggtttcaccatggctgaggagatagatacatgaaggcagccgcgatattgatcccatatggtgaattacgttccttacccattcttggtgctttctccctttaccggtaagattgcatccatgggcgacccttgggtgtgtccggatgcacttatccttgtgcttcctcgaacacttttctcgatccatcccatccgacgatcggtctgtccgacccattccgttagacgatcggtctgtcccatcctacccgtctgacgatcggtcagtccgatccgtctggccgatccgatccgtctgacgatcggtctggccgatccgatccaacgatcggtctaccagatccgattcgtctctaagacgaacggtctaccctctccatcctctacactccatcgaaccgttggaccgggaggtagcatgcgcatcagttcggtcgagttatactcgccgagccgcaccccctttccgaccaacaactctaggatgtgttgggactcctttaagaatgttttatggtgttttggatgttgtgagatgatgtgagattattccaaaggccttgggcgtcctcccttatatagggggcgaatggatgcttcccgaagcatcacatccgttccttgcacccttccgaaagatcacatccgttccttgcatccttccaaaaggtcacatccgttccttgcatctaataggcgatgcaaccgttcattggtacccgctcgaccttacaccttttggctcgagtgtcagctgaccggaccacccagctgggtcagtacacgatcagctcaccgagttcagtcgagctgtcggtcagctcatctagctgagctagctagtcttccagctggtttagctcacctagcttagctagctagttcatcctagcttgtctagctcacctagctggttcagcttgaagtttctcgtttatccgactaagtattttagtccgtttcttgaccatggtctagttttctcctaaaacaacctagcctctttatgaacgcgggacgcggtcgttacaagtctaccccccttaaactgaattcgtcctcgaattccgcgtgtgtaagatcttgcttacttcctaactcgggacacgggcgttacaagttgtaacgcccgcgatcctcaataggatcgttggctaggacttggtccgagagaagaaggtggagtctcggacaagtgagaaggagctggccataagctcggacaaaggggaaatcatgctggctaagctaggatcataaagaaatcagctgggtcagctcgcccaaagctcaagctcagctgggaggagtgacggttactcaggtcgagtgacagtccagctcggccagctggacgagtgacggttgagctcgaggtagctggacgagtgacggttgagctcgaggtagttggacgagtgacggactacctgggcagttatgggcgaagagatacaactcttcggaaaggtgcaactcttcggaagggcgcagctcttctgaaatgtgcaacttttcagaaaggtgcaaggaacggatgtgttgattccggaagcatccattcgccccctatataaggaagggcgcccaagaccatttcactcaccacaacacaccgaaaacacaagaaactcaccattaaaactctctccctcttgggagaataaattgtcttacgattcggtagccgggctgtggctggcaataaagaaggagggtcggatcgacctaacctcgagaaggaaggtaagggatcctagactttgagtctaaaggttctaggatgtgagttagtagtcggatccttgaaaggaccgacttgagggctgagtagtatccgggtcatgtgcatcctacacaagactcggtccgggtagggatcggctgaggcggggacgcggctcgacggaggaccggcgggtcttaactgacctaccgagaatcggccggactgatgcgcgatcttcccctctctgaattctctccacggatccgagtagtgtatggcatatagagcattgcatggacttgcatatgattaagtaaataagattacttatggctctatgactttcaggaacgaatggtgatcgtgggaaggacttggcttaggcgcgagagactcaaggccgggatgatgggtggtgatagttcggatagtttagggatcgattatatgacttgtaatagcttatatgcaaactcataggttgtatcgaatcctttgcttaattaataaagtatccgattgtttgtttactctattcgtctcatatattgaatctcggaatcatatgaaacggattagactaggaaagaacctcataaacggttagggccgagtcacttagtggcttgggtcgagagaactcgcccggactttaggcagtccggatcggggcctttcaagttggtatcaaagcatgcttggttctaggactaggtgttgggttaaggggtatcaccactcgtcggcttgagaatctcgcggtagttgttctttactcttttgcgattttactaggagttatgtggattaactttagaggtttcgcagatgggtaagagcagcaaaacgggaaagagtaagaaggacaagggcattgtcgaggagactttggttgaggaggaaacgatgatcaacgagaaaaccagagtcgggacgatgttcgatgggacagactcggccggacctgaggccgggaagaagtccataaatggggaagcaccggagagtagtggtgcaagggacaacatggataaccggaacaatactccaacggcccaagaacagtgggatttgatgaagggaatgatggcgcaactagccacattgaccaaggccgttgtagcagatccggtggtcctaaaaggggataaccaaaaggacgatgactcggaagttgtggaagtgaatccacaaccgaattatgggcggaaaaggggagactatctgagtcttctcgaacatgtctcaaggctgggcacgagacacttcatgggcagtacggacccgattgtggccgatgagtgaggagtagactcaagaggacttcaagtctatccgctgccctgaggattaccaaagggacattgcggtccacttccttgaaggagacgcccataactggtggttaaccgtcgagaaacgcagaggggacgaggtccggtcctttgcggattttgaagacgagtttaacaagaagtactttccaccggaggcttgggataggcttgaatgtgcgtacctcgacctagttcaagggaactgcacggtgcaaccattgtttggtccggacattcaactcggtttccgaattggttgaaagggcaacaatgattgaggaagggatcgaggaggagaggtacttgaaccgggagaaagtaccgatccggaacaatcaatccaccaaacccgcagataagaaaaggaaatttgacaaggttgataacaccacgtccgatgctaagaccggggaatgcgtgacctgtg

SEQ ID NO: 161838 - DNA, 447 bp, Arabidopsis thaliana landsberg
ctatctaccaccagataaatataataaccaaacaccaatcatggagtctgagtacttcaacatgccctcttctcctacttcttgttcctccttctaccacctcaatggtctgatcaacaacaacaactactcttcatcatccaatggtcaggatctaatgacgagcaacaactcaacttcagacgaagatcaccaacaaagtatggtcatcgatgagaggaaacaaaggagaatgatctctaacagggaatctgctcgtaggtcaagaatgagaaagcagagacatctcgatgagctttggtctcaagtgataagacttcgcactgataaccactgtcttatggataagctgaaccgcgtatctgaaagccatgagcttgctttaaaggagaacgctaagcttaaagaggaaacttctgatctcagacagctgatctctgagataaa

SEQ ID NO: 161839 - DNA, 3247 bp, Arabidopsis thaliana landsberg
tgtataagtcattcacgaaggaagaaatgcaagcggttcagaaagctccagaaggcacaccggctgctggaggaatgtttgtggtaatagtgcattcggctgaggatgttgaaggaaagcaccataccaatccttacgtgcacatctacttcaaaggggaggagagaaaaacaaagcatgtaaagaagaacaaagacccaaagtggaatgaggagttctcctttatgctcgaggagcctccaatccatgagaaaatgcacgtgaaagtgtttagcacctcttccaggatagtgtttgtactgaggttgtaacaataagtaattaaagggttttagggtaaacaatttcttcctttgaatactcgagaactcggtcgtgcttttgacagacaaaagtttatttattttatagatgcgcctcggtagaggctgcgtacataccctgtgaagggatcaagccgttcgtagttcatgttacataggtgaaagcttgtagtttggaactatgcgctttggagcaaagcagttaagtgatgacgtcgacagttagacgaggagctaagttgtttatcgatggatccccttgcagtaaagggtttggcgatacgacttcgtttggagagatggctctacttggcgggatggctatgttttacttgatgattatactttgcgagacgactttgttgtgcgggatggtttagctagaggaaaagacgttggctagtaatggtgagaatgttggctcatcacgacgagggagtcttgacttgtcacgtaatggtgagggagtctttcgaagagattaacatgacatggagagcttggttcggctagaccttttattcggtgtagattgtcacaagcttggttcgtcaggaggcggttcgtcaaggagtcggttcgttaggaagctggttcgtcagggagctggtttgtaaggaggcggttcgtcagggagctggtttgttaggaggcagttcgtcagggagctggttcgtcagggagccggttcgtcaaggagccggttcgtcaggagtcggttcgtcaggaagtcggttcgtcagaaagtcggttcgtcagagagtcggttcgtcagggagtcggttcgttagagaagctggttcgtcaaggagtcggttcgtcaggagtcggttcgtcagggagtcggttcgtcagagagtcggttcgtcaaggagtcggttcgtcaaggagccggttcgtctggaagttggtttggtgatgctggttttgcaaagctggttatgtgatgtcggtcaggtgatgcttgttcgtggaagctgatttggtgacggttgttttgcgaagctggttcggtaacgttggtttgtcgaaactggttcggtgacgttggttcatcgaagatggtttaagtggcgtttgttcgtcgaagctagttcggtgacgctagttcgtcgaagctagtttcggtgacgtttgttagtcggaactagttcggtgacgctggttcgtcgaagctagttcggtgacgctagttcctcaaagctggttcggtgatgctggttttgcgaagctggttctatgaggccagttcggtgacgctagttttgtgaaactagttctatgacgccggtttggtgacgctggttcatcgaagctggttttgtgacattggtcgttcggcacgttgatccatggacattgagtgtcgttcgtcgttctacgggcgatgaatatcgtttgacttttctcattgcttggtgcgagcttagtttggcgcaggctcggagccgagttcgatgggagctccggtgatcttggtggaggtgacttttatcgagtttagcggagatgagcgtggccgaggcgcttctctctgggtcttcctctccttccctctttttcagcaatggtcactatttatagacaatgttcaaaacctagatttccttcatgctcctttgcgattttcctatcttgcccttcgtgcttggggggccaaatttgtgagttaatagcccagtacttttctcaattctctgttttgagtcttctaacatataaggggcagagcccatgtccaacatactggtatatatttgtgcacatccccactgtttttgtgtcccttgcatgagcatctcatctcctattttaaggtttagtcgttgtcgctgtgagccctttcattagctgttcttcttcttcttaacttaaagcatagctttgtggttgtcagagcgcatagctcatggactgagtttcgagaatatttcaggcatcaggtttaccacttgtactatatatttttcagtagctaaactccctatgtatggtgtttgacttgacagatatttatatctttggtttaggagggagaaaaacgaatgatagcttttacaaaaagaggaacaaggatacattcagtaagttgcttgtccttccacctctagttattgtttaccaaccagaaatagcaacaatcactagcaattgggtagctgaaataaatggttacaacttgatgcaggatttctcttaccgatcaggcgattacctcttgttcgggtcagagacaagcggtctacctcctgaagcgctgtcagactgcaaacacgaaccatatggaggggggaccctacgtattccgatggtagaaacgtatgtgagatgtatgaatctttcggtgagtgtagggattgctctgtatgaagcgtccagacaacttaactatgagcaaatcgagtgtgcacctgaaggctgtgtgaatggtgaagaaccattgttgacagaggatatctttgcttgatatattggatggttgcaaaaaggaagacggagacgtagaggcatagccattggtggttggtaagcattgatattcatcttgaaggagtcactacccttatcctcttcattttgtagttgtttatcttgattgaccaaatcccaagtgtgggggatgctgaaatttttgagtttagaattagagcttttttattccagaagtccttgccttcgcttcctggcaaccattatagctttagtaataaagacaagagtacgtactttggatgaggaataaacagctatcagagattgcatatacgcaatttacttaaaaagaaataaacagctatcagagattgcatatacgcaatgtaacaattagcactaaaggagttgtcgggaaagcaactaagcagatgaataagacgatgatataggtgaaagtgaaacggtagttccagttggtaacagaagga

SEQ ID NO: 161840 - DNA, 1578 bp, Arabidopsis thaliana landsberg
atggggaagaagaggattgtgttctttgcttgtttgctcttgtttaccgtcctattacgttttagctatgcagggataacgacagaaagtcctttgtcagtcgaacaaacactcagctcctctaatggaatttatgaattggggtttttcagtcctaataactcccaaaatctgtatgtgggaatctggttcaagggtatcattccccgggtggttgtgtgggtggcaaatagagaaacacctactacagacacatcggcaaatcttgctatcagcagcaatggtagtcttctattgtttaatggcaaacatggtgttgtgtggtccatcggagaaatttttgcatctaatgggtctcgtgcagagcttacagacaacggaaatctagttgtcatagacaatgcttcgggaagaactttatgggaaagctttgagcactttggtgacactatgctacctttctcaagcctgatgtataatctcgccacaggtgagaagcgggtgttgacttcttggaaaactgacactgatccatcgcctggcgtatttgtgggtcagattacaccacaagtgccatcacaggtgcttattatgagaggctcgatgcgttattatagaaccggtccatgggctaaaacaaggttcacagggataccactaatggatgacacatatgcaagtccattcagccttcagcaggatgctaacgggtcaggattctttacttattttgatagaagtttcaaactttcacgtataattatatcatcagaaggatcaatgaaaaggtttcggcataatggaacggactgggaattaagctacatggctccagccaattcatgcgatatttacggtgtatgtggaccatttgggttgtgtattgtgtcagtacctttaaagtgtaaatgcttgaaaggatttgttcctcattccactgaggaatggaaaagaggaaactggactggtggttgtgcgaggcttacggaactacattgtcaaggaaactctactggcaaagatgtaaatatcttccatcctgttaccaacgtaaagcttccagacttttacgaatatgaaagttctgtggatgctgaagaatgccaccaaagttgcctccacaattgttcttgcttggcctttgcttatatccatggaatagggtgcttaatctggaaccagaacctaatggacgctgtgcaattttctgctggaggagaaattctgtccattcgtcttgcacactctgaactaggtacggcttaaaagataacatagacgatcttgtctgttaattataactttgtcttcaactctagtgttctctttgatagcaatatggtttattgtttaatttatttatgtcttaaatatctcaggtggaaataagcgcaacaaaatcattgttgctagtactgtgagcctttctctgtttgtgatattgacttctgctgcatttggtttctggagatacagagtgaaacataaaggtacacactcattatcatagtatctctttgtcgttacataaattaaaaattactgaaaacttaaattgataaaaagcgaagtttttcc

SEQ ID NO: 161841 - DNA, 998 bp, Arabidopsis thaliana landsberg
atgggaatagagaactgcatagtttatgttgtggttctaagtgctattgcggctacggtgacatcatacccttactcatctcctcaaaccccaagttacaattctcccagctatgaacacaaaggccctaagtacgcgccacatccaaaaccatatgttaaaagttccccaccaccacaatactactccccttcgcctaaggtaaactacaaatctccaccaccaccatacgtctacagctccccacctccaccgtactactctccttctcctaaggttgactacaaatctccaccaccaccatacgtctacagctccccaccaccaccgtactactctccttcgccaaaggttgactacaagcctccaccaccaccatacgtctacagctccccaccaccaccatactacagtccatctccaaaggttgactacaagtctccaccacccccatacgtctacagcttcccacccccaccatactacagtccatctccaaaggttgactacaagtctccaccacccgcatacgtctacagctctccacccccaccatactactctccttcaccaaaggttaactataagtctccaccaccaccatacgtctacagttctccaccaccaccgtactactctccttctccaaaagttgaatacaagtccccaccacccccatacatctatagttccccacctccaccatactacgctccttcaccaaaggttgactacaagtctctaccaccaccatacgtctatagctccccaccccaccatattactctccttctccaaaagttgactacaagtccccaccaccaccatatgtctacttctccccacctccaccgttctactccccttgtcctaaggtcgactacaaatcttctccaccacaatatgtctacagctcaccacccacactatactactctacttctcctaaagtcacttacaagtctcccccaccaccatatgtctactagatgccatac

SEQ ID NO: 161842 - DNA, 2239 bp, Arabidopsis thaliana landsberg; identical to SEQ ID NO: 31523

SEQ ID NO: 161843 - DNA, 1109 bp, Arabidopsis thaliana landsberg
atggctaagaataataacaacatcgtgatcgtcttcgattttgacaagacaatcatcgatgtagacagcgataattgggtcgtggatgaacttggtttcactgatttgttcaaccagcttctcccaacaatgccttggaactctctcatggtttgttttgttcattaatctctctaattcttctctgtttcggtttctctagggctttgttacgttggtctatatgttcatcagtcataacactaaatccttatttggttttatttcaaaacagaatcggatgatgaaggagcttcatgatcatggtaaaaccattgaagaaatcaaacatgtccttaggagaatcccaattcatccacgtgtcatccctgccatcaaatctgctcatgatttagggtaaaaatctatattatattcctcaattgtcatttgataacaaggtactgaatcatacgacataatatttaggtgcgagctgagaatagtgagcgacgcaaacacgttgttcatcgaaacaatcattgaacatctcgggattggtgagtttttctccgagattaacacaaatccaggacttgtagatgaacaaggaagattaatagtctctccttaccatgacttcaccaaatcttctcatggttgctctcgttgccctcctaacatgtgcaaggtactgcagttacactaatctcatattgattgattagttcaaaagataagatttgtcattactattttcagggattttgggaaactttttggtgtaaaatatattatctttgattctgttatgagtcaatatggacctatctgtgtgctaaattaacactaaatttttttatttatacagggtttaataatcgataggattcaagcttctctaaccaaagaagagaagacgagcaagatgatctatcttggagatggtgctggtgattactgtcccagtcttggactcaaagctgaagattacatgatgccaaggaagaatttcccggtttgggatttgattagtcaaaatcccatgttggttaaggctaccgttagagattggaccgatggagaagatatggagaggatactaatggaaataatcaacgaaattatgt

SEQ ID NO: 161844 - DNA, 774 bp, Arabidopsis thaliana landsberg
  unsure (1)..(774): unsure at all n locations
atggtattcctggatatggtggtgggtcagtcaaaacaataaacagcctcgaaaggtcagtttcatttccataaatcagaaaaaatccattaatgtagaaactagattatgattatgtgtgttgttgtaggccaagcccaaaaaaactgaaaatgttgaatctaagtcagagtcagaaatggtggataataataataaccatgataagatgaagaaatattatgacgaagatgagaggaagaaacaagatcaagtttggatagatgcagagaagatgcatccatggaatgatgcccctccaaaggtgaaggtaatgataacaaatcatcaaacatatataatcgcactacttagatttgtttgcctttaaaggaataagaataaatatcttactatttttttaatatatttttgatgtttgtaggtgacaacaaaaaatggtctttgtcatatgaacatagaattgacattgggattttctccagataaagtcttcggattttttactaatccatccaacggaccattttttctctccccacctcttttttcttatcattcattgtattattcagatgtggtattaattgtagcaagacttgagagtgtactctatttttttttatgaaggaaagcaaatcaagaaaggttttaatggaggatggaccgaggcagatcgcgaaggtgaagaaaaccgtggactggaaattccttgggtcgtnnnnnnnnnnnnnnnnnnnnnnnnnngtcgatgaaaacagaaaagatcttaca

SEQ ID NO: 161845 - DNA, 1190 bp, Arabidopsis thaliana landsberg
cttgtgccacctaaaacggcgtctgaagatgtcaggatgcgttatcagtcaataggtttcacatcagctggtctcaacagaataacgaatggttttccaccttcagcaatggttaggttccctatagcgtgtacctcatctgtcacagctcaaaagcttgtagttatagcgttttggtagtatcatatcacacacgttttgcaataaaagatgtcattgttcatatccacttggtcctttctagaaatgatttttttttttatactccaaacaaaaagcttatagccgtctataattaaaaaaaacgacccacctggtctgaaaattcaatttttgtagacaaacaaattgattttaatttaattaactttatattttaagcagcaatttttgtctttttcttagtggaattcgaatatcgtttttatagtatatattttttttctgttttcagaaataaggtcagtggttatttttggtggtagttgttcatttagttttataaaggctattttcgttcatatatacatgcaatgatcatatataaaccaacaaccacatggcatttttaagcacgtcttcaaaaaaatcgcagtcacatatcaattatatgaacttgtacgtcattagatttttttcacatctaaaatatgaaaatcaacgtcccaattgtttatttattttccagctactatactgtaccacgacttggtatggtaggtccatatcttagataaagacatatatacgtaacatttcattttcaatcattcgcaacaaaataaatagaatacgttttgagtttatcacaatatctgttataatatatagactgatcatagtgtctaatttcttaatacaatatgcagaaaacagtagtgacaacaaagagcgtgaaatacatgccgttttggttgtcgtttttcctcttcttaaacggcgcgatttgggctgtctatgctttactccaacacgacgttttcttactcgtaagtatagtttcactgttttattcacttcttaatttatgattacacccttatactcatgccgtctctgtgtcccgttagtgttttggctttagacacattcaaaagacaaaaaggaaaacttaacaaagctatttcatcgaccccatatctttttcgatattccagcaatacccccaaaatatttttgttgttttcttt

SEQ ID NO: 161846 - DNA, 1373 bp, Arabidopsis thaliana landsberg
tgaatacctttagttccttccttaatcgttattctggtatcacgctcaggtctacttctcagtttatgggaagcttaaggatgtgctgcagtcaagtggttggttttcctttgtaacaaatcttttgtgcgttgtagcttatgcttaaccggaagagtatcatatatatatgctcaaataacgtataccaagtcttttttatcaactgttcatgtttgactgatagatggcaagcttagtattgggtcaaacatgatagctgcagctggtgctggagctgccacatctattgcaactaatccgctttgggttgtcaagacaagattaatggtaacttttgtcttctttctttggtttcagctttactagacatgttgaatttgttttatcataagatacttgacctaacctcttaccgttttttcagacgcaaggaattaggcctggtgtggtaccttacaaaagtgtaatgtctgcatttagtaggatttgtcatgaagaaggagtgcgagggttgtacaggttagtgtctcatatgaaactgaaagttccgtaaatttgaacacctttttcttgtgatatttcgtgcttatgttaaacgttttagttatattgcttatatttcctgtattggaacagtggcatattgccttctttggcgggagtaagccatgtcgcgatccagtttccagcttatgaaaaaattaagcaatacatggcaaagatgggtaaaacatgattcctccagtaaaatattgttacataatcatgtgctgttcccaactagtttctgatcagagctataaaagttctcagataatacatccgtggagaatctgagtcctgggaatgttgctattgcctcctccatcgcgaaagtgatcgcctctattttgacttacccacacgaggtctctcttcttcttctcttttgtgctctctttacctcactcttaagctcataactaactataaactgttttatgttacatccacaggtaattagggcgaagcttcaagaacaagggcagattagaaatgctgagactaagtattcaggagtcattgattgcatcacaaaggtgttcagaagcgaagggattcctgggttgtaccgtggatgtgccactaatctactgaggacaactccatcagcagttattacatttacaacctatgagatgatgcttaggtttttccgacaagttgtgccaccagagactaataggtcggatgatcgcagaagagaagaagaaagaaagaatttagttagccgacgaggagaagaagaagataaagatttgggtttgagagaatcacaaactcaatctaataagatcagcactccccatatccctcttggaagcaaataa

SEQ ID NO: 161847 - DNA, 748 bp, Arabidopsis thaliana landsberg
cgcaaatgtacagaccctgcaaaacacggtgaactagattggacaagacggtacaatatcattggggggattgctcgaggaattctatatcttcatcaagattcacggtttacaatcatacaccgtgatctcaaagcgagtaacattctcttagatgctgatatgaaccccaacattgcagattttggcatggcgaggatttttggagttgatcaaaggcaagccaacacaagaagaatcgccggaacattgtacgctttcaattaaaaaaaactccgtttggtggttgtttgtagactaaaatgtgaatctttatttgcagtggttacatgtcttcagagtatgtgacgcgtggccaattctctaccaaatctgatgtttatagctttggagtattgattctggaaattgtatgtggcaagaagaacagcagcttctatcagatagatgattctggtggcaatttggtgacacatgtgagcaaaaaccaaaccaaaatattactctgtcttgattgtgaccatcgagaattttgataatatgagtttcttggcaggtttggaggctttggaacaatgattcacctttagatcttatcgaccctgctattaaggaaagctacaataataatgaagtcataagatgtatccatatcggacttttatgtgttcaagagagaacctgtagatcggccagagatgtcgacaatctttcaaatgcttaccgagagctccataactatgcctgt

SEQ ID NO: 161848 - DNA, 246 bp, Arabidopsis thaliana landsberg; identical to SEQ ID NO: 81126

SEQ ID NO: 161849 - DNA, 922 bp, Arabidopsis thaliana landsberg
aagaaatctgtacagagtctgagagaatgagaaaggagactgagctgattgaaacttctcttaagcaacttgaagcaagggagaatgagcttaggtagcttaatgagaccatccaacagaaatcgattgtgttggaggagaaagaagagaactttcaactgatacaagaagcattagccagagaggtggaagctaagagaaagtttttcgacctaaaggagaaggaacttgaagagaaggagaaagagctggaattgaaacagagacaagtacaagaacgatcaatacaagatggaccttcggtggatgctgagcctcttacacaacaacgcaaccataatgatgaagacaaggaaaaagattcggcttctgtactttcagcttctgtgcaaataagtgaagcacatgaaaaagatattgaagaattgttgtctccacagttgaaaatgatgaggatcatgagccagtaatgtgtgttgttgattcagagttcaatgatttccgcaagacaatgagctctttcatggctggtcaagtatgggctctgtatgatggtatagactctatgcctaggtgttatggtcggatcaagaaagttaacaagtgtcagtcgagtcttcaagtgacatggttagaacctaaagctgaggaatctgttcttgctgcttgcggcaggttcaaatgggagaatacagataccatacaaagtcacttggccttttctcatgagatacatcccatcatacgtggcaaacacttcatcgctgtgaatccgagtaaaggcgaaacgtgggctcttttcagagactggagcaaaagctggaacaatgacccggaacagcacaagactccttataggtacgactttgtggaagttctagtcagcttcgacgattctctaggcgttggagtggcctatcta

SEQ ID NO: 161850 - DNA, 1390 bp, Arabidopsis thaliana landsberg
  unsure (1)..(1390): unsure at all n locations
ttacctcactaaccaggtactacanctttggttgtctaacttaggatgtaccatgtttacggtgtattcatcttctcgtttaacaaaacaggcggtctacaacgcaaacaagctgtcggaactggtacagaagaggatgaaattgcagaattggcttgattactatcaaaacaaacactctaggaatccatacaaaaaggcctttaataaaggtaagacaaatgtatgcaaccacattgctttcttgatcttctctttagttgaatcttgataatcttctatttacctgagcagattggtttccttggctgttggggtgaagaagttgatgcaattgatcactacatagaaaaaatcgagggtctaacgagaaaagtaaatgcatcagttcaatcttacatataatattgtgctactaaacttgtttttgatcatcttgttgtttctttactttgatggtttcagataagtgaagagaaagagacagtaatgagcagcacaaaatcactcgtacctgcagcttttgtatccttcaaaaagcgttggggcgctgttgtttgctctcaaactcaacagtctcgaaacccgacagagtggctaaccgagtgggctccagagccgcgagacatacactgggacaatctagcattaccatatgttcagctcacaatccggagactagtaatagctgtagctttcttcttcctcactttcttcttcatgatccctatagctttcgtacagacactcgccaatatcgaaggcatcgaaaaggctgttccgttcttgaaaccgcttatcgaagtgtataatctctcaaccttaattctctgttccttaacttgtgatgatgtttctctgaaatctttgtgtatgtggacaggaaaactgtaaagtcatttatccaaggttttcttccgggtatcgcattgaagatattcctcattgtcctcccaagtatactaatgctaatgtcgaagttcgaaggcttcataagcaaatcttcactagaaagaaggtgtgcaagcagatactacatgttccagttcatcaacgttttcctctgtagcataatcgcgggaactgcgcttcaacaacttgacagcttcctaaaccaatctgcaaccgaaataccgaagacaattggtgtctcgataccaatgaaagccactttctttatcacctacataatggtagacggatgggctggtgttgctggagagatactgaggttaaagccattgataatatatcatctcaagaacttcttccttgtgaaaacagagaaggacagagaagaagcaatggatcctggaaccataggtttcaatactggtgaacctcagatacaactctacttcattcttggtctagtagacggcgctgttag

SEQ ID NO: 161851 - DNA, 1171 bp, Arabidopsis thaliana landsberg
  unsure (1)..(1171): unsure at all n locations
accgtttttattccttccttccacaattatagaattttttcattcttcggactcgctatgaccacttacacttcttggtatctcaccattgcttcactccttcatggccaggtcattataattaacacaaatcttgttttgattattataagatatagacatatagtcctggttattgttgtttaatatatttatttttcatataaaaaaggctgaggatgtgaaacactctggtccaaccacnnnnnnnnnnnnnnnnnnnggagccaccaacattctctacacctttggtggccacgccgtcacagtgtaagttttttttttttgtttggaaaaataaaatggcttaattaatggcttaactaattatgtattggaaatttgaaacaatataatagggagataatgcacgctatgtggaaaccgcaaaagttcaaggcgatatatctactagcgaccatatatgtactaacgctaacgctaccatccgcgtctgcggtttattgggcgtttggcgataagctactaactcattcaatgcgctctctcttctcctaagactggttttagagataccgcagtgatcctcatgctcattcatcaatttataacgttcggattcgcgtctacaccattatactttgtatgggagaaattgataggtgtgcatgagacgaagagcatgttcaaaagagccatggctagattacccgtggttgtacccatatggttcttagccattatcttcccctttttcggaccaatcaattccgcagtcggatctctcttagttagcttcactgtctacatcatccccgcattggctcatatgcttacctttgctcctgctccttcaagagaggttagatttccaacttccaaaatatctattttaaaattataattgtttcataaaaagcttgttacaattttagtataagtttacaaagaataattggaaatagtatattattagtttatattaaaattattatatagtatcatagattatgtaaaaatagctaaaataatattttggtatatctaattgttgttaatattgatatatcgtaaatagaatgcggtggagaggccaccgagagtggtaggaggatggatggggacttactgcataaacatatttgtggtggtttgggtattcgtagttggg

SEQ ID NO: 161852 - DNA, 1240 bp, Arabidopsis thaliana landsberg
tcttggacattggggatgacgaggtttgcttgctttctcttctctaccttgctcttaagttttagctatgcagctataacaccaacaagtcctttgtcaattggacaaactctcagctcccctaatggaattttcgaactggggtttttcagtcctaataactctcggaatttgtatgttggaatctggttcaagggtatcattccccggacggttgtgtgggtggccaatagagaaaattctgttacagacgccactgcggatctagctatcagtagcaatggaagtcttctcttatttgatggcaaacatagcactgtctggtccaccggagaaacttttgcatctaacgggtctagtgcagagctttcagacagcggaaatcttttggtcatagacaaagtttcgggaataactttatggcaaagctttgagcatcttggtgatactatgctaccttactcctccctgatgtataaccccggcactagtgagaagcgggtattgtcttcttggaaaagttacactgatccattgcctggtgagtttgtgggttatattacaacacaagtgccaccacaggggtttattatgagaggctcgacacgttattatagaaccggtccatgggctaaaacaaggttcactggatcaccacaaatggatgaatcatacacaagtccattcatcttaacacaggatgtaaatgggtcaggatacttttcatttgttgaaagaggcaaaccttcacgcatgattttaacatcagagggaacaatgaaggtcttagtgcataatggaatggactgggaatcaacctacgagggtccagccaattcatgtgatatatatggcgtatgtggaccttttgggctttgtgttgtatcaattcctccaaaatgtaaatgcttcaaaggttttgttcctaaattcgctaaggagtggaagaaaggaaactggactagtggttgtgtgaggcgtaccgaactacattgtcaaggaaactccagtggcaaagatgcaaatgtcttctatactgttcccaacataaagcctccagacttttacgagtatgcaaattctcagaatgctgaagaatgccaccaaaattgcctccacaattgttcttgcttggcgttttcttatattcctggaatagggtgcttaatgtggagcaaggatctaatggacacaaggcaattttctgcagcaggagaacttctttccatgcgtcttgcac

SEQ ID NO: 161853 - DNA, 937 bp, Arabidopsis thaliana landsberg
gttttcccgataactaaaaataagcaaaaatagctctgttatgtagggttttgttataaactttggtggccatcaatgctgtgacgaagcaggattgtaaataataaccctaatatgggtactctcaatccgttaggttacgaccagtttctcgttatatcgataggaacaggatctgcaaaaaaataagagaggtacagcgcaaagaaggctgcaaaatggggaatcatatcttggttatatgaagatggaactactccgatattagacattacctttgaatcaagccgcgacatagtccattatcacagctctgttgtgtttaaagccctacaatctgaagacaagtacctcagaatcgatgtacgtaagagctacatataaatatatatatgtgtgtctcctaatttctgattgatcgtttgattgattggattgttttatgtatgaaaatccattgcaggatgatacattggaaggagatgcaagcactctggatctatcgacaaagtctaatttagaaaatcttataaaacttggagagaagatgctgacaaacagagtcatgcaaatgaacatcgacactggtacatatgaacctgctgctgaaaatattaacaatgatgaaaaactcaagaggtgattaataagtttcaaatgtttttatccataaatgggtttcttggatcacaagtaatctcgttctttgatatttgtaaatttaggtttgcgaaaatcctcttcgaggaaaggaaattaaggagaaagaggaacgacaaaatgactaaagattcatcaatcggatcacaagagatcaagtaaaaggaaatacagccggaaaatcactcgtgcttttgtgtgaaattattttttttgcaagatgatattggtattttggtaaagctgaagattttgtgtgtgttggtcagcaaattct

SEQ ID NO: 161854 - DNA, 3055 bp, Arabidopsis thaliana landsberg
tttataatactcagcaattactattaaaccgtcggagccttaaatcccacagctttatcacatctcatattcataaaaatgttatgactcattttgttgctttccctctggtctatgggttgtctggcttatctaaaatctgctcaagctgataccctacgttttcctttcaggacatggcttgcgacacattcttaaaaattgttcagaagtgtaagcgaaaatttgttattgttcacgtaatgtattcgctcgtttgatacttttaattcttactttatcatctaatgagggtcttctgcgcttttcaggttggagaaagtgagccatttgtgtctgaacttctatcaggccttgctacaatcgtcggagatcttcaacctcatcagattcatacattttatgaatcagtaagttttttagtcgtgtctcttttatagagatgggaagctattcctgttgtgatctcatcgtttgtctctctctccaggttggtaatatgatccaagcagaatcagatcctcagaagaggggggaatacctccagaggttgatggctctcccgaatcaggtatgttaattaaaaggtactgttcatcttttgtttttgtaatagcttactaaaattgttcccctatacaatgtagaaatgggcagaaatcataggacaggcacgtcaaagtgtagatatcctcaaggatcaagttgtgatacgtacagtgcttaatatcctccaggtctgaatcttacggagttttagttgaaatttgcttttctttttgaacgtattagaattttatacataaaaatagcattcgttatggttgagctggtgcatcggtagactttggtttagctgcatagtgtaacttatatttttgtgcagacaaatacgcgcgttgcaacttcactaggaacattcttcctgtctcaaatttcgttgatcttcttggatatgctgaatgtttacaggtaaactctttatacaacacttatattgcagttaaaagttataagacacacatacactcattatgtttatggacttaattcttcctctactgcaccagaatgtatagtgaactcgtttcaagcagcattgctaatggtggcccatacgcttcgagaacatctcttgttaaacttttaaggtaggagggcattttatatacaaaataaaattaatgtccctatataagaaactggaataatactacatctttatgcttgatggaacaggtctgttaagagggaaattcttaagctgatagagacgtttttagataaagctgaaaaccagccacacattggaaaacagtttgttccaccaatgatggatcaagtacttggcgactatgcaagaaatgttcctgatgcaagagaatcagaagtcttgtcactctttgcgacaataatcaacaagtatgtcacttttctgtatcagcctgtattattaatccaggatgtttggtctgctcttgtaagaatatttttagttatcatcatgtattaatcaaactagttgatgcataaaatgttcaatactgtataatctcaaaagaatttttaccactagatgtaacatgaaaatctactatcttctaaacccaacttgttgatgtgctcgtgtagatacaaggttgtaatgcgagatgaagttcccctcatatttgaagctgttttccagtgcacattggaggtaactgattctatggtccattgaaaatatttctcacatgtgcatttttaagctatcagtccaccctttcgaaatattataaacaatgctatgtgatactcagtcgtagttctatgcatacatggaagtgactagtgaattcgttttcatctttttctgcagatgattactaagaattttgaagattacccagagcaccgtctcaagtttttctcgttacttcgtgctattgctacattttgtttccgtgcgttgatacagttgtcaagtcaggttggtgattatgttcttgcattagtattctttgcgtgatcttagaaagctaataacgacctttccatattattagttttctagttatccctgagcttgtcttgtttttgtgtctcttcatcagcaactgaagctagtgatggattcagttatctgggcatttaggcatactgaaagaaatatcgctgaaactgggctcaatctcttgctcgagatgctgaaaaactttcaggttttggaatttccttctcgttttgttggcatttttagcctctttatgtgtgtgcatgatttaacatgttgctctttgacttgtggcagaaatctgacttttgtaacaaattctaccaaacatactttctgcaaattgagcaagaagtatttgctgtcttgaccgataccttccacaagcctgggttcaagttgcatgtgttggtgttgcagcacttatttagcctggtaaataatacgtatactacttgtataaaaatctaccacttggctagtcactgcggaattaacggatcaataaaatatttaggttgagagcggatcattggcagaaccattgtgggatgctgcaacggtaccgcatccttattcaaataatgtcgcctttgtgcttgagtacaccaccaagcttctaagctcatcattccccaacatgactacaacagaggtaacgtgaactaaaccagaggattttcaattcttcgattgccactgatattgaaaataaaacactgacaaaacacaacaaaacaggtgacacagtttgtgaatggactttacgagtcgagaaacgatgttggcagatttaaggataacatacgcgacttccttatacagtccaaggaattttctgctcaggtatataagtaattgctacagattagattggtatcttcttttataccacatttcatcaaaaactctaatgaatggattatttttgttcaggataacaaagatttatatgctgaggaagctgctgcccaaatggagagagagagacaaagaatgctttcgattcctggacttatagctcccagcgaaattcaagacgacatggccgattcttaa

SEQ ID NO: 161855 - DNA, 1452 bp, Arabidopsis thaliana landsberg
ctcgggtctccagtcctgtaatattctgtttcctgtgtggtatggatgttctattgagtcttttagaaaacagtcatataatcttaagcttttcagtgttttctacagtcactgttctttggtattctatcgtttctcatcacatgggtcgaaccaactttattggagctaaaattgttatttatatctccttttcatcatttctgcagcttgttcgcagcaacagccgtcgatttatgccatcacaggcagatgatgaagctcatcagttgtcatatctgcaaaaacatttagcaaacatcatttctctccttgcagagcctgtggagggagaaggagatgaatcattggtaagttctaatctttcttatattctcagggggtgtcactgttctaagctacaagaatataaaattctgatgttggaataagaattttttaggaaatgaaagagaacacaagttaatttttttttttcttgtccaatatcgttcaggttttctctatggaggcgttcgagcatctgcgttttcttgttcagtttggtgataagggatctgatgtatctccattgagccaagctactcctttttttgcaaattctgatccggatatgcccgctgttccagtccccgcttcccaagtgcatgactggcttctgcaaaacatagcttccgctttagaaagcattactgagagaatttctggaaaagagaacggaccttctaacgatcaagatgatgcgatgtcagatgtttgtgctgctccgaacaaggttgcacctagtactagaggcccgtgtttaatcgagggagtctccaagacttcacttgttaagcaagcctccgatctaaggggtagatctgtgaaggtctgactgttccttgttccgtttttcttccagtcatggaatctctgtgcaagcatgtcaactccttgttttgtgtatttttcaggttgtcaattgccatgattctgtaatttatcttttagcaccattgcgatatgcaactgtgcacggatgttctgatactactatagttttgggagctgttggcaaggtatggaaacaatgcttcttccttctttatcttttctgaagatagtcaaagcaacatttaacaagttataatatctgccaacttttattaaaagatgtatcaaacataattccgtatttatttctgcaggcaataaaagttgagcactgtgaaagagttcatgtgattgtagctgccaaacgagtgtgcattgccaattgtcgtgaatgtgtattcttcttgggagtcaatcagcggccacttattgttggtgataaccacaaactgcaggtgaagcttctctttaagattgtggtttaatttacaagttttatgtcatgttgctcttatttacctttctgatattaaggtaaaaaaaattgagtggctagacgttttactagatttaggt

SEQ ID NO: 161856 - DNA, 1218 bp, Arabidopsis thaliana landsberg
ttttctggcatagtcacaatttctagaaactttactgatttttttcttcttctgattggcttgttgtctctcaacttcctacttactttttttaccctaatatttgtaaatcttgccttttaaaggtgattccaagatttacccaaatcttgttggcttctcacattatagaacaaggaagatgcagctatctattttctaattttggctttcttgtggtctttgtaggtgcctcatggtgtgtgtgtaagacagggctgagtgatacagtgctacaggcaaccctagactatgcttgtggaaatggagcagattgtaatcctactaaaccaaaacaatcttgcttcaaccctgacaatgttaggtctcattgcaactatgcagtcaatagcttcttccaaaagaagggtcaatctcctggctcttgtaatttcgatggaactgccactcccactaactccgatcccagttagtctctctaaactattctcatttgttctgctctttgatattacattaggccaatgctaaagaaacttgctctttttggagtgcttgttaggattcatgtggtgtctaattattgatagttacagaaagttgaaggtttttatttttgtcactagtgaatgactttggtattcaagattctgagacaaaatggatacgccaaatgcataataaagactatatttctagttttcaaatttgtggacaataaccaatggcttaacattttctgtgtttgttttttacaggttatacaggttgtgcctttcctactagtgccaggtatgcttctgattcaaatggccttatcaagaaattgaaagaaacgttttgcattttatggaaccaaaaccaagaatttgttttctatgtttgtggcaaagagaaaaagtagattaaagtttggtttgggtcccaaattacaactttttttgttcttgtttacttttgttgtgaaagagatatcatcattcagcttaaattaaaatagaaaacagcatcattagtattacttaaatagactaaaggaaatagagtaagtaatgaaattttttgactctgttgtgaacagtcttattttaagacactgttaattgtaagtgttcaacgtgaacctaaaagtactcaattttctttatttctttaaccaaacttttggtcatatcaataatcaaaatcaaatgctttattggattacagtttgaacgc

SEQ ID NO: 161857 - DNA, 1226 bp, Arabidopsis thaliana landsberg
  unsure (1)..(1226): unsure at all n locations
aaagcaagctgaagtccgagacatcgcaaagaaagaatatggcattgatttaggaactcatggcttatctnnnnnnnnnnnnnnnnnnnntggtagggtttggtcagattttcttttagttcaagcggctagctaacgtgttgtgaacaattaggctttagggaattgaattctctgttactaacatctacagtacgtgaatgacgcttatggcgtagacaaacatttctttcctctgatttgatatggcctgatcttgagcttatagcgcttttcttagtttatgaatcactgacatatttttttgttgtagaatatgtatgatggtaatgttaagaacaagaataaaggacccttatcagtaggcgtccctggggaggtagcgggtctattcatggcttggaaacagcatggaaagctaccatggaagcatttagtgtatcctgcagagaagcttgcagctcaaggattcaggatttccaagtatttgtatatgcagatgaacaagaccagagttagtattttagaagacaaaggcctctctgagctattagtttcacatggagagctaaagagaccaggcattgccgtaatccaaaattggccttaacgctgaggcaaattgcagagtatggtccaaaagcgttttacaatggcactgttggggttaatcttgtgagagatatcgttaaatccggagggataatgactttgaaagatctgcaaagttatagagttaaggttagaaaaccgttgtcagtagacattctcggataccgcctactaggtatgccttctccttcatccggtggtgctgcaatgatgcttgtaagtttggttttcttacgtgaagatatcaacttttatgaaacctaggtttacttgagtttttttgtaagggagtttcttgtgttgcaggttttgaacattctttctcaatatgggattccatcaggtgtttcgggctctctcggggttcatcgacttgttgaggctctgaaacacactttcgcagttagaatgaaccttggggatccggattttgtcgatgtttctaaggttatttctgatatgttgtctacaaattttgcacaaggcttgaagaaaaagataaacgacaccaaaacctttgatccaaattattacggagaacaggtaagttaaattgatctgttaaaacccgcagatttcgtctgtcaaatcttgatttaatcggtctttccgtt

SEQ ID NO: 161858 - DNA, 963 bp, Arabidopsis thaliana landsberg
  unsure (1)..(963): unsure at all n locations
agggattatacaagcaatggtattctacttgtatcctgtaatggtggattgaatcaaatgcgatccgcggttggtgactttgcttaaattctctttttcttcttctttcagatttgatgtttttccaaattctgatttttatgttgtgtttcagatatgtgatatggtgactgttgctcggttattgaatctcactttcgttgttccagagcttgacaaaacatctttctgggctgatcctaggtactctatctttggtgtttatagaatcactcatgtgtcttatatgcttaacattttttagcaatctaaagtatcctcatttttgtttgcagtggttttgaggatatttttgatgtgagacatttcattgattcattaagagatgaagttcggatcttaaggaggcttcctaaacggtttagtagaaagtatggatatcaaatgttcgaaatgcctcctgtgagctggtctgatgaaaaatattacttgaagcaggtttgtcttgtttatcactagttttgctgttttggttcctttgactatccttgttacaagatattacctaaccatttgcatatgtgattggttaatttcttgttcaggtattgcctctcttcagcaagcataaagttgtacacttcaataggactgatacccgcctggcaaacaatggtcttccgctctctctccagtggctcaggtgccgggtnnnnnnnnnnnnnnnnnnnntcactccacagcttgaggctttgggatctaagttagttcggattctacaacaaagagggccatttgtggctttgcatctgagatatgagatggacatgttagctctctctggctgcactcatggttgcactgaggaagaagcggaagagctaaaaaagatgaggtttctcttcaaaagatttctcctgaattggtgctcttgatataggtctttttagttgttaattcata

SEQ ID NO: 161859 - DNA, 927 bp, Arabidopsis thaliana landsberg
agttctgttaacagaagcagcccatgcccgagatgtcttgttaacaacttccttaacctggtaatgctcttttttccagcgtttacttttcacctgctacttatattatgtaaagtagagttcattgaagcttcggatttggtctctttgcagtatatctctttattcagaagaggcgaaacccgctctctcccatcctccttacaggctactaatgtatcgatagctacatctacttcgtatgacaactttatgtctaatacattccattctactccaaggcctctgccttatgatgctgatccaagatacttccggtcaaggcgtgattcgcttgtttctagacgcgataagggttcaagtcattctcatgaggaatccgagcccttaagaagtgatgctgatgtggattctgagtctttctcagtggaaggaagcaaatgggctaataagcttattatctctggtgaagattccaaagaagagttctctaaatcctctaggaggtttcttcagtcaaggacaatgtctactggtaatgaaggcgtgtatataacatctgatgatgaagatgtctgtccaacgtgtcttgaaggtattcatcttcatcttttttttttttcttcttgggtcaatgcattccaaagaagcttagtatcagattatttcgtgtgttttgtagaatacatatcagagaacccgaagattgttacaaagtgttctcaccatttccaccttagttgcatttatgaatggatggagagaagtgaaaactgccctgtttgtggaaaggtaaacacttttcatgttcttccaagccagttttcggcttctcatttactagtgtttcagagtcagactcagacaccatcacgcataaatagacgagtgatccagagatcaatagaatgaaagatgtacaacaac

SEQ ID NO: 161860 - DNA, 271 bp, Arabidopsis thaliana landsberg; identical to SEQ ID NO: 63589

SEQ ID NO: 161861 - DNA, 981 bp, Arabidopsis thaliana landsberg
atgtctcgtgaacttattattctctgccaaccaattcttgttctgttccttactctgttttacaattctcatggctacttcgtctcacaaggatctgtaggaatcggcttcaacggttacttcactttaaccaacaccacaaaacacacattcggtcaagctttcgaaaacgagcacgttgaaatcaagaactcatcgacaggtgtcatctcatctttctcagtcaacttcttctttgcgatcgtccctgaacataaccagcaaggctcacacggtatggctttcgtcatctctcccacaagaggccttcccggagcttcctccgatcaatacctcggaatctttaacaaaacaaacaacggtaaagcctcgaataacgttatagctatcgagttagatattcataaagacgaagagtttggagatattgatgataatcatgttgggattaatattaacggtttgagatctgttgcctctgcttctgctggttactatgatgataaagatggaagcttcagaaatctttctttgatcagcggaaaggtaatgcggctttctatcgtttatagtcatcctgatcaacagctcaatgttactttattcccggctgagatccctgttccgccacggaaaccactgctgtctttgaatcgagatctctccccgtattttttggaggagatgtattatggctacacggcatcgactggatccattggagcatttcattatatgttgagttcgtacgctactccaaaagttgagaatccaacatgggagttcatcgtagtcccaacccttcctccatatccgaagaaatcgtctgacagaacaaagaagattttagcggtctgcttaacgcttgctgtgttcgctgtgtttgtcgcctcgggaatctgttttgtcttctatccgaggcataagaaggttaaggaggttcttgaggaatggtagattcaatatgtacctcagagtttc

SEQ ID NO: 161862 - DNA, 1678 bp, Arabidopsis thaliana landsberg; identical to SEQ ID NO: 27955

SEQ ID NO: 161863 - DNA, 1056 bp, Arabidopsis thaliana landsberg
actactacacattctttcctcttgttcatttcaaacccaaaaatcaaagttcgaagttgaaagaaaacatggttttgtctaagacagtttcagaatctgatgtctcaatccattcaacttttgcttctcgttacgtccgcaactctcttccacggtaacaacttgtaacacaaatcttttgtctaatgttttcgtcaacaatagtaacatgtaatgatgtaaaccttggatagtttttttttttggccgaggttaatgttgtagatttattatgtgttatatactaaaaggaaggacatgtttcgttattttaacttaatgtatcatcatttcatcattagattcgaaatgcctgagaactcaattccaaaagaagcagcgtaccaaatcatcaacgacgagctaatgctcgatggtaacccaaggctgaacctagcttccttcgtgaccacatggatggagccagaatgtgacaagctcatgatggagtccatcaacaagaactacgtcgacatggacgagtaccctgtcaccactgagctacagaaccgatgtgttaacatgatagcacgtctcttcaacgcgccgcttggtgacggtgaagctgccgttggtgttggcaccgtgggatcgtcggaggcgattatgttggccggtttggcttttaagagacaatggcagaataagcgtaaggcccaagggcttccttatgataagcccaatatcgtaaccggtgctaatgtccaggtaaaccaaaacaaaaattgatgaaatattaaccaagacaaaattgaatttatcaatccggttaagttatatgtgtgactcaatttccggttcaatacaggtttgctgggagaaattcgcaaggtatttcgaagtggagcttaaggaagtgaacctaagagaagactattacgtgatggaccctgtaaaggcggtcgaaatggtagacgaaaacacaatttgtgtcgctgccatcctcggttccacgaaaccgaagcttcgtggcgttagctcccaacgacctccttgtcgagaaaaacaaacaaaccg

SEQ ID NO: 161864 - DNA, 1722 bp, Arabidopsis thaliana landsberg
  unsure (1)..(1722): unsure at all n locations
gatgccaattcatgttttataggccccaacatcaaagagctaaaagcatacccatggaatgtgcnnnnnnnnnnnnnnnnnnnnnatttttgtggatttttttttttgcgggttgtgtgtcggtcacaaataatctgcggaaaagaggtttaaaatgtgatacaggatgtgtcaaatattgcgtggtagagaaaactattaatcatacgcttttcttttgtcaccgaacgcgtcagatttgggcactatcatagatacccacggtccccggaaactttctctttgattctgtttaatgcgaaattgaatcatttattttggagaattgatgcgtgttttattttgcctcaggcttttatctgaaagaccacacgactgctgcaagtgcacaatatattggagtagtattttaggatcgaatccataaggagagaagtagttcagagaaattcttaagaagagagtgaagctagggccaaaataaaagagtgggggttgttgtatgcaatgagtaaccaaaataaaagacaagtaactaaactaaacggtaagcaataagagagaagcgttaggtctttgggggtttcgccggatgtcatggttcaataaataaggtatagatctcaatctaggtgataacatggctaggtttgtttacttccaaattctcggacatacaaaactctatcaagaccagctaaccgtaacggttagtaggttaaagccggctattatcactaatatcctgcatactcagttgccctatcggttattaggtgctaacatggtttcaaaatacaagatcaaagcattaagttcaaattcgattctagtccataagtccctatcactcggcgggtgtgcaacggttatagttctttattcagttgagctagttcaagcattcatacgagattttgccaaagaatgaaatacctaaggtcaagtactaggtggcgttccggacatacaagcattaagattaaactcaactagaaagaatagtgtaaacgatcaaaaaagccatagaaaccgccaacctagactttcgatctattaatccccatgaattcccctttgaaaccctctcaaacccaactagagatctactcgctcatggcaaatgagctaatcaaaagttgggttgagtaaaccataacaaaagatgaataaaacttaaaaaaaagtttagagattacttctttggatgtagaatacaagaggcaaagctctactttaaatagtcttacacgaaaacgagaaagagaaagagagagatggtgttcttcaagcttcaagaggtgcggcggcgagtggacagctctaggcgacggctagggttcgcaggtgatgaaggcacatctagggttagggcttagaacaagtatttatacttgaggaaaatacttgagggccaagaattaggtttaggggtaagaacgtcatttcgccggataagtaagtgatcgggccgagtagtgggcttcagggcagcagcctaatgaaggtggcgcaaagagggaaggacttgggcatgacctaatggtcggtggtgagctactcggagctgccagggttcaagtctcctcggccggatgtgttttggacttattatttctaaacggccggttcttgacatgtcttcactctttgggtcatatcttccaaacggtttcatagattgctttgattcgactttggcgtaaatcttgactcttctaa

SEQ ID NO: 161865 - DNA, 492 bp, Arabidopsis thaliana landsberg
tttccagaatggaatctgcgtataggatgtggtttaaagagaagagagtcggtcgagtatccgtagaatcatacgagctctgcaaagaactcctagctgctttgagcactgctaaatggcaggtatgaaacaatcaatggtcctttgatcgttccctttttttttcatggtaactcatcagtgtgttagtgatattggttacattgttgtgacttgaatcagttgtaagagtttgagagggcagtgagcttaagccatgtaaattgtggacatgacactactttatctaggcataaccagtttgttaccgctattgaaatccagatttatcaagtggaatctactctgctagagtcgttaagcgagaatgggaaacaacctttgcgttgggtggatcttggcaaagaagagcgtgatgaccccgccatccttctatctggatcttctcaacagacagagaaattagcagtgatagcatcaacccgagagatt

SEQ ID NO: 161866 - DNA, 252 bp, Arabidopsis thaliana landsberg
actttgttgtatatagctgtatccaggaaaatctccgatgggtatgatattcatcccgtgctacaaaggtatatgcgaatcaattagcctgtgatcttaatcaaattattgcatcgcccattaagcttttaattggttgcgtaatgttttgcaggatacagccataaacctgaagaatactcatctcctgaagacatggctaatggagtaaaagtactctccctcactctggctaagctctctttagactga

SEQ ID NO: 161867 - DNA, 479 bp, Arabidopsis thaliana landsberg; identical to SEQ ID NO: 12386
  unsure (1)..(479): unsure at all n locations

SEQ ID NO: 161868 - DNA, 1196 bp, Arabidopsis thaliana landsberg; identical to SEQ ID NO: 18027

SEQ ID NO: 161869 - DNA, 637 bp, Arabidopsis thaliana landsberg
tatgacaaagagctaacgactgatcttcgaattcggagtattcaatgtccgatttccggaaattcctcagagacacctactcgttgagaaactccgccgtggctacgaggcggaagccacggattctgattttgtctaggagcagatcgcgagcgtttatgaacgcgggtgaaatcgctagagcggcgagacaaatcggatttaaagtcgtggtggcggaagcaaacacggaaatcgcgagtttcgcaataactgtgaactcctgtgacgtgatgctcggcgttcacggcgcggggatgacgaacatggtgttcttacctgataacgcgatcgtgattcagattcttccgatcggtggattcgagtggcttgcaaagatggatttcgagtatccgtcgaagggcatgaatctgaggtatttggagtacaagatcacggcggaggagagcacactggtgaagcagtacggacgcgataacgagttcgttagagatccattggccgttgcaaagcgtgggtggggagctttcgagtcggtttattcggtacaacacaacgttagcgttgatataaaccggttcaaaccggttcttgtcaaagctcttgagctattgcataatcagtcagtgtaaataag

SEQ ID NO: 161870 - DNA, 1162 bp, Arabidopsis thaliana landsberg
  unsure (1)..(1162): unsure at all n locations
taggagacgccgagatcagtcggcgaagcatcgacgactaatttcgtggcggcgagaccgtcggcgaagaccgatgatgcagtgacgatgagaggttgtggttttgctaatcttgccttggttggtatagacaaagaagagcttcgagggagactagcgatgcctgagtatcttcgtatagctatgagagattgtatcaagaggaaagattcaacagagatttctgatcatttgttacttcctggaggcgccgccgctgatatggctcctcacgcgccaatggttgtgtttattaacccgaaaagtggtggtcgtcatggtcctgttcttaaagagaggcttcaacaattgatgactgaagaacaggtctgttttttaaaaaacaaaaactttttttttgtttgcaacttatgaaatgagctcactttacttaacttttgaaatgaacttgagatcactatttttgaatgaagaagattttaaatcttgatttgggagtttactttctttttgacttcactagatttgtggatcgattgtgaatggacacactctgttatggtttaatgagtataactatgagcctatggcattcttattgttctgacatcatcaaatgttctgttttttttttctctgtaattttgtttagaagaagttataaactgttttgtcttaaaaagactgtgattcctccttagttagtgagctcatgttaatatttgcaatgactggtanttgatctcacagaagtgaagcctcatgaatttgtacggtacggtttggggtgcttggacacattggctgctaaaggagatgaatgtgcaagagaatgcagagaaaagatacggatcatggtgagtatctatttccaaagtattagttagcaattggaattagatttgctaagttagcggcgatgattgatgataggtagcaggcggtgatggtaccgttggttgggttcttggatgtctcggtgagcttcataaagatggtaaatcacatattcctcctgttggagttatacctcttggtacaggaaatgacctctccaggagttttagttggggtggttcattcccttttgcttggagatctgctatgaaaagaacattacatcgagcaactttaggttccattgcttgattagatagctgga

SEQ ID NO: 161871 - DNA, 1033 bp, Arabidopsis thaliana landsberg; identical to SEQ ID NO: 12552

SEQ ID NO: 161872 - DNA, 1376 bp, Arabidopsis thaliana landsberg
cctccttcaccgtctattgtcccgtctcctccttcaactacgccatctcctggttctcctcctacatcgccgacgacacctactcctggtggttctcctccatcatcgccgacgacaccaactcctggtggttctcctccatcatcgccgacgacaccaactcctggtggttctcctccatcatcgccgacgacacctactcctggtggttctcctccatcatcgccgacaacaccttctcccggtggttatcctccttcaccgtctatttctcctagtcctccgatcactgtcccgtctcctccgtcaaccccaacatctcctggttctcctccttcgccatctagtccaactccgagctctcctattcctagtcctcctacgccatcaactccgccaactccgatatcacctggtcaaaattcaccgcctattattcctagtccaccgttcaccggcccttctccgccgtcgtcacctagtcctcctttaccgcctgttattcctagtcctcccattgtaggcccgactccatcgtctcctccgccgtcaacacctactccggtttactctcctcccccgccgtctacagggtaccctcctcccccgccgtttacagggtactctcctcccccgccgtctacagggtactctcctccatccccaccacctcctcctcccccaactttctcaccttccccatcaatacctccaccaccgcctcagacatattctcccttcccgccaccgccacctcctccgccgcaaacatactatccaccgcaaccatctccatcacaacccccgcaatctccaatttacgggactccccctccttaccctataccttactagccgccaccggctcaatttgcatccccacaccaccagccccttactactacaggttaccaccagcaccgtcgtcgtcacattgctgattaccaccaccaacccctacttatcactatatatccccaccaaattcatcaacaccaataactcccctccgcaaaatcacattcaccgtgcataggattactccccacttccacctccaacagtcaattacaatcctccacaaccaccatcaccggagcactacagtcgtccgccttcaccaccagtttactactacaattcacctcaacctccaccggctgtccactacagcccaccacctccaccggtaatacaccacagccaaccaccaccacctccaatctacgaagggccactaccgccgattcccggaatatcatacgcttctcctccgccgcctcccttctattgattctttttcagaatgttctcaaaaggggcccaccacttatgccaaaacccgaaaacgaaacggtgtcgtgtcgtgtcaataa

SEQ ID NO: 161873 - DNA, 783 bp, Arabidopsis thaliana landsberg
aatgtcccattttctgttgtaggccatattagtttctactttccaggggcacgagcaattttcaccggggacaccttgtttagcttatcatgtggtaaactcttcgaaggtactccagagcaggtaaacatcatttatctaatctttggttctctctgaacttgactttattaagtgtcagttgttttaattggttttcaacaatctgcatcttttgctgcagatgctagcttctctacagaggataattgcgttgccagatgacacaagcgtatactgtggccatgaatatacactggtttgttatctttattgtgtgtttttaatatacaaataccacacatgtgttatcgcttctgatggaatcattttcaatctggcagagtaattccaagtttgcattgtctatagaaccaacaaacgaagtgctccagtcttatgcagcctacgttgcagaactccgtgacaagaaattaccaacggtaatctttctttcatttcagtaacttcactgtcattgatgtttcttctgtcgctattgataatatatatccaaagtaattgaaattatgacttctggactcggattctagattttcttgattaatttcgtgtctgggaaatctcagattccaacgacgatgaagatggagaaagcttgtaacccgtttctccgcactgagaacacagatatccgtcgagctttaggtattccagagacagcagatgaagcagaagctctgggttattataagaagagcaaaggacaatttcaaagcttag

SEQ ID NO: 161874 - DNA, 403 bp, Arabidopsis thaliana landsberg
atgttgtacccacacaacatcatatcttcttctttgggtttaagaaagccgtgtggtagtagtgaaggcagttgcagcagcagcaaccatgaagaggaagatggaagaagcttaatgaaagaacgacttcagcggtggaagcacttcttgtctatgacatcaccaaaagacagacttttgataatgtcttaaggtggctacgtgaactaagagaccatgcggattccaacattgtgatcatgatggctgggaacaaagctgatctaaaccacttgagatcagtagctgaggaagatggtcagattctagctaagacagaaagtctctctttcttggaaacatctgcttttgaagccaccaatgtcgagaaagcattttaaactgttttagcaaagattcatca

SEQ ID NO: 161875 - DNA, 1185 bp, Arabidopsis thaliana landsberg
atgtcaactaaattatccgtgttatatttgttggttcagattagtttccaggagttcaaaaacaagctcctcgaggctggtttagtggatcacatagatgtttccaataaagaagtcgcaaaagtctatgtgaggagttcaccaaaaagccaaacaacggaagaagttgttcaaggtcctggtaatggagttcctgctaaaggacgtggtggtcagtataagtactactttaatattggtagtgttgaatcatttgaggagaaactagaagaggcccaagaagctataggcgttaattctcatgactttgttcctgtcacctacgtcagtgaaactatctggtaccaggaactattgagatttgcaccgactttacttctcttggctacgctaatttttggggcaagacggatgcaaggtggactgggaggtttaggcggacctggtgggaaggctggccgtggaattttcaatatagggaaagctcaaataacgagagcagataaaaactccaagaataaggtcagcatttcaatcagggtggagaagttgaattaccatcttcatttccaattcatgatgctattgagatttactactgatctattttgttttttgccagatatattttaaagatgttgcgggatgcgaggaggctaaacaagaaattatggaatttgtgcatttccttcagaacccaaagaaatatgaagatttgggagctaaaatcccaaaaggtgcgcttttagttggcccacccgggactggaaagacccttctagcaaaagctactgcaggagaatcagctgtaccgtttctctcaatatctggttcagatttcatggagatgtttgttggtgttggaccttccagagtgagaaacttgtttcaagaggctagacagtgtgcacctagcataatatttattgatgagatcgatgcgattggccgtgcgaggggacgtggaggtttctctggtggaaatgatgagcgtgaaagcacacttaatcaactgctagttgaaatggatggatttggtactaccgctggagttgtcgtccttgctgggactaacaggccagatattcttgataaagctttattacggcctggccggtttgatcgccagataaccatagataacctgatattaaaggcagtgatcagatattccagatatacctg

SEQ ID NO: 161876 - DNA, 1144 bp, Arabidopsis thaliana landsberg
ctgaaagctaccttatgtatagttctagggatgatagtgtagagagatgttatggaaacgttcaaaatggcagaaaactggacctggagaagcaggaggacagtcatggacagtgaaatggctcaagttcgacaactcttatttcaaggtctatctctctatctttcttagtaacttggtttgggactgaaaaagagttttctatgaagttttctaaaaatagttttatcaaccattgacttctatgactttgcaggatatcaaagaaaagagggacgacgatcttctggtgttacccactgatgcggcgctatttgaagatccttcattcaaggtttaaacaacagtgattgctaataagatgcctcagaattagtagttcactgttacttaagaggaaatgtttttaaaaacaatagtttcttacagaactatgcagagaagtatgctgaagatccggctgcatttttcaaggactacgctgaagcccatgccaagcttagcaatctcggtgcaaaatttgatcctcccgaggtacaaggaaaggggagaaaatctaatatctatgcacttgtgtataccattataaaccatacgtttaaaatccagttcagtgacttaaaatctaaaactgctaatgtgtcactatgaaactaatcagggcatagtcattgaaaacgttccagagaagttcgtagctgcaaagtattctacgggaaaggtttgtccttacaaaacaaaaatgcgcttgtgtagcttattctaatataggattcggttcttgttttaaatctctccggcaatattttgcagaaggagctttcggattcgatgaaaaagaagataagagcagagtatgaagcaattggaggaagcccagataagccattacccacaaattacttcctcaacatcataattgccattggcgttttggtcctcttgtccactctctttggtggtaataacaactccgatttatgtggtttctaattgacaaattatatattttgatttctcttacctacatacataattacgtggtgatcatatattccttgcaaacaaaaacatcattgttaaagtttgcttgaataaaatcaccttataaataacattgtttatttggtttttagaattttga

SEQ ID NO: 161877 - DNA, 335 bp, Arabidopsis thaliana landsberg
atgttttaaaatgtgtcttttggaagtaaagttttgattttcatgatcgagtaagagttttcattcaaaaaattcaggagactggaggttggcaatgttgtgatggtgactgagtaaaaagcagagggcgtgttggtgtgatcaagaaccgtgaaaaaacaaaagggaagctttgagaccatccacattcaagactcaacaaatttgcgacaaggttagggaatgtgtttaccattgggaaaagaacaaagccatgggtttctcttccaaagggaaaatgtattaagcttaccatcattgaagaagctaagaagaggctttctgctcaacaagcc

SEQ ID NO: 161878 - DNA, 916 bp, Arabidopsis thaliana landsberg
tatgctatttcttaatgtggaaggtaacaagattaaggacgcatttccattttggttggggtctctacaatacttaaagattcttgtgttaagatcaaatgcattctacggtccagtctataactcctctgcctatttagggtttccaagtatgaggatcattgacatttccaataacagctttgttggatcattgccacaagactattttgccaattggtctgaaatgtcaaatgtatggattaaagaagggtacatggagtccgattacatggtcactttctccatgtatgattcgatggatttggtgtataagggagtaaatactgattttgttcggatatttcaagacttcaaagccattgatttttctggaaaccgattctctggagatatccctggatccattggtctattgagcgaactacgacttttgaacttgtcaggcaatgcattcacaggcaatatcccaccatccttggcaaatattacaaagctcgagacattagacctatcacgaaacaacttgtcaggtgaaattcctcaaggtctagggaatctctcatctctgtccaacatcaatttctcgtacaatcatctacaaggattggtgccaaagagcacacagtttggaactcaaagttgttattcattcgtgggtaatcctggactaaatggcctcgaggaaatttgtcgagaaagccatcatgttcccgttcctactacatctcagcaacccaaggaatctttgtccgaaccagaagggccagtgttgaattggatagcagccgcgatagcatttggacctggtgtgttttgtggattggttatcggacatatcttcacttcatacaaacatgagtggttcatagctcgtaaagcccaactccctcgcagtttcgtcaagtttgtctcc

SEQ ID NO: 161879 - DNA, 1801 bp, Arabidopsis thaliana landsberg
agcctctaagggttttgccctagacacccggagacttacagacccttttacagagattttctgcaacttatttagcagccgcttttgattccttcaactttgtattttgatttttcttctaagttattcagattttgctttcatttgcttattcatctttgtttcattccctttaatcttttaggtatgcaatcttcaatcgtttctatgttattgtctttaagcatgttgtctgaggagtgattaggatttctgaggatgggatagagtagttgtggaactcttggtcgaatctgttggttaagtgtagatttattgaatcccttatggattagttgagtttactgcttattcctttctgatcaactggaatccagtcctagacgttccagcacctagaaagcatttaatggaacattggatctactaattccagtgataatcgtctctatcccaagggattggccgtttagagcggttattggctttaacattcggttcttattgcctgcttagttagagatcgctaatgggaattaggtctgtgtctagctatgcttgaggatttctatcacgggagtgaattaatctgttgttgaacctattgtctagggatagcttaattgagatttgttaatcaactgaattgatcaaggagaccatactattcgattaccccatccttagaaatttctcatccatttgattgcctgttatcatttctgctttgtcattcacttgcctgctattgccattcctgcttttagtttcatttcatttctgttattgcatactaggactgttagaaccaaccaactatctgcttggcttgacttagagctttctgatcatatctcatctgtttgcatcacaccggattggattgacatcctaaaatactacaacgacaagatagtgttttagggattaattgacaaaaatcctactatcagcgaagtgaatccagaagggttaatcttaaccacctaacaaacctagagattaccttaatctaatccatcctcaagaaccctaatcactactcaagccatattctcaagaacacaaatccagaaattactgaaatcataccaaaatgtagatcaaaacaaactaaacaactttactaaaacaacaatatgcaaaaacaaaatagattaagagtaattatgttttaaagattcaagaacacaaagaaaaactaaaggataaaagctggatcctttggacaaaccccaaagtgatctatttatactaaaatgttgaaaaccctatattcactagaagacaagagacttgaggtggtttgggagaatgctcaatcttggggattgagttaagagggtgctgcaaagtctgcgcctttgtgtctatgctccgagtgatcaattggtcgagtagatggttcttcctctcctatccgtatgctcagatgtatggttgagtggggaatgaggaggatccgaacacgctttgatagctcaacaagtcatgtaatttggtcacccttgctcgagtaaatgggtcgagtagaggatcgagtaggaggggcgagtaaatcaatctactgcttcatttgaggctgccttgatcgagtaagagggtcgagtaaactgtagcctcctctgtagctgcctggattgagtagagaggtcgagtgaattgatgcctcttctatagctgcctggatcgagtgaatggatcgagtaaagtcctttttagctccttctgcaactgaaaacacacaaaaacatgcaatgcgaatgcaaaataagctaaaatggtgcaaaatgatatgata

SEQ ID NO: 161880 - DNA, 608 bp, Arabidopsis thaliana landsberg
  unsure (1)..(608): unsure at all n locations
agagctgttgatccaaaacatagactatgcagtgattttattcctcatctacgtttgcacgttatccattttcnccgggttcttgtatgaaaacacaggacaacacgggctaggcgattggtacgcacttgtcttagtagcgatgtacaattgttgggacttggtcgggaggtacacaccactggtgaaatggctcaagattgagaatagaaagttgatcacaattgcggtattgtcacgttatcttctcattccggcgttctacttcactgcgaaatatggtgatcagggatggatgattatgctcatttctgttttggggttgactaatggacatctcactgtttgcattatgactatagctcctaaaggatacaaggtaatctatttattttacaatttgcatatgcaaacgaatacaatctttgcgtttgagacaagtaatctcaccaaaaaaaatgtgggggtttttgatttggtgaagggtccggagcagaatgcgttagggaacttgctggtgatatttctgttaggagggatatttgcaggagttgctttggattggttgtggcttattggtaagaagaatgccttttgagttctaatca

SEQ ID NO: 161881 - DNA, 425 bp, Arabidopsis thaliana landsberg
  unsure (1)..(425): unsure at all n locations
acggtgaaagtggagagcatatgactaatcctccgggatcaaccggtggtgtgatcctagacgagttgtttaaggatgttgaatctgtgagtgaagagctacaggacatagatcggctcaacgaaacactctattcgtgtcacgagcagagcaagacgcttctctatgctaaagctgtagaagatctctggtctaaaatgctcggtagcgtaggagtcgtgtttatgaaggcgacgatgattaaggtttaactataggtgttacatcgtgccaatgttgctaatcggagtctccctggctgtggnnnnnnnnnnnnnnnnnnnnnnnnnnnnnnnnnnnnnnnnnnnnnnnnnnnnnnnnnnnnnnnnnnnnnnnnnnnnnnnnnnnnnnnnnnnnnngagcttatttcgtcccagtatagagaa

SEQ ID NO: 161882 - DNA, 318 bp, Arabidopsis thaliana landsberg
tcattgaagaagtacatgtggaactttgtgaacaacaagcctacacagagccaattcaggtatcagcgccaagtccctgtgaagacatcgaaagctgagtttataagcaaagatcttgtacgcagaggctttcgcagcgttagtccaacagttatttactccttcatgcaagcagctggactcacgaatgatcatcttaccagttgtttcaggttccaccattgtatattcgaacatgaaaggtatgtctgaaaagaaggacttcctaaaacttgttaaagtccttttatgttttgtaaagcctccaatttgagtcta

SEQ ID NO: 161883 - DNA, 1423 bp, Arabidopsis thaliana landsberg
  unsure (1)..(1423): unsure at all n locations
tgattctgttttggaagcaaataggaaaggtaatttattcttctagccataaatgagtccctctcctctcactgtctctttgtattccccctttggtctctgttttttctatgctaagccacttatatcttttgcagttaccaatgaggttgtgacaatcagttcagatacatactcgaccgttggctctatctccacgaggaatgggagtgtatcccaaagaagtcaatccataatccatttagatttctnnnnnnnnnnnnnnnnnnnnnnnnnnnnnnntgtgtcggggaatgagcctactacgtcaaaaacaagagtcggttccaccatctctggctcatttgcagggagattagcgtcattgggtagtgacattgccagaactactttaaggactactcaagctggagaaccaatctgtaaaaaatttggagagtttgcaccccccgaggaaagcgaagatccttttgcgtttgatttagaagattataaaccttccaagtgggcagtagtgtccgtaaaacaaaagaagtctagagctcaaaagaagaaaggatgctacaaacaaagtaaagatgaaagtttgtatcagctgttctcaagccaagaagagtcatcaaaccataggttgaattcccaagaagaatcaagtaacagagactgcagtacatcgctgcaaccatctcattgtacaaatgacattgatgaagaatgtctctgtcttttatttgattgccttctaacagccgtaaaggtaattttcttagagtcttttatcacctgtttactggtctgcggtgaaattctctcagctggagtagcacaaatttagttcatgattatctatctctctgcaggttttgatgaacttaacaaatgataacgttgtcggatgtcgacaagttggtgggtgtagagggctggaaagcatggctgaattaattgccagacactttccgtctttcaccagatctcagctttacagtcagatggaaaagacgggatcgtcccatcagaagaaagacaaataccttaccgatcaggaattagattttcttgttgccatcctggggctactggtaaacttggtggagaaaaacggaataaacaggtaccaaactgctcttttcgatttacatctttatgtcaactcaggaaaacatagtcactgattgtcttttatgcaaatggggggaactcgtgatttcataatattatgatctgactcgtacccatgtcttgaaaaatattcgctaatcagttattatttggtccaggtcaaggctcgcggcagctagtgttccgattaccaatccagaagggttacaagatagtgaacaagacatgatccctcttttatgttcaatctttctcagcgatgaaggatccgctttcaccaaagataccaccgagcactttc

SEQ ID NO: 161884 - DNA, 3652 bp, Arabidopsis thaliana landsberg
tttaagctcttgtctcattagatggaagaggctccattaacccgaaagggttacaattttacaagaacttcatccaagaacttgtcaaacatggtaacacccgtcttttcactcttcttcaacttttcgtttacttactattaattggactatatgtattttttcctataggaattgagccacatgttacactacatcactacgatcatcctcagtatctcgaggatgactatggaggctggaccaaccaccaaatcatgtagagcggcatttactttgcttcttcgttcaaatccgtttacaaaaacaaatctgaaaaatgaaaatcattgttatttgtcatcgcagcaaagactttaccgcttatgcagatgtttgctttagagagtttgggaaccacgtcaaattttggaccacgatcaacgaggctaatatattcactattggaggttacaacgatggggatacaccgcctggtcgttgttctttaccgggcaaaaactgcttgttagggaactcttctactgaaacatatattgtaggccataacttacttcttgcgcacgcctctgcttcaagactctataagcaaaagtacaaggtatacttgcttatacataacctcttttgaatgtgtaagaagcaacatactatatacaatgtgcagtataaacagggaggttccatagggtttggcttatatttgatgggatttactccttctacaagctccaaggatgaattcgtgatagtattccaataagggttcgtaataatcgtttgtctaatctgtttcttctctgttcaggtcaagccacgtggagcattttcccggcgaagatctcccggccatgtctctccggcgagagtgtctttagctagctctcgagatcaattactcaaaaacaaacaaaaaaaaacccatgagagaggttaaatctctatgataatttcggcgttggcttcaataatactagctataatcatatatatacacttataagtatataatatagtcttatttgtcgtaaactatagtatataattatatagatatataaaattcttatctatgtcatgcatgtttacgtataattgtatgttttttttttatggaaaagtgtgttggaatcttccgtttggtgaaatcacattagttattaggttttgcttcatttttgttaacataccagaaaaatatccgtttgttcttttagtgagaatgacatgtaaacttagagcaagtccaacggtgcatcttaacacatatcttagcataatatcttaggtttaagtaattaaaattaaatcaaaaatgacttaaatgctaagatttacatcttagctaaaatcttttatgtgtgctaagaagcatggacgtgtcctgaaatgagtggtccaaattaaagacaaaagcaaaaaataaaatcacgcgttcatcttctctttctctttttttttcttctctttctctcgttctcgagacatgcaaaacaaacacaaaaacttcaccatccggctcgatccgatgaattgagaagagatttgagtcggaaattcttcgttcatctgtggtcatcatcattaaccgaatatggagaccatcggcgatatctggttcaccagatcgagatcagaaaatcgaagagttcaccaaatcggagatttgagttattggctgctccaatctgtttcccatggtatgaatctctctctgttcaattgtttttcgcgttgaattcgggttatttgatttggtgtagaaattagggatttctcagctgaattggattctttaacatttggtttggagattgatgagttgttgttttcttttctatatttcttctgctgatattgtaattgtttctgtatgatgagtttcgtgcgagtgtgtttgaggcattcgaagaagaggatagagtgatagagaacaatgaaggactgcctccagctttgttgggaagctgcaatgatcttgcaaggcagcctcatgcgtctccaggtttgatttctaaatggcatgtctagggtttggaaatgctttcttgatactaagaaatattagcttgttcgaaatgtgtctccttttttggttgggtgaaactttgcttgcttctatgtttaggcaatatgaacattgagattttgtgtagttgagtatatcattttaaaaatgttaaaatgcaggcagctcacacgcttaagtgataaatgctttctctatttgtatgtgatcaatgctttctctgttttttaattgtttgattaggctattgtatgtgatcaatgctttctctgtttttaatagtttgattaggttgtctacatcaatctttaatacacaattgattgtgcttgtagttgattgttatgaatttacttgaacacatactattaacctttcattctgctctttcttttcatctaaacactttaccagaagactttagtgcaatgtttgttatgtcacaatgaatttacgactacttgcttgttatgtcacagttaaagactttagtgcaatgtttggtagtagttgtcattgattgtctgctatgtcacagttaaacacataaacacatcatgaacctcttgttatatattaaacgtttcatctctaactttaacccaaccacagaccattaacacacaccaaaaaactcttccttttgttctatcctactccttttaaaaccaaccaaagaactatcatatggatccatatccatatagtcatggatcaggttttgtgaacctcttaactagtcaacaagaggttcacactttggaaaccaatccgtgtgatgatgttcctatctttagtactcaatgtactgactctcccagcctagaagaacatgtacctaaggtgaaaagagagagaatgaaatggtcagccaaagaagacatggtgcttgtcagtgcttggctcaacacaagtaaagatgcagtaataggcaatgaacaaaaggctaataccttttggtcaagaatagctgcctattatgatgcaagtccacagctgaacggtttgagaaagagaatgcaaggtaacataaagcagaggtgggctaagatcaatgatggtgtttgcaagtttgtagggagttatgaagctgcatcaagagagaagtctagtggacagaatgacaatgatgtcatatcactagcacacgaaatcttcaacaacgattatgggtataagttcccccttgagcatgcttggagagtgcttcgccatgatcaaaaatggtgttcacaagcaagtgtaatgtcaaaaagaagaaagtgtgacaaggctgcacaaccttcaacctcccagccaccttcccatggagtagaagaagcaatgtctcgccctattggtgttaaagctgcaaaggcaaaagcaaaaaagactgtgaccaagacaacaactgtggaagacaaagggaatgcaatgttggagattcagtctatttgggaaataaaacagaaggattgggagctaaggcagaaggatcgagagcaagagaaggaggactttgaaaagaaagataggttatcgaaaaccactttgctggaatctctcatcgccaaaaaagagccacttattgataatgaagtgactcttaaaaacaaactaattgactttcttttggaacattag

SEQ ID NO: 161885 - DNA, 812 bp, Arabidopsis thaliana landsberg
  unsure (1)..(812): unsure at all n locations
tatcggatcttttcactctccctggtgaagatgtccagatgactccggagatttttagcgaaatgagtgatgggaacaaagaatgtctggagaagttgagaagccatggaacgccaatggaacgtctcaagagcgatacaggagattcagttcttcatcttgctgctacatggggtcatctagaactagtgaaggagattgtctctgaatgcccgcgtcttctcttggagcaaaactcaagcgatcagacaccgctacatgtggcggctcatagcggtcataccactattgttgaggcttttgtcgcattggtaacattttcttcagctagactgtgtaatgaagagagtgagagaatgaacccatatgttctcaaggacaaagatggaaatactgctctgtactacgcgattgaagggcactatttcgagatggctgtatgtctggtgaacgcaaaccaggatgctccttttcttggaaataagtatggagtatcttccttgtttgtggcaataaannnnnnnnnnnnnnnnnnnnnnaaagcaattttgaaaatcataggcaacaaggaccttaaagggaagaagtctaacttggagtcaaagttacaagggcagaaatctcttgcacatgttgctttggtgacccagagtataggtttgtttttcgctttaaccagtagcagctgcatttattctattcaaatatgtaaaaccagtttgagacgggaatttcctcctcaagacggtaaaaatatttgtatgtatactaattgttgttcccaattgttgagcagatgtccatatgttatt

SEQ ID NO: 161886 - DNA, 1140 bp, Arabidopsis thaliana landsberg
gtccacgaacaagtcggggaattatgagatagtcactatcaagcaatgataaaatgacgttgagaaagagtcctgtacctcttggttcgtcgacgcgaaacgcagcgaggacattgggacaaagggttgaatatcctgatagatatagataaattcgggtatgctcttgagttcaaaaaccattaggatcgaagaacagagtttggagaaggttgggtaatcaccgctcgtttgatgcgggatcataatgcccttcttctgcaatcttgtaaattcaatagggagatctctgaagatgctaaaaaacaatagcaaaaggaagggttcgataaataggcgcagcagagatgacgatttgaagaagtgtcgggaatcaccgctccttggaggcgggatcataatgccgctcttcttccatcgtcgattttcatgaagaggatccttaaagtcgttggttagcacttgatgaaacttcagattgagagggaatggagatgaaggattgaacaaactccggtaaagtcggtcttcttcaatccgaggcttttggagtggtggttaaacccaatatttccaattctgaaagaggctgtgaatacaattcgggatcgcaaaggaaagttcgagtagctctatatgagagcatgatccgacacgatgaggtaacggaggttgtaatgggcttaaggtcggttgacggcttaaggtaagaaacccgagaatatccaggacaaaagttacgtcgccaaaaggagatcaacaagtaaatcttttcaaagaacaaggccaaaagtgagattgacgcgaaggttttaacacgacatacacaaaaccaaaacatcgaaaatgctacacctctctagtgtacgccttggccacacagagcagagagacagagcaaccatcggactgaaattggtaaaggggaataaagaacagacctgggccattcaaaagagagagttgggccattgcaattgggagtgggccggtagaaaggtaatgggctcaaggatgggaaaaggctcaataactgaaaccctagttgaggctcgtttgggtagaggatggagaaggtacggttggtctgaggcgactaataaaggatctgaaatgcgctggtagctgccggtggtcgca

SEQ ID NO: 161887 - DNA, 994 bp, Arabidopsis thaliana landsberg
ctctttcttctttctctctggatcgtaaacttatttatgattctctttgtctaggtcctttttgatttagaagccaaaagagaggagcttcgtacaagagcaagaggtataaaagctctggggaggacctttcaggtaaaatctggtttcatttccttcttacagactgacgggaatctgtacaaatgtgacttggggattaagactaaggactaaccaaaggatttaactcatacagagagccaaaacagctagtgagagtgatcctttagaaaatagcgaacctcaaaagttaaacggaaatggaaagaaccacgatgaggatacttctacatcaccaaaatccagtgaagcatctcactccacctctggtcctcaggtgtcatttcacatgaaccttttacttatctttcatctttccatttcactaaactcatctctctccatcttcaacaatggacacatgcttcttatctgacttgtgttagatagacataacattcatacttgtgtgtttagaaataacactctgaatcagtctgagtctcttcaaaaaagttcaaatcgaaaggtaaactgttttcttgttggataatcttaggaaccacagagcccctacgtggaagaattcaaacttggagatgaacaattcaactattgcttcccacctcctgccgcagagaaacactctatgactggctatgattgattcaggtgagatcagaggtatctctgtagcagtttcttacttattcaaatcccgtttgtataatttatataccatgcagatgcagtcatattgatattgcagttgtgtgccatgtatgtatatttgcctttgtttctttggttttgggttttaatgtgaatttgggatttttagaagaaaatgattaatgttgatagcacatgaaaaggtctttgattaatgtgattacactgattattttaaagtaaaaatcttaatccatagttaaagtaaattttgtttaga

SEQ ID NO: 161888 - DNA, 536 bp, Arabidopsis thaliana landsberg
  unsure (1)..(536): unsure at all n locations
cttttcttacataaacaaatcttgtggttgttgtgtcatggcaccgacagttaaaaccgcagccgtaaaacccaacgaaagtaacggagtccgttacagaggagtgagaagagaccatcgggacgttacgcagccgagatcagagatcctttcaagaagtcacgtgtctggctcggtactttcgacactcctgaagaagccgctcgtgcctacgacaaacgtgctattgagtttcgtggagtaaagccaagaccaacttcccttgttacaannnnnnnnnnnnnnnnnnnnnnnnnnnnnnnnnnnnnnnnnnnnnnnnnnnnnnnnnnnnnnnntttcctaatctcaacctcggatctgactctgttagttcgagattcccttttcctaagattcaggttaaggctgggatgatggtgttcgatgaaaggagtgaatcggattcttcgtcggtggtgatggatgtcgttagatatgaaggacgacgtgtggttttggacttggatcttaatttccctcctccacctgagaactga

SEQ ID NO: 161889 - DNA, 619 bp, Arabidopsis thaliana landsberg; identical to SEQ ID NO: 23796
  unsure (1)..(619): unsure at all n locations

SEQ ID NO: 161890 - DNA, 556 bp, Arabidopsis thaliana landsberg; identical to SEQ ID NO: 15126

SEQ ID NO: 161891 - DNA, 246 bp, Arabidopsis thaliana landsberg
accggagggagacagcgagatgaggccggagatagttctgttcggcgactcgatcacggcacactcttctaggacccgcaggcgggggacctgatcttgccgacgcttactctcgcaaggctgatgttgtggttcgaggctacggcggctacaacacccgatgggctctcttcttgcttcatcacatcttccctctcgtcagtactttttatctctctctccctccctcgagtctacaaatgttga

SEQ ID NO: 161892 - DNA, 5088 bp, Arabidopsis thaliana landsberg
aacttgctggaaggccataggtgcatgtggccggtgtggaagcaaggaccatgcgatccaaagttgcccgagaatggaaccaaggcagtccaaggttctcggtgaagagacaaggacttgtttctattgcggaaagactggacatctaaagcgagagtgccctaagagatacaaatcttcggaaaggtgcaactcttcggaagggcgcaactcttcggaaaggtgcaactcttcgaaaaggtgcaaggaacggatgtgttgattcgggaagcatccattcgccccctatataaggaagggcgcccaggaccattccactcaccacaacacaccgaaaacacaagaaaactcaccattaaactctctccctctcgggagaataaatagtcggaggattcggtagccggactgtggccggcaaggaaagcagatcttccctttgatgtggcgaaacagattcgccaacccagcctcgtccttaatgatcagatgatcacggtcgtgagtgtaagaccaatggaagggcctgcttccctcagaccctccaccagaattggacgtctgcgtcacttcttgagaccggttcggaccttgggacccaaacagccttaaaaactcctcagacttagcatcatcgtaaaaattgttctaaaatgctgtcttgatgcttctccaagtcttgagggaacctgctttgagttatttcagccaacaagggaataagggaaaagcttacacagtaagtaattatgagagactccatcagctttaatgctcattacaagggcctcaaaacgctcgatatggtcaattggcttatcatgagataaggcatggaaaggatgcttgcctaggagagcaaaggaaccaggcttcagctcatagtcgttcctttagaatggtgggggaacgatcgcagatcgattagcatagaacaggtctggcctgttgaaatctccaagagtacgacgtggttccacacctctgttgtgtcgctcgacaccaatcgcatctgcgttctgctcttgaaggtgtcgatcgacacccagttggtgtcgctcgacaccgagccgtgctgctctctggcagttaattgcgcattgaggcgcgcctgatcctcattggcgtcctcaggtaggatgagtccataatcatctaatctctgaccagcctcattgtaggcttgcccatcttcatctctcaaaactccttcctcatccgctgtgatgactctgtcagccattactaatctctgagttttgcgattggtgcgttcaagttttcccaagtcaagaacagacaagttgatacagctgcttctgttgtgtgcttcttatttacctaggcatacacctgttacgcataaaagaagatataataagtaactcgtgagtaacaaaatagggaaatcttctggggcaaacttgatcttttgtaaactcgaaggcgtctagggtttttgctgggccgaaactggtgtcgatcgacaccaagaatgtgtcgatcgacattctcatttgattctgaaactgaaatcgtctttaacttccttttccttagcttttgctccaaaatgtctcctcatctccattgtagtctcacttcatagaatacccgaaaagactctaaaaagactcgagaaacaattaaaaaaactcaaaatcctatatctaaaacatagataaaatcagtaaaaaaatagggttatatcatatactatcgcattgtcacagctctagctatggtggtcattttgcaactttcaaaacagtatccaaaattcttcaagcagacttttggtggcctacaatcttttgggatactcagaagttcatatcacattgtgacccttgtcagagaaggggaaagatcagcaagcgtaatgagatgcctcagaaatttatactcgaagtcaaagtcttcgattgttggggtatagattttgtgggaccattcccaccttccaacaagaatctctacaccctagtagctgtggattatgtctccaaatgggtagaagctatagctagtccaaagaacgatttagcgattgtcatgaaactcttcaaggcaatcatcttccctcgttttggagtgccacgcatagtcattagtgacaaaggtaagcatttcattaacaagattctagcgaaattgcttttacagtatggagttcagcatcgggttgctactccctaccatccacaaacgagcggccaagttgaagtttgcaacaggcaaatcaaagagattcttgagaaaacagtgggtaaagcgaaaaaggagtggtcctacaagttagatgatgcactgtggccgtacaagatagctttcaaaactccgcttgggaccacacattttcatctactctatggtaaagcttgtcatcttttagtgaaattagagcacaaagcagcttgggcagtcaagatgatgaatttcgacatcaaatcagttgcagaaaggagactttttcagttgaatgagcttgatgagatacgaattcatccgtatgacaacccaaagctctacaaggaatgcacaaaggcttaccacgacaagaagatcctcactcgaacctttgagcctaatgaccaggcacttgtttatgattctagattgacattgtttcctggaaaattgtcttctcgtttgtcaggtccctacatagtccactcggttaggccatatggaaccgtcgttcttacagacaacaatggaagattatttgttgtgaatggacagcgagtcaaacactactgggctgaagattagcctttggatcttcaggaccaatgtaacgcccgcgatcctcaataggatcgttggctaggacttggtccgagagaagaaggtggagtctcggacaagtgagaaggagcaggccataagctcggacaaaggggaaatcatgcaggctaagctaggatcgtaaagaaatcagctgggtcagctcgcccaaagctcaagctcagctggaaggagtgacggttactcaggtcgagtgacggttgaacttgaggtagctggacgagtgacggacgagctcgaggtagctggacgagtgacggacgaactgggcggttatgggcgaagagatacaactcttcggaaaggtgcaactcttcggaaaggtgcaaggaacggatgtgttgatttgggaagcatccattcgccccctatataaggaagggcgcccaggaccattccacacaccacaacacaccgaaaacacaagaaaactcaccattaaaactctctccctcttgggagaataaatagtcttaggattcggtagccgggctgtggccggcaataaagaaggagggtcggatcgacctaacctcgagaaggaaggtaagggatcctagactttgagtctaagggttctaggatgtgagttagtagtcggatccttgaaaggaccgactagagggctgagtagtatccgggtcatgtgcatcctacacaagactcggtccgggtagggatcggctgaggcggggacgcggctcggcggaggaccggcgggtcttaactgacctgccaagaatcggccggactgatgcgcgatcttcccctctctgaattctctccacggatccgagtagtgtatggcatatagagcattgcatggacttgcatatgattaagtaaataagattacttatggctctatgactttcaggaacgaatggtgatcgtgggaaggacttggcttaggcgcgagagactcaaggccgggatgatgggtggtgatagttcggatagtctagggatcgattatatgacttgtaatagcttatatgcaaactcataggttgtatcgaatcctttgcttaatcaataaagtatccgattgtttgtttactctattcgtctcatatattgaatcacggaatcatatgaaacggatgagactaggaaagaacctcataaacggttagggccgagtcacttagtggcttgggtcgagagaactcgtccggactttaggcagtccggatcggggcctttcaagttggtatcggagcatgcttggttctaggactaggtgctgggttaaggggtatcaccactcgtcggcttgagaatctcgcggtagttgttctttactcttttgcgattttactaggagttatgtggattaactttggaggtttcgcagatgggtaagagcagcaaaacgggaaagagtaagaaggacaagggcattgtcgaggagactttggttgaggaggaaacgatgatcaacgagaaaaccagagtcgggacgatgctcgataggacaaactcggccggacctaaggccgggaagaagtccataaatgaggaagcaccggagagtagtggtgcaagggatagcacggataaccggaacaatactccaacggcccaagaacagtgagatttgatgaagggaatgatggcgcaactagccacattgaccaaggccgttgtagcggattcggtggtcctaaaagtggataaccaaaaggacgatgactcggaagttgtggaagtgaatccacaattgaatcatggacggaaaaggggagactatctgagtcttctcgaacatgtctcaaggctgggcacgagacacttcatgggcagtacggacccgattgtggccgatgagtggaggagtagactcaagaggaacttcaagtctacccgctgccttgaggattaccaaagggacattgcggtccacttccttgaaggagacgcccataactggtggttaaccgtcaagaaacgcagaggggacgaggtccggtcctttgcggatttcgaagacgagtttaacaagaagtactttccaccggaggcttgggataggcttgaatgtgcgtacctcaaccaagttcaagggaaccgcacggtgcgtgaatatgatgaggagtttaacggccttaggcgatttgtgggatgtgaacttgaggaggaacaagctcaagtgtgccgatttatccgcggactaaggatagagatccgcaatcattgtttggtccagacattgacctcggttttcaaattggttgaaagggcagcgatgattgaggaagggattgaggaagaaag

SEQ ID NO: 161893 - DNA, 1821 bp, Arabidopsis thaliana landsberg; identical to SEQ ID NO: 10032

SEQ ID NO: 161894 - DNA, 485 bp, Arabidopsis thaliana landsberg; identical to SEQ ID NO: 4755
  unsure (1)..(485): unsure at all n locations

SEQ ID NO: 161895 - DNA, 568 bp, Arabidopsis thaliana landsberg
  unsure (1)..(568): unsure at all n locations
agtgtaaagttgtcaanaattattcgatggcttcaggtacaagacaacgtttgataaatttgatgtgcggtgtggatccatttctgagccttttcaccatgaactgcatccccatcctttataccacatcttttcaccagaagagaagtctcatatttgtggagcatgtgatagacctacacagtatgtcttaagttgtactgtgtgtgagtttcatttaggcatggattgtgccactttaccaacaaaagtgaaacatacatgcgacggtcatgacttatcgttgcatcatggagctggaaacaccgacggtccattgtggtgtgatatttgtgaggaagagacagatccgagcgtatggttttatggttgtgatgattgtgtgtccactctccatatcaaatgtgtacttgaagacatgtatcacttcaagccaggaaacaaatacggcaaagctgaactagttgccaacgatggtatgactccccctttttgcaccccttgtgaagagcgttgcaagttctcttcctttaataaggctaccgtttcagattcaactcttggtacg

SEQ ID NO: 161896 - DNA, 505 bp, Arabidopsis thaliana landsberg
aatttgatggatgctagaaccattttatatccaccaccagggttcactcaacaagggcagggatccttaacagctcaagatcctgaaattaatcaactcattcaacaaatcattcaaggacaagctactggagctatggcttttgacaagaagatagctgattttcacaataagatcgagtgttgttacaacgatctaactgccaagtttgaagctctgaattccaaaatcaagtatgtggagagtctacttcgaagcatcctcagtaacttccaggaaaagcagttcaaaatcctaaggactatgctactacaaatactatcaccatccaccaagaagatgagtcttcaccaagtcatcagactcccaatactgaggacagtttgattcaagaaggggggggggattcaattcaaattgctgcacgaccaccctgcaattcatcatgattattgagcccacacccttgctgaatactcaccactctgaaaaggattttaaaaga

SEQ ID NO: 161897 - DNA, 1000 bp, Arabidopsis thaliana landsberg
gacatatcctgcgagtttccaacaactacctccgagagccgtcaacgaaaactcttcctctcttgcgccgttgataattccgatgacgtgatcagaaatctcataacgcatcttgagtcatcttcttcgatcgaggaacagaagcaagctgctatggagattagactcttatcaaagaacaaaccagagaatcgtatcaaactcgctaaagccggtgctattaaaccgttggtttctttaatctcgtcttcggatcttcagcttcaagagtatggagtcactgcggtgttgaatctatctctctgcgatgagaacaaagagatgattgtttcttccggtgcggttaaaccgctcgttaatgcgttgagattaggaacaccgacgacgaaagagaacgctgcttgtgctctgctccggttatctcaagtggaggaaaacaaaatcacgattgggagatcaggagcgattcctttactagtgaaccttctagaaaatggcggattcagagcgaagaaagacgcgtcgacggctttatactcgttgtgttcgacgaacgagaacaaaaccagagctgttgaatctgggattatgaagccgttagtggagttaatgattgattttgaatcggatatggttgataaatcagcgtttgttatgaatttgttaatgtcggcgccggaatcgaagccggcggttgtggaagaaggaggagttccggtgttggttgagattgttgaagcgggaacacagagacagaaggagataagtgtgtcgatattgttgcagctttgtgaggagagtgttgtgtatcgaaccatggtggctcgtgaaggagcggttcctccgctcgtggctttatcgcagggtagtgcgagtcgtggtgctaaggtaaaggctgaggcgttgatagagcttcttaggcaacccagacaacaacaacaacaacaacaacactttgaatctaacgacaacgagagataacactttagtttgggctttt

SEQ ID NO: 161898 - DNA, 1638 bp, Arabidopsis thaliana landsberg
  unsure (1)..(1638): unsure at all n locations
atgaggctctacgtctacatattacaagccaaagatttaccagcgaaagagacattcgctaagcttcacgttgggagacacaagtctaaaacgagagtcgcgagagatacttcgtcaccgatctggaacgaggaattcgtttttcgaatcagtgatgtcgacgaaggtgatgatgtcgttgtatcgattcttcaccatgagcagcangatcatcagtctattgtttccaccggtttaattggtaaagttcggattccgcttacttccgttgcttgctgagagaatcaaactttgttgccgacttggtttgtcattgagaaacctagtgatggcaagttcgttaacattgaatgtggttagtaatctgattctgtcaactttgttgttatcgattttgtttttcgttggattttgattctgtaatcacttgtggaagaactattagagtacgaatgtttagcattagaggaaatgtcatgtttgtgttcatgaattgagtggcttgtagattcatttgaagttgtgttttctggtgtttaggtgagaatttaagtctctgtatatggaggtgttggtttatctatggatatgaactttaccttcgtctatcaggaaaactgattccatagagtatgaatgtttaagcatgagaagaaatggcatgtttgtgtcttnnnnnnnnnnnnnnnnnnnnnncattggttaagtaacttgtagattcatttgaaatggtgttttctggtgttaggtgagaattttaagtctctagttagtgaatcaattgtgtgtgtgtgtgtgtgtgtgtgttatcattagtgaattaggaattgggctctgtatctgtgtgtgtgtatatggaggttttggatatgaactttacctttgtattgtagggaaaattcttctgagtttgtctttgcaagggaaatgggaaagtacctctggtgagaaggttcttaatgataagcaggatattattaacttggaaggtgtgaaagaactcgaaggatcgcctaaagatttgatctcctccagagatgggaaacggcgtaaacaccatgatgggaagcacataatgaagaatattgtgaaccacattgacaagctttttcataagaaagaggagatctctaagagactccatgatgagtcttcagtaggacaaagtgtaaactcaaattatgaggatgccactgaccaatgttcttcctctgctacttgtactggctttgaggaaggtcttgacctgatgcagtctagtgatagcgaaagagaagaaatgcctgagaatcttacagggggagttcttgttgatcagaaatatttagtctcaccctgtgaacttaacaaatttctttttacgccaagttcgcaatttaggaaagaattggctgaacttcaaggtctatcagatgtacaggaagggccttggacaatgatgcaagaagatactcctcgtctaacacgggttgttacatacatgagagctgcaacgaagatggtcaaagcagtaaaagcaacagaaaatcaagtttaccggaaagctagcgggaagcagtttgctgtatttgttagtgtaagcacaccagatgttccctacggaaataccttcaaaatagagttgctttacaagatact

SEQ ID NO: 161899 - DNA, 480 bp, Arabidopsis thaliana landsberg; identical to SEQ ID NO: 54250

SEQ ID NO: 161900 - DNA, 541 bp, Arabidopsis thaliana landsberg; identical to SEQ ID NO: 38777

SEQ ID NO: 161901 - DNA, 1474 bp, Arabidopsis thaliana landsberg
gttgcataatcttttagtactttaattgagattaagaaacttaaaaaacagagtaaatttgttggtggttctaactccaactcatcttgcaattgaaatggagtatgcttctagaggagagctctttgaaagaatctgtaatgctagtagattcagtgaagctgaggtttgataaatgctttctaacttagttcttattggattttttgacaaatttttgattatatatttctccatcttgctatttttctcaagctagatatttctttcagcagctgatttgtggcgtggactactgtcattcactggtatttttatttacataacttaagcaaatctccatgagtgtgaaaggagagtgacaaaatcaagagacaagagataaagataaggttttgtcttgatagcagctcaagtgtttctcagacacttatacaaagagaaaacgtttcagacctaaggagacaaaaaggaaaaagaccaaaaggggttacaaacagtacataaagcaacattaagcttaagaacaattaattgatgtgctctaaataagataagtagcaatatcttcaacagagagatctttgcttcgttttgttaatctttttgttgggtttgatttggtctttggttagttgcagagtgggaataagctccgcgtgttttggtgtcaacttgttgtcctagtttttagttttgtttcagttagttcctgcaatttctctttcacgtatttgtaagaagactgagtcttcatctttaggctatttaaagccaaacaactatgataataaaacatcgaagcattcagttttagtctctttgttctctcagatcaacacttttgtatgtttatgtagcaaatatgtcatagagatttgaagattgagaaaacactgcttgatggtagtcttgcaccgcttttgaaaatctgtgattacttggctttgatctcataggtcattcattcattagtctctttttcttcttttgtttcagttttggttcccattattacttggctttgatctcataagtcttttttttaaggaaacccatttaaggattctacctttggagaagagaatttataaaaacttgacaaaaactctaatcttcaaaattatcaatatttgttattaagaaatttaaaggattccttatgaaaaacccaccaatggatttgctttaagatcccattaagatacttattggaacctggaaccaaatcaaaactcttttttttttttttggttcggttcggttcagttccagttttatggcaaaacctaagtttaggggtaaattggaaaatattcaaaagttttagccaaatatcaaagtttttactaattatcaaaagacacactcgagaaattcataaatgggctaacttttatcagagagcccactaaacaatcggcccgttagccaagaaaatcgtcaacggcgccttccattccaacatttctcc

SEQ ID NO: 161902 - DNA, 1296 bp, Arabidopsis thaliana landsberg; identical to SEQ ID NO: 56274

SEQ ID NO: 161903 - DNA, 567 bp, Arabidopsis thaliana landsberg
cacattggtagttttagagccaatgcctgctcatggtgtgaagcctttgatatattcaagcacatgtgctacttatggagagccttagaaaatgccaataccaaaggatactccacaggttccaatcaatccatatggaaaggctaaaaagatggcagaagatatcatcttggatttctccaagaattctaatatggcagttatgatcctaaggttgttagttaattctgttatgtgtgtgtgtgtgacctctgtgtttgttttctcttgccctgaagttgagttcattctgtcttcaaattggttttcttcagatatttcaatgtgattgggtctgatcctgagggtagactaggtgaagctccaagacctgaactcagtgagcatggacggatctctggtgcttgctttgatgctgcacgaggcatcattcccgggctgcaggtatttaccaggctcttttttgtgcgtaatcaccacatataatctctgttaaaagtttatttggtttttatctgcagattaaaggaacagactacaagcccgttgatggcaccttgtgtacgt

SEQ ID NO: 161904 - DNA, 1133 bp, Arabidopsis thaliana landsberg
  unsure (1)..(1133): unsure at all n locations
aaatccaaatatccgtgtgtcagtctcataaggggaatcgtctcacaggtaagggttgtctctcattaacaatcatctctctatgaatctagacgctctccatagacagagccatctgcaaccctgatcaaccctctccccggaaataagtacattagaccgtgaccttcattaaggtcttgaatgttagacgcaatagttatttagcaaagaaaaataccaccaaactttgaaactgtaaacaataaagctgcatattgaagcggttaagaaccggagaagaaggagattatagtacatacaagaagcggagaagaaggagagtatagtacatacaagaagcggagtttatactagtttgccaagagaggaagggatgggaccgcttatgttgtttgcaaaaaggtccaagcttactagttccatcaagtcggcaagctcctcagggattttcgcagtaatattatcgttaataagctccctgtcattaagatttgcttaattatatttctgattagagagaattcattaataggaaatatctcagactagcacaaatccatgttacagagaacattatgccatatgtaacaaacaagatacataagtagcgatccgaaaataagacnnnnnnnnnnnnnnnnnnnnatttggacgctgagcaagctgtggcaccagttctccagataaattagcactccccaggtcactgagcactcagtaaaagacttgaatcattcagttataaaaccagcagagggagacagagagaaacttacagacgaataacactgttttcagtattgcaagtaacatgaaaccatgaacatggagtaacatgagtggcattccagctttggagtatattgtttgcatggtcacctaaactgcttcttagagcaattagagcatcaactgtagacagaaagttgttgcctttacatcaacaacggatcaatggaataaagttgttgcctttacaaaattgcaaataagaaaaagtttctcttttgaaaccggaatgagaaattcaactgaagacggaagaaaccttgtgtgtttccggtgactctggaaaccaaatcgagaaatagaatcagccaaataaagccacgggatgatccatgttccat

SEQ ID NO: 161905 - DNA, 369 bp, Arabidopsis thaliana landsberg
ttccgaaaccttcctaagctgaccaagaccaaacgaaagcttatggattcttgctacaaaagagaagacttggtggagtcaacaaccacaggggaaacgttcttggttaagtggtacaagaagatcgtcggcaaggttatcaaaggtagggccacaataaaaacaaaagctataatggtcttcaagctagacgaagaaggaaacgctgtttacactcaagacatcggagatctcttcattttcatctcagaagctcaacctacttgtgttcctgctagttccgttcccggcctactgcctaacttcgtcctattctatgatgtcaacgaattcggaagtgcctatcttgctgattcctccgtctctagt

SEQ ID NO: 161906 - DNA, 779 bp, Arabidopsis thaliana landsberg
ttagtggaacatcacttgttgttctttagaaatatgtctggttcagtttcccgcgatgcagaagctctgaagtcagcagattctagcaccagacgctctggcggcaggatcaccttcccgtttatgataggtaatgtagtttttatgttttcattgttgcataactatataaagccacagaagaagaagagagttcatgtatattgaagctagtttctttgtcgcagtaacgttgttcggcctaacattagctacgttgggatggttacagaacttgattgtctacctgatcgaagagtacaacatgaagagcatcgcagctgcgaagattctcaacattttcagtggttttacctttatgttccctgccattggagccattgcagcggattctttcttcggaacaattcctgttatcttggtttcatcattcatttctatagtggtaaagttgatttgactcactctcatttgttttcatcaattcctctcttcgaaattctcaaacagaactcaccaattctactccttgctcagggcgtagttctgctggctctaaccactttgtttgactctttaagaccccaagcctgcgaaacagcatcaaagttatgtcaagcccctacgaacatccagctcggtgtcctttacacagcaataactctaggctgtgtgggagcaggtgggatacggtttaccttggccaccgctggtgcgaaccagtacgaaaaaactaaagaccaaggcagctttttcaactggtttttcttcacatggta

SEQ ID NO: 161907 - DNA, 809 bp, Arabidopsis thaliana landsberg
gagaagacggcatatttgtcttgcaggtaacgcttgcgtgtatatatctccaatctaatgtttgcacaaccattgatcgttgttaacgcttaacaataataatattttatatcgatacctgaagagcgttacagtgagtacaaactaagttcagatttcataaaagaatacatattccctggtggatcttcctgctttagccagagttacatcagccatggcctcttcttctaggctatggtaaattaagtctcttattagctccaaatgtaacttctctgctttcctttccccgagtcccgacctatttaacactggaaaaaacacagcattgaaaacgttgagaacattgggattcattactaccaaacgttaagattgtggaggaagaatttcttcgagagacaaaagtaagatcaatataaaaaacatttcctctgttttctctttggactctatatgtggcccttttatgtgtgtttgtgctcatgtcccaaaaaaaaactattacttgtgcagacaaatcacggatcttggattcgacgatagattcgtaaggacatgtgaatattatttcgactattgtgcagctggcttcaagactcgaaccgaaggagactaccaggttacacacacacacacactcacacacacacatactcgagcattaacaaatgcttatcgatgtgaataaccatatgcattaatacaacattgcagatagttatatcacgtgcagggaacgtaattgcactcggtgatgaatcattctacaggtatcctttaactcagaaaaaacaacttcaaat

SEQ ID NO: 161908 - DNA, 438 bp, Arabidopsis thaliana landsberg
agaatgggttatatgtgtgatttctgtggtgacaaaggatcaatggtgtattgtcgatgtgatgcaggcgtgtttgtgtctttcgtgtgaccgtaatgttcattctgctaatgctctatgaaaaggtcattcacgaactttggtatgtcacacgtgtaatgcacagccagattttgtacggtgtagtgatgagagggtttctctatgtcaaaactgtgattggtcaggccatgacgacaagaattctactactacttcacatcataaaaggcaagccatcaattgttattctggttgtccctcgagtgccgaattatcctcgatatggtctttctgtatggatttgaatatctcttctgctgaagaatccgcttgtgagcaaggaatgggtttggtggctatagatgaatataactcaacgagtatccatctggtgtc

SEQ ID NO: 161909 - DNA, 560 bp, Arabidopsis thaliana landsberg
gctctccttgggcttttgagcacagagttgtgttcagtgttcgttggggcaattcttggcaactctggctggagcgagaagaaaaagatctgtttatgatagaagaagattgggatgagtttgtggatgacaaccatttaggcccaaatgataacgtgttcttcagacacgatgacaagatgtttcttgaagtgcaaatctttaagaatgatgggaacgagatcatcgatgcacctcctgaagttgaacctgaaactgaaccatttcatcctactacaccaaaaaattctcacaaggagacaaccactgcctctgcctctgcttctgcttctggtatggctatattcagatagaaagaatcgttttgatgctcttcatactcagtactactcttttcttttctctcaatgccaaattttccttctttttgtttctgttttggcagaattttcagacaattggcgagagacacatggttgtgctgatataaaaaaccctgagctgtaccttctaaaccccaaaaacccttactttgtaaaacgctgacaaaaaggaatgac

SEQ ID NO: 161910 - DNA, 580 bp, Arabidopsis thaliana landsberg; identical to SEQ ID NO: 5748
  unsure (1)..(580): unsure at all n locations

SEQ ID NO: 161911 - DNA, 709 bp, Arabidopsis thaliana landsberg
cttcaaacagcaactaacagattctctaaagagaatgttataggtgaaggcggttacggtgttgtctacagaggagagttaatgaatggaactcctgttgcagttaaaaagattcttaaccagttgtgagtatcggattgtaaaaagattttcatacctttttatggtttgagttttggttgattgatagattttataggggacaagctgagaaagagtttcgagtcgaggttgatgctatcggtcatgtgcggcacaagaacttggttcggcttcttggttactgcattgaaggcacacacaggttggtgaaaaaaattccaacttaggaaccaaatttgtgagttactaatactaaaagatcaatgtgaattgctactaggatattggtttacgaatatgtgaataatggaaacttagaacaatggcttcatggagcaatgagacaacatggatatctaacttgggaagcaaggatgaaggttctgatcggcacatcaagagcgtaagcaaacaatgtaatttcctttttattaagttcttcttctcacatactgatcattattcctctgtgtagtcttgcatatctgcatgaaacaattgagccaaaagtagtgcatagagacatcaagtcaagcaacattctgatcaatgaccaattcaacgcaaaggtttcacattttggccttgctaagttgcttggtgctgg

SEQ ID NO: 161912 - DNA, 2246 bp, Arabidopsis thaliana landsberg
aacctccgtcttgttctcgatgtcgcaactgcaaaagcatggccacttaaacagttggttgtcaacaatgcttttctccaaggcgaactcaccgaagaagtatatatgtcacaaccacctgggtttattgacactgatatgccctcatacgtttgccgattgaagaaaccaatatatgggcttaaacaagcaccaagggcatggtatacgactttgaaacaatatttattctgttccagctttatggcagatacgttgttattcatacacacctcaggacataacatcacatatgtcttattgtatgttgacgatattattgtcactaggaacaacaacgttgtggtcaacaaatttttttcctcgtttgcagaacgcttctcgatcaaagatccgtcgaatctccatttctttcctggaatcgaggtaaaccaaattgccaaaggtcttcatcttatgcagcgaaaatacatcacagatcttcttactaagcacaatatgcttgacgccaaaccagtcactacgccattaccaacctcacctcaactcatacttgacagtggtgatcctctccctgacgcttcccaatatcgttctattgtcggcagcctccaatatctctccttcacacgcactgatgtctccttcgctgtcaataaattatcacagtttgtccataagccaacacatgaactcttgcaggccgcgaaacgagtactccgatatctagctagcacaatcacacatagtatatttttacatgcctcctctcccatgactcttcatgcattttcggatgcagattggacttgtgacacgaatgataatatctccataaatgggtatatcatctatcttggctctaacccgatttcttggtcctcacgcaaacaacgaggtgttgcaagatcttcaatcgagtcagaatattgagttgttgccaattgtgctacggaggtaagatggctttgttccttactctatgaactcaaaattccgttgccaatagctccggttatctattgtgataatattggaacaacatatctttgtgtgaacccgagtttccaatccccgatgaatcacaatgctctcgattatcactttgtgcgaaatcaaatccaagatggcatgctacagatctttcatgtctctaccaacgttcaattggcgaatactctaaccaaaccactatcgaaaacacgtttccaacatgcatgtcgcaagattggtgttattcaagtacctccatcttgaaggagtgtataagagtatatatatatatatatacagctccccacttagttaagggtgtttatgtaattagttttactctaatcactttttagtctgtttttcccattactatgaataataagaatcatcattctctatagagaacacaacggatgatccaagacagaggaaaccagacattggtaaggccaaagaagtgttgggctgggagccaaaggtgaagctaaaagaaggacttcctctcatggaagaagatttccgagcaagacttaacgtcccaagaaaacatggaattacaattttaactgtaattccattagacgacatctcagtattagacacgggaacgtttgtggatggcatcttttttgacgtctgactccgattacttcatggtcatcacaagaaacaagaacggctccaaaagcctacagaaactcatggggatgtcagattacatggacgtcttcttctttgtggctatcatgcgcctcttcatccatgtcatgatcgacaaatacgcctcctacgtggcgatacaggggatgagaatttttaaacaggacaagagagagttgatgtatgatcacattcttcgatacgcgcttttcctggcgcgtgaccagtacggttgcattgcgctcaacgaaatcataaaagagttggacgatccttactacagagacgagctcctagacataatctcaaacaacgctcttttgctaagcaacgatgcttatggcaactttgtggtccaacacgtgcttaaactacatgactcccgttgcacgggtaacattgttgataaactatgtggctactgcatcgagctctcgtttaaaaagtatggaagctacatcgtggagcgacttttggaggcgggggacataccaatggcaacaattattctggatgttttagcgtgcaagacagagatgttgataaggttggcaaggagcgagtacgggaattttgtggtgtgcaaatga

SEQ ID NO: 161913 - DNA, 576 bp, Arabidopsis thaliana landsberg
ttttttataacgttttcataatgtttttctaggagttattacaaatgcacagctccaggatgtacagtgaggaaacatgttgaaagagcttctcatgatctcaaatccgttataacaacttacgaaggcaaacatatccatgacgtccccgctgcacgcaacagcagccacggaggcggtggtgatagtggtaacggtaacagcggcggttcagccgcagtttctcaccattaccacaacggtcatcactcagagccgccacgtgggagattcgacagacaagtcacaactaacaatcagtctccttttagccgtccctttagctttcagccacatttgggtcctccttctggtttctccttcggtttaggacaaaccggtttggttaatctttcaatgcctggtttagcgtatggtcaagggaaaatgccgggtttgcctcacccgtatatgacacaaccggttgggatgagtgaagcaatgatgcagagagggatggaaccaaaggttgaaccggtttcagattcaggacaatcggtatataaccagatcatgagtagattacctcagatttga

SEQ ID NO: 161914 - DNA, 521 bp, Arabidopsis thaliana landsberg; identical to SEQ ID NO: 73962

SEQ ID NO: 161915 - DNA, 809 bp, Arabidopsis thaliana landsberg
ccgacaatgtcgaagctgactctgctccttatctgaaaatcggcgaggaaatggagatcggaaaatcatgattgtagaataaacttgttaaggaaggtgaaaaatgggacacgcctgagaacggtgacgaagttgaaggttatttgaaattgctgaagtctgatctgatgataatatatgtgtgaatcaggttctcagattgggttttcttttgcagtgcattacactggaactttgttagatggtaccaagtttgattcgagccgtaacagaggaactcctttcaaatttactcttggccaaggtacttttctattttgcaacaatatttgttaggcctatgtattcggatttggatcgtgattttttcggattcggataatattataggatcatattaaggctgttgtcttctgtaaggccggtttgtgataaaagttttggttgagagtttgttttgatccatagttactatttaattccggtgtctttcgagttctgaattttgtcttggtttggaatggtcaggtcaagttattaaaggatgggatattggtattaagacgatgaagaaaggtgaaaacgctgttttcactatacctgcggagctagcatatggggaatctggttccccgccaactattcctgcgaatgctacgcttcagtttgatgtggagttgcttaaatgggacagtgtgaaggatatatgtaaagatggtggtgtgtctaagaaaataattgtggaaggagaaaaatgggagaagcctcaaggccttgctgaagtttacggtgcgtgtttttcgtcttcc

SEQ ID NO: 161916 - DNA, 499 bp, Arabidopsis thaliana landsberg
acttgcagataaatatagagaatgatatagatgaggaacagattccaaatatgaaggaattcgtaagccatctaaaaaaagtcttgcatttatcgacacctggggctttagtcatatggtgagttgatcagaagtttttctttgttctttttgtataccactttgttctgataactttctgcaggtatgacagtgtcactgttcgtggtaatcttcagtggcaagatcaattgactgagctgaacaaacctttctttgacttatgcgatggaatattcatgaactacacatggaaggtctgtctatgggtttgatcaatctctctcagtttcttctatttgtcttgttttactattaatgagtaatgatgtatcaggagagctacccaaacctatcagctgaagttgctggggacagaaaattcgatgtctacatgggaattgatgtttttgggcggggctcttttggttgtgggcagtggtctgtattatcagccact

SEQ ID NO: 161917 - DNA, 804 bp, Arabidopsis thaliana landsberg; identical to SEQ ID NO: 23576

SEQ ID NO: 161918 - DNA, 624 bp, Arabidopsis thaliana landsberg; identical to SEQ ID NO: 4297

SEQ ID NO: 161919 - DNA, 840 bp, Arabidopsis thaliana landsberg
ccttttgaactatggctcatatatcttagcagtacaactagacatgtgtataaatatatcactagattctgctttgttggaactcatttagatggatttaatagaattgaaatgaaaagtgtacacaatttctagttgttatgacatgattttattttatagctttcaatcttcgtgattggcattgctgatgtgttaaaagtctttgttcagaggttatcacgtttagaagaagaggagaagaatctgattgaaactgccaagaggaaattctttgcagaagtacttaatgcagtacgtgaattccagttgcaaattcaggcgactcaaaaacgccgtaggcaaaggaatgatggtgtgcaggtatgatagagtttacttacgcggttattgtgatagtagttccagttatcttttaatattaccaatcaatatacaaacatctaaaatttattttgtgtgtacattattcgaacaggcttggcatgggagacaaagacaacgcgctacccgtgctgaaaagttgaggctcatggcccttaagtccgatgatcaagaggcatacatgaaactagtaaaggagagtaaaaatgaaagactaaccactcttttagaggagacaaacaaactccttgctaatttgggagctgctgttcaacgtcagaaagatgctaaacttccggaaggcattgatctacttaaagactcagaatctgacttgtctgaacttgatgctccaagaagtgaaccattgcaggatctgcttcctgatcaggatatagatattactgagtctgacaataacgatgacaataatgatttactagaaggacagaggca

SEQ ID NO: 161920 - DNA, 233 bp, Arabidopsis thaliana landsberg
tgcagcaagaaagccgtctggcgcgggcttcccttccttcacctctgggtctctcccttgtactacgtgatgcataagcgaaaaaagctcacggtgtctttgtgctttaagatcaaaacgccgagtatgagtaccgcattaaaaagttgctctctcagatagcagatgccattgaccataaacctataaacagaagacaaataagccctttgcactcggagcaacctacttga

SEQ ID NO: 161921 - DNA, 181 bp, Arabidopsis thaliana landsberg; identical to SEQ ID NO: 62023

SEQ ID NO: 161922 - DNA, 841 bp, Arabidopsis thaliana landsberg
atgcctggaaacgaatatggagagaggatccacaatttctttggacaggagggcctatcccaagacagccatcagcctcaggcaggagatggaagctggtccggttttagaaatggtctagtcagcaaccagaggcagattgacccatcacttattgccaatctgaagacgtatagcactcaacaatccggtatgcattttgtttcctttgtgactggggcttccccaacttatgctctacatatatcatttatgttccattcatagcttagagcctagtatgctggattatgctttggttttccgagtttgaacatagcctttttgcttattccagttgatcctgagagaggacaatcttcaaattcacagcatggtttaaattttgcccagcagccaatgaggtccgattactccagaagtgtattgcgagaacaccagcaatccacaactggttacatgcatggaaaccttatgttgcaggcatctccaaatgagggaagttttgtgggagtggatgtagaatctagtagggataggttatcagggagtggattcactctagaccgtcataaaactcctatgaggtttgatatgggagaatctccggttaactatgatttctttggtggtcaacaacaattaaacaatcagctccctggcatgatccaaccttttccaaggcagcagatgacattcaatgatatgcaactactaaagcaacacgctatggctaagcaaatgcatgaatatcaaattcaacaacaacttcaaaagcaacagctagaagccaggcagctcaattctttgcattcaaacgcagtcaatggaagtctctcaa

SEQ ID NO: 161923 - DNA, 732 bp, Arabidopsis thaliana landsberg
tactttcatctgcagtttctgatgttctatgcatgctcactagatcctgaaaattgtggtgtgagatttgccagtaagctgttggacatatatctctccagcaacacatgtcgacttactaggcgagtttaatcttgtccttcttggtaaagatttctctgcatgatatgaagctaatattgttctaatcaccacttgtgtattcttttgttttctctttatacttaacaggatgagtgcagtggcttatctagctagctatttgtctcgtggaaagtttttgcctgcttcttttgtggctagcatgttgaaaaggtacgtattgctaaaaaatggaaaatgtaattgtttgatctgatttaagtctcgctttgttgtaacatagtttctcttttgctgaaatcctagattggtggacgagtgtgcggaatattgcggaacatgcaatgatgatgtgaagccagaagcacatcaagtgttctattctggatgtcaggtatagtccaagtttaagaccatcttatggcttttgattccttaagaactcttctgtgaaatcattgacgtctctagttatcaatcattgttaatgttcacacccttaccagaagcttattggcgtttgggatcatatgctattatgtcatgtatcgcttaaagttgttacttttctatgactgtaggcaatcttgtatgtgctatgcttgcgaatgagatccatagcggagattc

SEQ ID NO: 161924 - DNA, 1200 bp, Arabidopsis thaliana landsberg
gtttccgacgaatatgaagctgaagttctctactattaaagatgaaacacttctaagagaaaagaaggggaagggagtagagactggaactagttctggaatgcttatgaagcctgatgaggtacctaaagagaagcgtctagctacactagatatttttgctggatgtggtggtctatctcatggactagaaaaggctggtatgtatttatattctcatgtcatgcatataattttatcttctaaacacttgaaaacttttattaatatgcatgtttttgtgtaacaaggtgtatctactacaaagtgggcgatcgagtatgaagagccaactggtcatgcgtttaaaaaaaaccatcctgaagcaacggtttttgttgacaactgcaatgtgatccttaggtaaaatagccaatggttttttctactcttgttggtttcagttgattaaggtttattaattgtagggcaataatggagaaatgtggagatgtcgatgattgtgtctctactgtggaggcagctgaacttgcagctaaacttgatgagaaccaaaagagtaccctgccacttcctggtcaagtagatttcatcaacggagggcctccatgccaggtatatatatctttaaatactttctataatttttgtaaaataagtgaaaagcttcttaatgatttgaaaatttggcaggggttttctggtatgaataggttcagtgacggctcttggagtaaagtacagtgtgaaatgatattagcattcttgtcttttgctgattatttccgaccaaagtattttcttctcgagaacgtaaagaaatttgtgacatacaataaagggagaacatttcaacttactatggcttctcttcttgaaataggttaccaagtaatatttcctttttgtgtcacacttgattaatgctctttagtagaagttagcatatgcaatatatcagcaatggtttttaaaatacaagatttgttgaactatgtaggtaagatttggaatcttggaggcaggtacatatggagtttctcagcctcgtaaaagagttataatttgggcagcttcaccagaagaagttcttccagaatggcctgagacgatgcatgtctttgataatccgggtagtaaaatctccttacctaaaggtttacaatatgatactggtcgtaaaactaaattggcgcaccg

SEQ ID NO: 161925 - DNA, 275 bp, Arabidopsis thaliana landsberg
taccatgaagaaggagttgggagattgcacgagacgcttgagcttatgctttctcttctcaagctcagctggaggatgaaggagatcgatgtcattttggagcacctaatcaacagatccataaaaaaaactcagagattacagaggaaagtgaaagagagaggaaaatcaagaacaaggagagatatttcaccatgattgcttgtggaaaggcggcgaaagcgaatataattaaagaaaccctagaagcgaagagacggagactgcagctttag

SEQ ID NO: 161926 - DNA, 282 bp, Arabidopsis thaliana landsberg
tctagtgttctccgcaagatgaggtatctcctcttcatcttttttcaacaaatatcattcattatgcattttactatttgctccttcataatgaaatgattttcttcttgctgattcctcttgctttttgtttctttgcaggcctggtggtgctggtgcatcccataagaagaagggatgcgctgactctggttcaacgctctgtttcttctaaaccagttttctgttttttgaattttttgcagaaccttgggtttcctttggatattcagaagcaaagat

SEQ ID NO: 161927 - DNA, 339 bp, Arabidopsis thaliana landsberg
gaagaaccttcagagtccttagaagaaatggaggcgcaaactattggaaatcttcttcctgatgaggatgatctttttgcagaagtggttggtgagggtgtccataagtctcgtgccaatggtggagatgatttggatgattgtgacctattcagcagtgttggtggcatggaactagatggagatgttttctcctctgtcagtcaaagagatggcaagagaggcagcaatgtttcgactgttgctgagcatcctcaaggagaaattttatccagaatactttttgttaggaatgtggatagcagcattgaagattgcgagctgggggtcctttttaag

SEQ ID NO: 161928 - DNA, 847 bp, Arabidopsis thaliana landsberg
atgaggcttctaacgcttcttctgatctgtactttcttcttcttcttctcctttgcttattccgccgagtcagataacgagactgactcagttgttacacgtgagatcaatggaaccgtcgttgagtccaatgccacgagtgcgaaacctaaggaagatagtttcgctgatatgatcgatcgagcacttgagaaagagtttcctgataatgaccagaacgaaggttcctcctctctcactagatagatcttcatttcttctatttgttacctgagctagggtttctctagggatttcaattttgttattattgatccttcttctctagggatttatcattgattagctgagtggtttagactctctctttgtgcccacattatagcaattaatgcttttgtgttgtttcgatttttcagttcctgatccaggaagcttcaataacagtgttgctgatcagcaggttggttgttgcaagtttagatctttttttaactactctatgttttctttctttttaattaaaggcatgtgttgtgctcattaggcggttctagagactgttgcacgagttaagccaaagaaaaatgaaaccaagaccaaggaggagaagtgagtttttctgatgcttattttgccctgtttggctgtttttttacttttgtttcactggttaaagcaaactataacatatgagtgattttgttctagatccttctttaatttggataacgagaacggcgtaacagatactccaagactgatagataggaaggtaagcttcgatcttcctaaatcatttgttctatatatattgctgaagaatgtataatctgttatgtaccca

SEQ ID NO: 161929 - DNA, 738 bp, Arabidopsis thaliana landsberg
atgaccaattgtgaaaaggatgaggaattcgtgtgcatcagctgcgtagaaaaggtacggtactctttcgtgagccacctctctgaagctctccgtcgaaaaggcataaataatgtggtcgtagatgtagatatcgatgatctgcttttcaaggagtctcaggcaaagatcgagaaagctggggtttctgtgatggtttaacccggaaactgtgatccttccgaggtatggcttgacaagttcgccaaggttctcgagtgccaaaggaacaacaaggaccaggcggtggtttcagtgttgtacggtgaccgtctattacgggaccaatggcttagcgagctggatttcagaggcttatcacgaattcaccaatccaggttttcgctttattctactctctgctttttttttccttatgttgaaaattggtaaaactttttggatggctagtgtagtgttttcaatatttgatgaaatatggtgcagaaaggaatgtagtgactctatacttgtagaagaaattgtgaaaaatgtgtacgagacgcacttttatgttggacgaattggaatctattcgaagctgctggagattgaatacatggttaacaagcaaccaataggcatccgttgtgttggaatttggggtatgcctggcataggaaagacaacaaatgaaaaagcagtctttgaccaaatgtctagcgcctttaatgcttcttgttttatcgaagactatga

SEQ ID NO: 161930 - DNA, 869 bp, Arabidopsis thaliana landsberg
atgaatggaaaaacgaaaacaagaaagtatcattcattatataataaatacgtaaacagcttaaccgggaaaaggtactgaattatagtattgaatgaaccccaaccaaacaacattaaattttgaagccaataattaaatacaacaaccaaatacatttaataaagaaatttcatagacgttaaaacatgtaaagaaatagagaccctaccattcctctctgtccttctccccttcaaacccttaaaatcttccctccctcactccattaactctctcactttcttatttttgaatccaatccccaaaacatacaaacaaaactaaaacaagaaaaccaaatttagtttcttgtcttagttttctcagagaaaaaaaaacaaaaatatgaaactcccatttctaaacaagaaccactcaacatcttcatattcttcaaattcatcatcctcttcatggccatggccttcttgtaaccaaaaccctaaaaccttatctttcagagccaccatcactttcaccaaccctatccacgaccaagacgacgatgagctcgacctgctcgacccaccggagattacagattccgtagagaatgtgataaaagggctaagatcatcagagagactcatcttcgaaagcaaaggagaaaccaactctatacttgaagaagctacgagcaagcgagaagaagaggacgaagaagaaggcttcatgctcttctccttggaatcagacgacccttactctgatttcaagagatccatggaggagatggttgaggcacacgcgcttcaccacgactggaaaagcctcgagaagcttctccttcagttcttgaaagtcaacgccaagaccagccatcgggg

SEQ ID NO: 161931 - DNA, 1383 bp, Arabidopsis thaliana landsberg
atgccaaaccgacgacaaaatcaagattcttgtctggtgacccaaattgctcatcaaattcaagatcctgtaaaatcagtagcaacaatggagaaaccaaagttgaagacagtccaagaggtggtcgcagctggcgaaaaactaccggaaagatacctctacacacccaccggcgactgcgaaggtgatcaacctttcaatggtttgttgccagagatggaaatttcgatcatcgatcttaatctccttttctcttcttctgacgacggtcgagaagagttgagtaaacttcactcggcgatctctacatggggcgttgttcaggtttaagtttttgaccctcttagtgatgatcatatagtcttaaaaaatcatcgaagaaaatttatatctcgtaggtgatgaatcatggaatttcagaagccttgctcgacaagattcacgagctaacgaagcagttctttgtacttccgaccaaagagaaacagaagtacgcaagagagattagtagttttcaaggatttggaaacgacatgattctgtctgatgatcaagttcttgattgggtcgaccgcttgtacctcattacgtaccctgaagatcaacgacagcttaaattctggcctgaaaatccaagcggatttaggtaaaatccataggatcatccatgcatagatttcagtttcctttagactgtaaatctgtgaattttaaaatcgtttctttagggaaactttacatgaatacacaatgaagcaacagttagtggttgagaaattcttcaaggcattagctagatcgttggagttggaagataattgctttctagagatgcatgggaaaaatgctacgttggagacaagattcaacatctaccctccatgtccgaggccggacaaggttcttgggcttaaaccgcattctgatggctcagcctttactcttatcctacccgacaaaaatgtagaaggacttcagttcctcaaagatgggaagtggtataaagcttcaattctccctcatacaattctgatcaatgtaggagatactatggaggtaatcagtcatgttatcatgtactatatgtacctatgacatttgaaattgatgggtgaagatgtgatagaatctctcatgcatgtttagattatgagcaatggaatatacaagagcccagtccatagagcggtgcttaacggagaaaaggaaaggatatctgtggcaacgttttgtaatgctgatgaagacaaagagattcaacctttaaatgggcttgtgtctgaggctagaccaaggttgtacaaagcagttaagaagtctgagaaaaacttcttcgattactatcaacaaggtcgaagaccgatcgaagatgcaatgatctga

SEQ ID NO: 161932 - DNA, 546 bp, Arabidopsis thaliana landsberg
tcattttttagtcttgcagttctggcatttgagaagaactttgcgtagagaagccttcttgcaatcatcccatgtggtgattgagtcatggggcagattcttctcccacagatgggctttgtctccaagtgaaaacgggaacaggcgaagcttgaaatcatcttcactaactccattaatttttgtaaggccacagagcctttcaaactcgtccaggtggtcgagtgggtcttccattggcaggccatgaaatttgttcccctgaaccatagcaatgagaccgctcttgatctcaaaattgacggtctggatagcaggaggtgcacttcctttcctctgacgttgatcacgtggtgcatctccagcaccaatgttggcagggccattttgttgattctgttcgtcagccatatcgagtggttgttgaggtacaaggttgactgtgtttctcctttctctcagttcgcgagctatgcggtcgatgttgtcattcaaaaggaggttctgattgcctgttgatcgagttcccatacagcagaggtgtac

SEQ ID NO: 161933 - DNA, 5932 bp, Arabidopsis thaliana landsberg
atgaagaagcactttacgttaccaagaaacgctatcttacgcgacggcggagagccacactcgccaaaccctagtatctcgaaatcgaagcctccacgcaaattaagatccgccaaagaaaatgctccacctctagatcggaacacgtcgacgcctgaccataggtcgatgagaatgaagaatccgttgcctccgcgtccgccgccgtctaatcctcttaaacggaaacttagtgcggagactgcgacggaatctgggttttcagactcaggtgtcaaggtaatttcacccttttctcagaaattaggtattatcgagacaaaatttctaattaagtaatgttgaatcatatctttgaattcaccccaattgaaagattgtgtagttgctagaattggttaggttgctaattggagatggtttgtgtactttctaaactggcttacgtttctcataggagacggtgtagagtgacttggtgaaggcttaggttgttatagaacatagctcaattgtgaaattccgtactcatttataatgaggaagagaaggtgatcagattgagccaattttcaggttatagttagaatgaagcctctaaacaaaggggaggaacggtgatatgatagtagaaaagatgtccaaagattccctcacagttagtggacaaactttcacattcgactcaattgcaaatccggagtcgacacaggcaagatatctgtttgcatgattcttgatattattatgctatgtcattgtatgattccgaatctctaactttgtcttttgtttcttcctcaggaacaaatgtttcagcttgtgggagcccctcttgttgaaaattgtctatctggatttaacagttctgtatttgcttatggacaggtagtttttattttctaaagtcttcctttgaggcagggttccatttattggattgtttgattgtaacttattgatttaactgatcatgaaattatttctctcagactggtagtggaaaaacatataccatgtggggtcctgcaaatggattgttggaagagcacctctgcggtgaccaaagaggtttgaccccacgtgtctttgaacgattgtttgcccgaatcaaagaggtgatgcctggttttgttcaattcgtggttttgaccttgttcaattattagcacattcagaagaagattcttcttgtttctttttttggattgcaggaacaagtcaagcatgctgaaaggcaactcaattaccaatgtcggtgctcattactcgaggtttagtgactggctgcattacataagtttggatggtgtttgaaggtttcattttatagagtttgatatataatttcattcttcttccttttcagatttacaacgagcaaataacagacctactggacccaagccagaaaaacctgatggtaaaatgaactttcaaatttaacttggtttatattctgtaggaaaacatggggttcatcgtttttcgttaatgtgtcaccagattagagaagatgtcaagtcaggtgtttatgttgaaaatctgactgaggaatacgtaaaaaacttgacagacgtgtcacagcttctgatcaaggtttgttatttttttggtttctcactgcagtactgcaccttaaatcatgtttgctttgcaatatttcttaagtacttaatcaaacttgctgctctaaaagtacacaaaatacaatttccggtatcatatctttgtaattctattaagttttaatgaagcaatgtgaaaacttgtttttgttagaaagaagagattgccacagattatatagaatgctgctactggggtttaacgttgatgttctgttagtgatgctgtgtgaatcaaatgatctcacaaagcttacattttatagtgatagttaagagaaattattgttccttagttggcaatatatatgaaacggtcaacatattttctctcctgataaaaataatatttgatagctatacttgtgtctgaaactggtgtagggtttgggaaatagaaggactggtgcaacgagtgtaaacacagaaagttcaaggtcacattgcgtatttacttgcgttgttgaatctcggtgcaaggtaagctactcttctacattaaatttttcatatactggctttttgagattttttcatttgtttttaagaaaatatatagagtagtatgaatgtatgatggaatatacgtctgacttctttagaatgtactttttgcagaatgttgcagatggcttaagcagctttaagacaagccgaataaaccttgttgatctggctggttctgaacgacaaaaatcaactggggcagccggagaacgtctgaaggaagctgggaacatcaatcgatcgctctctcagctggggtatgattcagagtagtctctcttgttatttttggatctcagttagcatggaattttcgttaattttatactgcaggatgcactaaagaactgacacttagcttctgctgttcttgtgtcttctagtttttgatactgcggcaggcactagaaatctagtttttgattataaaagaactgaaaatttgggataatggaaaataatttgaaatatggtggtagtagcttatgaggatcttgtgtcttttgagcagtgctttttgatatttaattttagaacaactatctctccatgtgttgttgtctgatgattgtcttatcaaagtggagttattgtatatcctttacctttttgctgaggatctaaaaatactttgggcttcccagaagttcatatttatttgtttgaagtcttcagacctcaaaaatggcaattatttgtctgctgattgtcttatcaaagtggatttattgtatatcctttacccttttgctgaggatatacaaattttgcttggtaaaaagaaaaagatttgcttggtttgttcaccagtcctgttattggcaggatgtttaccacaagatgaaattatcaactacatgtttaccatataaatttgttacgtgcaggaacttgattaacatcctcgcagagatttctcaaacagggaagccaaggcatataccttacagggattccagattaacatttttattgcaagagtctcttggtgggaatgcaaagttagcaatggtttgtgcagtttctccttctcaaaggtaacgcaggacccctatttccacttcagcaattattttatctccatcttctagaatataaagtatatacgaaaactgcagttgcaggagtgaaaccttcagcaccttgagatttgctcagcgtgcaaaggcaatacagaataaggctgttgtcaatgaagtgatgcaggatgatgtaaatttcttgcgtggagtgatacaccagctgagggtacggattcttttacatatttcataagatagaaatataaatatgaatatggcttttaatggataaattgtgcaggatgaactacaaaggatgaagaatgatggaaataatccaaccaatccaaatgttgcttattccactgcatggaatgcacgtagaagtttgaatttattaagaagcttcggtctgggtcatccaaggtccttaccttatgaagataatgatggtgatattgagatggaaattgatgaggctgctgttgaaaggctttgtgttcaagtgggtttgcaatcatctttagcttctgaggggatcaatcacgatatgaacagagtaaagagtatacattcatctgatggccaatctatagaaaagcggcttcctgaggactcagatgttgccatggaggatgcttgttgccatactgagaaccatgaaccagaaaccgtggataatatgagaactgagacagagactggcatcagagaaaatcagatcaagacacactcgcaaactttagatcacgagtccagtttccagcctctttcagtcaaggatgctctttgttcttcactgaacaagtcagaggatgtgtcatcatgccctgacttagttccgcaagacgttacttcagcaaatgtattgatagctgatggagtagatgatccagagcacttagtaaattctgcatctcccagtctttgtatagatccagttggtgcgactcctgtattaaaatctcccacactgagcgtctctcctacgattagaaatagcaggaaaagcttgaagacatcagaattgtcaacagcatcacaaaaagatagtgaaggagaaaatttagttacagaagctgcggacccatctccggctacatccaaaaagatgaataactgttctagtgctttgtctacgcagaagagcaaagtttttcctgtacggactgagcggttggcatctagcctccacaaaggaattaaacttcttgagtcgtattgccagagtacagctcaaagacgatcgacgtacaggttttccttcaaagctccagatagtgagccttcgacctctataagtaaggctgatgcaggtgtgcagaccattcccggagctgatgcaatatcagaggagaatacaaaagagtttatgtgcagtaaatgcaaatgcagagaacaatttgatgcccagcaaatgggtgacatgccaaatcttcagttagtacctgttgacaactcggaagtggcagaaaaatccaagaaccaagttcccaaagtaagaattgtgacttttttctaacatagatttagatagttattcacagtcttattttgtttccacatttctataattggttcctccaactgatcgagctttacactttacaggcagtagaaaaggttctagcaggttctatcaggagggaaatggctctggaagagttctgcactaaacaagcctctgagataacccaacttaaccgactggtatgatacttgcgtctttttctgtttttaatctcccttagtaactgtatcctcaaacataaattggtccaaaccgtgtaataggtacaacaatacaaacatgagagagagtgcaatgccatcataggacaaacaagggaggacaaaattattcgccttgaaagccttatggatggcgtattatctaaagagggatttccttgatgaagaatttgcttctcttctccatgaacataaggtaattgtggcttctcgttttgtaaaagggtatttgattgcattacccttttactgacatgtaatgttgcagcttctaaaggacatgtatcagaatcaccctgaagtgcttaagacgaagattgagttggaaagaacgcaagaagaggtcgagaatttcaagaacttttatggtgacatgggagaacgggaagtgttattggaagagattcaggatttgaagttgcagctgcaatgttacattgacccttctcttaaatcagctcggaaaacgtgtaccctgcttaagctttcataccaagctcccccagttaacgctattcctgagtcacaggacgagagtcttgagaagacattagaacaggaaagacttcgttggacagaggcagagaccaaatggatttctctctccgaggaattaagaactgagcttgaagccagtaaggcgctgattaataagcagaaacatgaacttgaaattgagaaaagatgcggggaggagttgaaagaagcaatgcagatggccatggaagggcatgcacggatgcttgaacaatatgcagacctggaagagaagcatatgcaattgcttgcaagacatagaaggattcaagacggaatagatgatgtcaaaaaggcagctgcaagagctggagtcagaggagcagagtccagattcataaatgcacttgcagcagaaatttcagccttaaaggtagaaaaagagaaggagagacaatacctgagggatgagaacaaaagtctacaaacacaactaagagatacagctgaagccatacaagcagctggagagttacttgtcggctt

SEQ ID NO: 161934 - DNA, 916 bp, Arabidopsis thaliana landsberg
ttctatgtagcttaaatgagctgtcaagtttgaacttgtgataagattttgaccttttctctgtagcttaatagagctgtcaagtttgtgcttacatgtttgttcattggtttgtacaggtcaaacactgtcaggattggcaggaagtcctgcttatgttgcacctgaagttctttccgaaaattattcagagaaggttgacgtttggagtgcaggtgtcctcttatacgctctcttgtctggtgtactcccttttaagggagactcattggatgctattttcgaagcaatcaaaaacgtgaagcttgatttcaacacgggagtgtgggagtctgtgtccaaacctgcccgtgatctcttggcgagaatgctaacaagggaagaatctgccagaatcacagcggatgaagtgctaagtaagccttttaacctctcccagcttctttatttgcagcaatgacttatatatcgacccaaatacatgaattctgatttgattatggaatccatgagcagcgaggctaaactgacataatattccacttttgtttcagggcatccatggatactcttttacacagaccggacactcaagaccatgtgtatcaagtcgaagcacaagagtcaagcaggatcttctacgtgtctccagaatcgcagtcccacagagaaaactgacctaaacagagctgacagggaaaagaagataccatctgattcaccgactgattcattctccaacacagaggaggaagaagatgagagcggtgtggtcgatgtgcttgttgttgcaatcgccaacgtgaggatctcagaaccaaagagaagcagagtctgtagtcccaccaataaccccattgagcagcaacactcttctaacttgacctcgactaatacactctgtcgagctttctga

SEQ ID NO: 161935 - DNA, 1149 bp, Arabidopsis thaliana landsberg
atggcgaaaaagttggaagctcaaggtggtcgtggaggagaagaatgggacgatggtggtgcttacgaaaacgtcaagaaagtgtatgttggtcaaggtgattctggtgttgtttacgtcaagtttgattacgagaaagatggaaaaatcgtatcacacgaacatgggaagcagacactacttggaacagaggaggtaaatattttgttttcaatgagagttctcttgtcatcaacattaactgatcatttttggttgttttttttttttttttgctagtttgtggttgatccagaagattacataacatcagtgaaaatttactacgagaagctctttggatcaccgatagagatcgtaacggctctaatctttaagacattcaaggggaaaacttctcagccttttggactaacctctggagaagaagctgagctaggaggtggcaaaatcgttggatttcatggaagttcaagtgatttgatccattctgttggagtttatataattccgtcgactacaccgctgactccgccggtatcaggtggtctgaccaaattggaagctcaaggtggtcgtggtggagatgtttgggacgacggtggtgcttatgacaatgtaaagaaagtttatgttggacaaggtgactctggtgttgtttatgtcaagtttgattacgagaaagatggaaaaatcgtatcacacgaacatgggaagcaaacactacttggaacagaggaggtacacaaatctttgtatttcttgaaattgcccaaaaagttttttttttctttctttctagtattgatgtgtttttgtttttgcagtttgagattgatcctgaagactacatcacctatgtgaaagtttactacgagaaacttttcgggtcaccgatagagatcgtcacagctcttatattcaagacattcaaaggaaaaacttctcagccgtttggactaacctctggagaagaagctgagctaggaggcggcaaaatcgttggattccatggaacttcaagtgatctgatccattctctaggagcttatattattccttcgtccacaccattgactccttcttccaatactattccagcacaaggtggagatggtggagttgcttgggatgatggtgttcacgaca

SEQ ID NO: 161936 - DNA, 1170 bp, Arabidopsis thaliana landsberg
aagctgaaatcgtgtcaggttaaacttcagtcaaggttggaggatgatgaagaagccaaagcagctctgatgggaagaattcagcgattgacaaagttaatcttggtttcaacaaaaagttcactccaagctgcttctgtaaaacctgaccatatatggaggcaagcttttggagaggatgaggtatgcatgttaaattaacgttgtttgcaagacatcattccattttggtggaacaataatatttctgtttcagcgtttacaattacaccatttgatattgatgtataatttaacattatggttcctacagctagcatacttgcccgatagaagacgggagaacatggctgatgatggtgctgtaagcacagtttctgaacatttaaaggagccaagagatggcaatagtagtctggacgagatgacaaaggacaggagaaagaacaagactcgtggaatgcttggctggctaaaactgaaagtaagttctaatcttcgttgatccctctgttgtatcgatatttatagatggagttagtcattgtgttctgatatataaaaatgacacaatccaaaaacataaagagtgattagactgtttcggcattagacatgacccataatgtatatgctgcagaaatctgatggtgtggccgggactattgccgactgatggtaaccagagccaagcaagtggatctccttcatcttcctccaagtatacacaaacaaaaacaactagaagagaaaatgcagcggctattaagtctattccggaaaaaactgttgctggagacttgttcagtgctactgttggaccagaagactcgtctccggtaagagaatattgttccttcacaattttcttgttgcttccatgattatttttttcttataactattgcttccatgattacccttgagaaagtagtgacgccttaattgttattcgttgaacaccatatcctgtggtcggtgtaggttttaaagtggtcattgtgtatctttttactgacacataaccatcaacaatgacatacgacagactggaactactattgcggatcaaatggatcttcttcacgagcagacaaaaatacttgttggagaagtagcgttacgtaccagttcattaaatcggctttccgaacaagctgctcgtaaccc

SEQ ID NO: 161937 - DNA, 962 bp, Arabidopsis thaliana landsberg
atgaaactatagtttgtttgggtttgttcgattttatttatttttgggagatgtgttctctgttattaaaatatctagggttttcgtttcgcaatgtcctcgcaactacctcgcaattttgggagggatatatttgcaggttgaaatgaaaccaataattggtgttgattctaatgaatatgaccacttgctttcacaaaagaatccttaagacaaggatttgttacatgtttttgatcttctgattaaagggtataaaataagcaagaaggattagagtcagggatggattgaagtggaacaagtacacgaaggtcgaattgatcatgtaatgaaacctgcaattgaaacacttgtgtatcaccagcagaaaaaggaaatcaatgtcctttggtgagaaaataggactggtctatgaaaattgtgaagtacttaggtacaaagttggaaggatggaggactatttagggatcgaaagagtttctgctagttctactagagaagaagaaaaggaagaggaagaagaaaattttgtgagggatagatttttcgcaaattttgcgacgttctcctatctgctcgcaatgtcctcgcaattttgtagcaaatttgcaagggaccttttccatcgcaaatgttcctcgcaaatcgcttgttttcttgtagtaaaaaggtttctaaaagaattttaatgcgttgaaaaagttactgtaatgcttacaatttaactgttagtaattgggcctatacctcttatttttgcaaaagcaaaccgttttagtataaattcactaaagcccaaaattcacaaaaaaccaaaaaaaaaaaaaaaaggaaaggaaactgtggaagtaacaaaaagtaaaaaataaaaattagagaaacagtcttctctctcattgtgtcttctttcttagaacaatttgaaggatttccgtttctccagcaaaggaatcaattga

SEQ ID NO: 161938 - DNA, 891 bp, Arabidopsis thaliana landsberg
atgtgtgcattagtcccttcatgtttcccaaacttcggttggccgtcaacgaatcaatacgaaagctattacggtgccggagataacctaaataacggcacatttcttgaattgacggtaccacagacttatgaagtgactcatcatcagaatagcttgggagtatctgtttcgtcagaaggaaatgagatagacaacaatccggttgtggtcaagaagcttaatcacaatgctagtgaacgtgaccgacgcaagaagatcaacactttgttctcatctctccgttcatgtcttccagcttctgatcaatcggtaagatcgctagtagctactctgatatgtcatctacatctgtttctaataagctcgtctatacagctatacaattctaaagaagaacaccgagttaacccttatttctttttctttactttcttgcagaagaagctaagtattcctgaaacggtttcaaagagcttaaagtacataccagagctgcaccagcaagtgaagaggctaatacaaaagaaggaagaaattttggtacgagtatcgggtcaaagagactttgagctttacgataagcagcaaccaaaggcggtcgcgagttatctctcaacggtttctgccactaggcttggtgacaacgaagtgatggtccaagtctcatcgtccaagattcataacttttcgatatcaaatgtgttgggtgggatagaagaagatgggtttgttcttgtggatgtttcatcatcaagatctcaaggagagaggctcttctacactttgcatcttcaagtggagaatatggatgattacaagattaattgcgaagaattaagtgaaaggatgttgtacttgtacgagaaatgtgaaaactcgtttaactag

SEQ ID NO: 161939 - DNA, 1966 bp, Arabidopsis thaliana landsberg
gtttattgtgatgagtgtgatgtatggccgtatgggtgcgacaataatttatataagcgctttaaggtacaccttcatgcatcttaacttttgattctaagtaatgaacacgcttgttgaactatcacactaatttggttatcatcttaaggaactggagcacaacagttactattgccctaactgtaaagtccagcatgagcttatcaatattagaagaacagaactcagtgttcaagtatattgttaacttctcatgttctcctgattttattgtttgcatttctccattgctataatatgcgagatttcctcacaacctctttgggattggtctacagaaaaggcgacacagactgagctgcctgatgagattaatgtagtctgtaatggcatggaaggaacatatatcagagcatttcatgcgtacgtattagatgtctcagccttatttcaatttcttcatttagaaaggatcttatttgtttatgaattatgactatgcagcacaatatcgtaaattgattttttctctgaaaacgataaaaaatccgtgtttaatcctaggtttctgttatcattgtcttgttgttttagagatttgaccaacacattaatctttgaactattgtttcagaattgagtgcaagtgtggttcatgtgggtcaaggaagcagtcaccaagtgaatgggaacggcatacaggctgtagatactagatagcgtaagagtgaaagacacaatgctacctctagaaaaatggctttgcatgaagactttgatactatatgtatctgtatatgtagaagagtatcagttttatctaaatgactagtctccaaatttgtggtttattgatttcgtcagaatggtaggctctttaactgatttaaggtgaaaactacattggtctttgttcagtgttagatttgtcttttgtgggtttggaatggattaaagaggagtcttttactggattttgttgaatgctagatttgggtttagtaaacaatgaatcctttactggttttgaaggatgttatatttgaaactgattagagctaaaccctctattgcttagtggttcttaatttaagggttttgccgcagcttccctaatttaagcttgttttctaatacaaagtacaaaagcagtgtgttcgtcaactatcttcttactctgttttcgtttagagagtttttgcagagatgaggagaactataacaatggtgataaagatgtcaatacttatgatattgatttcatcaatggtgatgaatatggtcgaggttgaggttgaccagattgaatcatgggtcaaggacttccaggtttcattctctttttcacacattcacacaagctttatgtaaaagaagtatatatgaaatcaatataacctaaccaaagaaaatgttttctctaggatggaaaagctgctgtccacaaaaattctcaacctattccagctgagaacaacgaaccagtgaagcttgttgtcgccgagagccttgacgacatagttcaggtcagcgagcggaaacgttgtagtatacgaaggagacaggacaaaggaagacttcatagttcagggttggtgatactagcagaagatgatgaggaagaacacgaaaagatggattagttaaagcttccaaaaactgaatcaaaacaatcattattacattagtttgtggttgtggattagcaatgtttaagtagtttgatctatcaatctcctgaatttctagattgcagatattttatctcattttgctgtctcacttgattcgtgggttatattgcttaatttgatttaaactctgttttgtgtggttacataggactctgtttcgcctgtgtataggaagagagtaatgacgttgagtccccacagttggagaagggtttcgagaaaaaattgtaattcttgaattcgtctcagcttgagaatagtgagtccat

SEQ ID NO: 161940 - DNA, 621 bp, Arabidopsis thaliana landsberg
  unsure (1)..(621): unsure at all n locations
ccccccccccccccccctcccgtcaccccccccacccccccccacccagccccccccggaatttccgtttgagacacccacgggctttccccntaanagaaaaaaaaagaccaacccccccccccctcacaaaacacccccccacccgccctctcccccccccccctgttccaccgcccccccccccaccccccacaccccannccnnccccccctccccctctccccccctcccccccccttncctccccccccnncccccccccccccccccccnttcccccccccccccccctccccccccccctctccctttcctcnccctcccccccttccccgccccccccccccacantccaccccccccccccccccccctcttctcttcccccccccggattttgttcccccccccccaccncccccccccccccccccacccccctacccaaaccccccccccccccccccccccccccccccccccccccccccccgtcccccccccccccctcccccccccccccccccctccccccccccccccccccccccaccccccccaccccccccccccaccccctccccctcccccccccacctcacctccccccccccccc

SEQ ID NO: 161941 - DNA, 1946 bp, Arabidopsis thaliana landsberg
  unsure (1)..(1946): unsure at all n locations
atgcacaattttcgaattgataagaatgctgatttaattagagaacaacgtttgtccactccagagatcaaagtgatgcattcggattctgttggaccatcgtcttatactggtcgcaatgcagaaatagttgatggtctgagaatatcagatgtccctgaaatggcatcagtaaaggacactccctctcgtgttgggaatgtcacggaagatcgagtgtctgaatggctttggactttgcatcgaataggtaggaattattccttgtctcttttgtttcgataacttgcaaaaatcttccttttctgtcccatctagtatctttcatagttaaaactttttcatttcctcagttgttgatgtggtaaggacggatagccaccttgagttttatgaggatccaggaaatctaggaagaatgtcggatatccttgcggtttatgcttgggttgatcctgcaactggttattgccaaggtgccatatatctcttaagtttgataacttagatatgtgatatgaaaactttgtgacgttttattgatttaggatactaactctctggttgcaaatctgttgataggaatgagtgatttagtctctcctttcgtggtnnnnnnnnnnnnnnnnnnnnntgccttctggtgctttgaaatgctcataagaagaacggtaaatccagtgcttaatacgtcataattttttgttctggcttcatttgatcatgcattatacttttgctatgtgtatatttgtgcagcgtgcgaatttccaaatggagggaccaaatggggtaatggatcaattgcaatcattgtggcacatattgcagattacagataaagatatattttcccacttatcgcgtattggggctgaaagtcttcattttgccttccggatgcttttagttctgttccgacgggaattgtcttttaacgaagctctcaggatgtgggaggtttgtagttctgctgtttgcttcaaatattgagtcttttgttctgtctctgttagtcatatttatctatgggttttgtctttgatgtagatgatgtgggcagctgattatgatgaatctgttactgaaactttggagaatgattgcttggagcctttggtgattcagcttccaagaaaatctgaacctgaggtgagtgaagaaatgatagaggatggaattggtaatagtacaaagagggaaccaatgatttcaaagagcgggccaatttcaaagagcagcggtttgttgtcaaggagcggtttgctgccgaagagtggtccgttgccaaagactgcgggtcctttctctgatgagagtgagataaagtcagcatcatcctcgtatcacttttgtgggttgacaagaagtctttggtcaaggaatgatagaacaacacatgtcccttgtgtcgtttcatccataaaaaaaggggatgatgctcttcctgtcttttgtgtggcggcgattttaatcatgaatcgacataagatcatgaaagaaactcgctcgatcgatgacatgatacaggtagaaagtttgtttcatttgtattttgttctgctcacatgctcagctgatatatactgattcagaagatatactgcagatcttcaatgataaggttcttgtattccgcgtgagaagatgcatacgcacagccatgaaacttcgtaggaaatacatgtacaaggttagatatgctctacaaagaaagcttctgctgctggattattctattttctccatttaactgttaaaacacttgttagagtcaggtaatcaagactaagagtcacactcagtctcagaatctcaaccaggttcatatccagcatcaaacccatatggagagccagaggccggaggagattcagagccatggtgagaaccagagacaaacaccaagttttcatcatagtcctgccactcagaatggtgactag

SEQ ID NO: 161942 - DNA, 1657 bp, Arabidopsis thaliana landsberg
ataaggacaaaaaaaaaattaacaacctaaaacaatggaagagccatttcttccgcaagatgagcagatagtcccctgtaaagccacatggaaaagtggtcagctcaatgtcgagctgaagaaagtgagccgcttggctgttcctatggccaccgtgaccattgcacagtacttattgccagtcatctcagtcatggtcgctggccacaatggtgagctccagctctccggcgtcgctcttgcaacctccttcacaaacgtttccgggttcagtgttttggtaatgatatgctataactactctctcctcttaagttcaagatcaagttgcctctcaaatcttgataacactatattaattctttgtgcagtttgggttagcgggtgcactagaaactctttgtggccaagcttatggagccaaacaatacgaaaaaatcggaacctacacatactctgcaactgcctctaacatccctatatgtgtcctcatatcagttctctggatttacatcgaaaagctcttaatctctctcggtcaagaccctgacatctctagagtcgctggctcctatgccttgtggctcataccggctttgttcgcccatgcgtttttcatcccactgactcggtttctgctagcacaagggttggttcttccactgctctactgtaccctgaccactcttttgttccacatccctgtttgctgggcttttgtttacgcgtttggtctgggaagcaatggagctgccatggctattagtgtgtctttctggttctatgttgtgattctctcatgttatgtgaggtactccagctcctgcgacaagactcgcgtatttgtatccagtgatttcgtgtcttgtatcaagcagttcttccacttcggagtcccatcagcggcaatggtttggtaagtcgtttttaagtttcttgttggtcaagttacatacaacaaccaatgcttttttttatcttgcttgcgttttcttggtcttcctttaatagcctagaatggtggctatttgagctactcatactctgttcaggtcttctcccaaacccgaaactcgagacctctgttctttcaatttggtaaatatatatcatataacgacttctttttatttttattatcctctttactaaaaactaatgaatcttatttctttaatgcaagtcttacaacagcaagtttgcactatgtgattccaggtggagtcgcggcggctgtgaggtatgaactcaaatttttaaccaaacatattcaacatcttcttcctaaacaataatagtcatttggtttcttgcagcacacgcgtgtcaaacaaattgggagctgggattcctcaagttgctagggtttcagtattggcagggctttgtctctggcttgtagagtcagctttctttagcacacttctcttcacatgccgaaacattataggctacgcattcagcaacagcaaagaagttgtggactatgtggctaacctaactcctttgctctgcctctcctttatcctcgacggcttcacagcagttctaaatggagttgcaaggggaagtggttggcaacacattggagctttgaacaacgtggtagcttattatcttgtaggagctcccgttggagtatacttagctttcaatc

SEQ ID NO: 161943 - DNA, 165 bp, Arabidopsis thaliana landsberg
tttgctctggggactgtgccttctaggtgtctcacacattgtttccatggaatgatttgcgagcaaaactgaatggcgagtttctgaacaacctaggcaactctgttaatcgagctctgagttttatagcaaagcacatgataatgcaggttggttatacttact

SEQ ID NO: 161944 - DNA, 2858 bp, Arabidopsis thaliana landsberg
atggagcttgtggcggattacgacttggatatagcgtaccatccgggcaaggccaaccaagtcgccgacgccctgagtaggaggcgctcggaagttgaggcggaacggagccaagtggacttggttaacatgatggggacattgcatgtgaatgccttgtctaaagaagttgaacccttagggttgggagctgccgatcaggccgacctgcttagtaggatcaggctggctcaggaacgggacgaggagataaaaggatgggcactaaacaataagaccgagtaccaaacctcgaacaatggtacaatcgtggtgaacggtcgagtatgtgtgccgaacgatagggcattaaaggaggagatcctaagagaggcccatcaatcgaagttctcaatccatcctgggtcgaacaagatgtaccgcgaccttaaaaggtactaccattgggtaggaatgaagaaagacgtggccagatgggtggccaagtgcccgacttgtcaactggtcaaagcggagcatcaagtaccaagtgggttgttacaaaacctacctataccggaatggaagtgggaccacataacgatggacttcgtcaccggactgccaacggggatcaagtccaaacacaatgcggtatgggttgtggtagaccgattgactaagtctgcgcacttcatggcgatctcggataaggatggagcagaaatcattgccgagaagtatatagacgagatcgtgcggttacatgggattccggttagtatagtgtcagaccgagacacaaggttcacgtcaaagttttggaaggctttccaaaaggccttaggaactcgagtgaacctaagtactgcctaccacccacagacggacggacagtccgaacgaacgattcaaaccctcgaggacatgttgagggcatgcgtcttagattggggaggaaactgggagaaatatctaaggttagtagagtttgcatacaataatagttttcaagctagtattggtatgtctccctatgaggcgttgtatggccgagcttgtagaacaccgttgtgttggacgcccgtgggcgaacgtcggttgtttggacctacgatcgtggatgaaaccacggagagaatgaagttcttaaaaatcaagttaaaggaagcccaagatcgacagaaaagctacgccaacaaacgtcgaaaggaattggaattccaagtaggagatttggtgtacttaaaggcgatgacctacaaaggggcagggcgattcacctcaaggaaaaagttaagcccaaggtatgttggcccgtacaaggtgatcgaacgagtaggggcggtggcatacaaacttgaccttcctcccaaactaaacgcgtttcacaacgtcttccatgtgtcacaattacggaagtgtttaagtgatcaagaagaaagcgtggaagatatacctcccgggttaaaggagaacatgacggtggaagcatggccggtacggatcatggaccgaatgacgaaagggactcggggaaaatcaagggatttgttaaaagtcttgtggaattgtggaggccgtgaggaatacacttgggaaaccgagaataagatgaaggccaattttccggagtggttcaaggagatgggtaaagatcaacttgatgcggattcgaggacgaatccaattcaagggggggagacttgtaacgcccgcgatcctcaataggatcgttggctaggacttggtccgagagaggaaggtggagtctcggacaagtgagaaggagctggccataagctcggacaaaggggaaatcatgcaggctaagctaggatcgtaaagaaatcacttgggtcagctcgcccaaagctcaagctcagctggaaggagtgacggttactcaggtcgagtgacagtccagctcgggcagctggacgagtgacggacgagctcgaggcagctggacgagtgacggttgaactcgaggtagctggacgagtgacggacgagctcgaggtagatgggcgagtgacggacgaactgggcggttatgggcgaagagatacaactcttcggaaaggtgcaactcttcggaagggcgcaactcttcggaaaggtgcaactcttcggaaaggtgcaaggaacggatgtgttgattcgggaagcatccattcgccccctatataaggaagggcgcccaggaccattccactcaccacaacacaccgaaaacacaagaaaactcaccattaaaactctctccctcttgggagaataaatagtcttaggattcggtagccgggctgtggccggcaataaagaaggaaggtcggatcgacctaacctcgagaaggaaggtaagggatcctagactttgagtctaagggttctaggatgtgaattagtagtcggatccttgaaaggaccgactagagggctgagtagtatccgggtcatgtgcatcctacacaagactcggtccgggtagggatcggctgaggcggggacgcggctcggcggaggaccggcgggtcttaactgacctgccgagaatcggccggactgatgcgcgatcttcccctctctgaattctctccacggatcggagtagtgtatggcatatagagcattgcatggacttgcatacatatgattaagtaaataagattacttatggctctatgactttcaggaacgaatggtgatcgtgggaaggacttggcttaggcgcgagagactcaaggccgggatgatgggtggtgatagttcagatagtctagggatcgattatatgacttgtaatagcttatatgcaaactcataggttgtatcgaatcctttgcttaattaataaagtgtccgattgtttgttt

SEQ ID NO: 161945 - DNA, 248 bp, Arabidopsis thaliana landsberg
acagaagtgatggagatgttggaagagtacaagaggctaacttcgatgtttggcaaggtgaaagggcttaaggacctagggaaaggaaatatgagcgcactctcaagaaacaagaactcgcagcaattgaataaggtcctaccggctcagatgctaaagcagattggcggcatgagtggtctgcagagtctcatgaagcagatgggttcaggtaaagacctgatgggaatgttcggtggccgagacga

SEQ ID NO: 161946 - DNA, 1581 bp, Arabidopsis thaliana landsberg
tgtgaggatccaagatgccatgtttggcagcatgttggctgtgttattctcccagataagcctatggatgggaatccaccacttccggaatcattttattgtgaaatctgccgacttactcgagctgacccgtatgtgtttcaaggattttacttttcctgtctgagtttaagtttgatatgtgattgattttccatctgagttcctccctcactgctttatgattctttcctgccataactgaaaagaaagacatatttatacatttgacatgctttgcattctagtttctttgcgtttgattgttcttcttcttctagtactgttttcatagttgtcaattttcttttatatattatttcctatctttacattagcacctgtggatatcctatagcatgattattcacggttttcctacatggtttccttgttcagattttgggttacagtggcacatccactctctccagtgaggctgactgcaacgactatcccaaatgatgggtaagaattttatattcttgatattgctattgctttgaacgagtgtactttcagtgccattattgtgtgaattggtactttataagtcactttgactttaaattttctacttggaactggtataagacattcattctagtttcaagaatgacaattgtttcctggctatatgcatagcacctgctgaagaaatactgttactggcttttgtttgtactaatactccgatccaaaacttttcagtgcaagcacaatgcaaagtgtggagagaacatttcaaatcacaagggcagacaaggaccttttggccaaaccagagtacgatgttcaggttgggttttgtaaactacatttaatatgtcaaggtgtatctacctatacgtttctaactggaaatcaattttgtttaggcttggtgtatgctcttgaatgataaagttctctttaggatgcagtggcctcagtatgctgatctgcaggtcaatggtatgacaatgacatcgaccagagttttagtcggttgagcatttcctttgaaacaggggaatgttgttttatttcatgttgcataaattcctgtgggcacattccattcacattcacattgtctttatttgtctgttattctgatcatactcaataagactgtgtatgtttctgatgtgggattcatgatatataccctatcatttcataggtgtgcctgtacgtgcaattaatcgacctggaggacagcttttgggagtcaacggccgcgacgatggacccattgtgtgttttttatcatcccttttgagtagtaacccttttgaattacatataggagtcaatctctcatacattgaaaatctagcaatcagtgatgtaagttttaaccatttcattttactattttggcagattacatcttgtattagggatggagttaacagaatatccttgagtggaggtgacgttcggattttttgttttggggtcagacttgtgaagcgcaggactctacaacaggtactgataacagatatgcataagaaacattcaaagatttggtcgtatatgtggtcaatgaagagt

SEQ ID NO: 161947 - DNA, 352 bp, Arabidopsis thaliana landsberg
aaatatatggcaccagctcaaaacccgatcagttctcaacacgtggtagtcatcggagccggagcagccggtctcgtagcggctagggagctcagtcgtgaaggtcacactgttgtcgtattagagcgggagaaagaagtaggaggtctctggatctattcacccaaagccgaatccgacccgcttagccttgacccaacccgttccatagtccactcgagcgtgtacgagtctctccgaaccaacctcccacgagaatgtatgggtttcacggacttcccttttgtgcctcgtttcgatgacgagtcaagagactcgagacggtatccgagccacatggaagttcttgcgt

SEQ ID NO: 161948 - DNA, 963 bp, Arabidopsis thaliana landsberg
gagtggatccaaggagtgagctaattaaattctatggcgaacactattctgccaacatcatgcatctggttgtttatggcaagggtacgtttcggagctaacccaaaaaatcagattttttattacttactttcagaaaacaaagtattagtctatagaacatttatacatctctttgctctggatgtcttcagaaaatcttgataaaactcaaggtctagtggaagagttgttccagggaattcgaaacaccaaccagggtattccaagatttcctggtcagccttgtactctagaccatttgcaggttttttcctctccttattttagctttagcatttacaggaaacgaagataaattgatgctagaatgtttctaaagtggtatcttctgtggtggtggctttcattggttttaggttctcgtgaaggctgttcctataatgcagggtcacgagcttagtgtttcatggcctgtaactcctagcatctatcattatgaagaggcaccatgcaggtatcttggtgatctaattggtcatgaaggcgaaggaagtctgtttcatgccttaaaaatcttgggtaggttttttttggtgccaaactaataaatgttttggcagagtttacctagtagttttacatctaatagttagctgaattattgctaatacttgcacaggttgggcaacgggactgtatgctggcgaaccagactggactatagagtattctttcttcaatgtttcgattaatcttactgatgcttgccatggtgggtttctatattctttcttgtttgttttaatattcttatgttgaatgagtggtcttggtgtgcttgatgtttagtcagtgcaatgttattttctggattttggtttgatttgtttcttgcttgttatacagagcatatgaaagatattttacgccgttgttcagacaaattaagcttttacaaca

SEQ ID NO: 161949 - DNA, 235 bp, Arabidopsis thaliana landsberg
aaatatatatagttcaaattgtaactttatgaggtttaaattttttttctttttgtttcagattcaatgggttgtatttcttgaggaggatgagagggaagaagataatgttcgttggagattcactaagcacaaacatgtggcaatctcttgcttgtctaattcactcttgggttcctaacactcgttacactcttattcgccaaaagggtcttgcttcacttacctttgaggt

SEQ ID NO: 161950 - DNA, 303 bp, Arabidopsis thaliana landsberg
gcagacacctgtttacacgattgcttccaatgctggagtcgagggtgcagttgtcgtaggcaagcttttggaacaagataatcctgaccttggttatgatgctgctaaaggttacactcttatatgcattagataattcactttctatagttcttgatccaccttgttatatatttccctatattccgaaatctgaactagcttcttttggcatttactttcaggagaatatgtggacatgataaaggctggtattatcgatcctttgaaagtgatcagaaccgcattagttgatgctgcaag

SEQ ID NO: 161951 - DNA, 553 bp, Arabidopsis thaliana landsberg
caaagtggtgtcttggagcaagatcttagcattggatttgagccatcatcttcagatttggaatgatgcaagtttcttgataggcgaagagaagaaagtcatcatgtgtgagagattggttgatgtgcacacgtccaaagtcatggtctacattgttggggagaacaatgttgtcacacaagtggaatttggggttgttgaaatggatggatgttgggcagttatctttaattatgttccaagtttgattcaaatcgagcaagctggaggcaataggaacataggtaaataaacaccgtctacatgtaatatctttgtgcgtgtgtgtatgtgtgtgtgtgtgtgatcttgttctttcagtttcaggcttttctaattcaatgacttaaagtgattcagaaaacatgtacaaagatacaagttgtgtgtgtgtttttcttaatttaccctgtctcttgtctgagttttctttttcacccaagatacaagttgtaaaactataaatcatcgcccaattcaccttgcaagttctaccactaagccaagcatgtga

SEQ ID NO: 161952 - DNA, 967 bp, Arabidopsis thaliana landsberg
atggtcagtttgcgatcacaaagtgtccttcaagtcattcatttctgtatcttaatcttagtcttatttctatcttgcagccaacagctcagcctcagacgatcaaggagcatagtagccatcctacgtcttcctcacccatcatgcctcaacttcaacatctattccagcaaaactcaatacaacaggtgaggaacatccattaagacatgagacttatctcttattaattaattagcaggatcttaacttctgcaattgaatgatttcgctgcaggatcttattatgaatttactaaatagcttacaacccgtggaggcaacagaaggtagtatagacaattatacttcaatctgctgtgactttattattgattgaagactattcagtaacggtgccttcatctttcttataggttctcaatctgggaagttaccacctttgcctcgctcagacagtaatggaaacgtaagttgatttttcatatatgttctgaaaactttcataaagatattgctcacagctatgtaactattactatggataacaggttgaacctgtggcttcagagagggagaggttacttcttagcagtatctccgacctccgtgctaggttagtcctcttcttcaagcaaagcttttgtttctaaagaataatgtagttagtctttctaagtggatcttcctgcaagctttaactgccaaaatcttcaggctggacgacttaacggaggaactcgatatagagaaatcaaaatacagccaagtaagttaacacattttcaactcgttaaaacgcaataatctgcttgttgtgtttcgtgtcatcaagcaaatctttcgtttatgtttgtgtgtacagctgcaacagaaattgaaagcattcacgggtaacgaaaactaagtgtaaccagagggaaagcgacactggaaacactgaactgcacagaacctgtaggagaaa

SEQ ID NO: 161953 - DNA, 642 bp, Arabidopsis thaliana landsberg
gatcaatactcgtcagttctttgaaggttatagcaaaggaagaacatatgaaaatttctggcctgagatgttgaagcttaaggactggcctgcttctgataagtttgaagatcttctacctcgtcactgagatgagttcatatccgcgttacctttccaggaatatagtgatcctagaactggaattcttaacattgcatcaaagcttcctgaaggatttatcaaaccagatttaggtccaaaaacttacatcgcctatgggattccagatgagcttggtagaggcgattccgtgactaagcttcactgcgatatgtcagacgcggcaaagctttcaattattttgtttttaacactcttggtttggttttaaatagtccatagactgactttgcgattcatgtaggtgaatattctaacgcatacggccgaagtgaccctaagtcaagaacaaatatcctcagtcaaagcactgaaacagaaacacaagttacagaataaggtcgataaacagagtactgaagactgtaacgaaaaggaagaagaagaagaagaattgaacatgccagagatttcgagcaatgaaaatgaagaaacgggcagtgctctttgggacatatttaggagagaagacgttcccaa

SEQ ID NO: 161954 - DNA, 612 bp, Arabidopsis thaliana landsberg
tgaaacagcgtgtgaagatttcagcaacatcatagagacatttgacggttacactgtgtataaaggaacattgtcgagtggtgttgagatagcggtagcttcaaccgcgattgctgaatctaaagaatggacaagagccatggaaatggcataccgtagaaaggttactgcttactccttcttaactccaaaaaaaactaacttaaaggtcttaccattataacttaaaaggtcttttttgtagattgatacattatcgcggatcaaccacaagaactttgtgaatctgattggatactgcgaagaagatgatccttttaataggatgatggtctttgaatatgctccaaatggaactcttttcgaacatttgcacggtacaaacattggtctaggtcttttcatgatgttatcttggctttcactctctcggttaataacttttttcggctatcagataaggagacagagcatcttgattggagcgcacggatgagaataataatgggaacggcttactgtcttcaacatatgcacgggatgaacccgcctatggctcatacggacttcaattcatcggaaatctacctaaccgatgactacgcagccaag

SEQ ID NO: 161955 - DNA, 629 bp, Arabidopsis thaliana landsberg
  unsure (1)..(629): unsure at all n locations
aaacaaggagggaagaagaagaagaacatggcaggggcggcctcagcgctgtttttgctcgatatcaaaggtcgtgttctcgtgtggcgcgattaccgtggtgatgtcaccgctgctcaagctgagcgtttcttcaccaaactcatcgagacagaggtgaagttttaaaatttggaactaatgaacaagcttgatcagtgcttaaaaggattcaatttgatnnnnnnnnnnnnnnnnnnnnnnnnnnnnnnnnnnnnnnnnntgcgggtttgcttactttcgtctaatatgttcagggtgattcacagtcaaatgatccggttgcttatgataatggcgtgacctacatgtttgtacagcatagtaacatttacctcatgatagcgtccagacagaactgtaatgctgccagtcttctcttcttcttgcatcgtgtagtcgatgtaagcatccctagtgattcagttttttgcatttccatctgttttctgaatttgaagaaaaaagaacggcactgtttcatatgttacagtcttatactgatcgtaggtcttcaagcattacttcgaggagttagaggaagaatctttgagagataactttgtggtagtggtaagttaatgcttctc

SEQ ID NO: 161956 - DNA, 322 bp, Arabidopsis thaliana landsberg
atagttttgcaaaacgtgtcgatatacacttgcacaatacgtttaaagacgtggagggatcaaaaagtattcataagaggatggttacctcggagaaaaatggagcacaagaggatgcttacctcggagaaaaatggagcataagtcggttgaagagtaaaccgaagtcgacgtgtaagtatagattcacgcatcaaaacgtcatggagacgttatggtgatcaaaagaagacaccgaagaagacgtggaggagttcacgcacagatttggtgatcaagaggacaccaaaaggaaatcagaagaaatctcatttaaaagaaa

SEQ ID NO: 161957 - DNA, 1871 bp, Arabidopsis thaliana landsberg
ttggttaggatttgattaaacttgttaagcatatggacttagtttggatgatcatgacaataggctagagaatgttgggagttcctttgttttcaaaacctcttccacgggttcggcttttgtgttttgcttgagggcaagcaaaagctaagtctggaggagttgatataaccctatttttattgatttaatctatgttttaggtatatgattttgagtctttatgttatttctcgagtctttttagtggcttttcaggtattctatgcaatgggacaacaatggagataaggagatattttggagcaaaagctaaggaaaaggaagctaaggacgatttcagttccagattcagcgagagtgtcgatcgacacacacctcgtgttgatcgacaccagtttcggcccagcaaagtccataacgctttcaagtttacaaaagtgcaaatttgctctagaagactttcttatttgcattattagtccctgaacgtttattaggtcatatatatagttttagaggtcattgtttagacctatcaagctttttgcaaatccctattttcagagacataagctattcatcccctgttctcgagagattcattcagattccaatacagtgaagagatcctttctaactcttttctttattgttgtgctcatgctttcttattcaattatgttgcttgtttcattcaatatgtttgagtagtttgcttgttagggttagggtttctcattagggattcatatggtttagtaaatcgcctctttgctaggttatatgtagaattcttcatctttaattgttcttaatgctaattctagagtaattaactataacttcaatccagacgatagatatacccgccataggtaactgtagttggatctattatttgatgagcttggtttataggtgtgtaataagaatcggcctatttactaaggtgaactgaattgaagtcgtttataatgcatgtctaagtatcagatttgtcggcttctctggttattcttagctataggcatagggagtttcgcggaacgccaccggttattccaaaattagagttagagtttaagaatggtttgataacaacctaactatcattagatatactaaccaatagtttcctgagaataccctaaacctaactctttattatattgtttcacaacctccaatctgctggttatttactttcattttctttttattttactcattctcttctagcttaatcttgacactctactcattgtgtgaaagaagaactccgtgaattcgatcctaaaatactacaattgatctcttatttgagagagtagttctaggtaatttgaaccatatcaaatttggtgccgttgccggggttcttaggaatcatcattgagtttactcacgcgtttttgttttcttcttttctatgtttcaggtgtatgcctaggcaaacaaggagcacaaaacagaaggagcttatcaacttgtctgttctggacttggaaaaacttgaacgcaccaaccgaaaaactcagaaattagcaatggctgacagagtcatcagagctgatgcagaaggagttttgacagatgaggatgggcaagcctacaatgaggctggtcagagattggatgatcatggactcatcctacctgaggacgccaatgaggatcaagcgcgcctcaatgccaaatagctgccagagacgcagtagggctcgctgtcgatcgacataacagaggtgtcgatcgacaccatcgggagcagcacgacgacgcgattggtgtcgaacgacacaatagaggtgtcaatcgacaccaacaccagattcctgcagctattcctccagctacggaaccacgtc

SEQ ID NO: 161958 - DNA, 1051 bp, Arabidopsis thaliana landsberg
atggagcttttacgcgagttcccaatcggggactatgtcccggctttggcatggatagacaggatcagcggtttcaattctaagattgtgaaagtgagtcgagcgtatagtgatcttatggaaaaagtggtgcaagaacatttagaggcgggcgaacataaagcggatttcgtcaatatactgttatcaatcgaaaaagaaaagaataatggattcaaagttcaaagaaacgacataaaatttatgatcttggtaggatcattataagctaattcattgataactaacctagagttttcaagtttgagtaatgacatgcaacttttcatgacttgatatcaggatatgtttataggaggtatttcaccaagttcacctctactagaatggataatgacggagctgatcagaaatccagagtgtatgaagaaactccaaaacgagattcggtcaaccattaggccacatggttcatacataaaagaaaaagaagttgaaaatatgagatacttaaaagccgtgattaaagaggtgtttcgggtgcatcctcctcttccactaatacttcccagactattaactgaagatgtcaaagtaaagggatatgacatagccgcagggaccgaggtattcaattataacaattgaataattgaccatcatcttattccaatatatataacaaacgatttggctaaacttgtaatggaaacatttccaggtgttaatcaatgcttggtcaatccatagagaccccgcgatatggggaccggatgcagaagaattcaaaccagagagacacttagattcaactttggattatcatggacaagatttgaaatacatcccattcggatcaggtagaagaatttgtcccgggataaatcttgctatgggtttggtagaggttacattggccaaccttgtaggccgatttgactggagtgtcgatcctggaccaaatggggatcaacctgatctagctgaagattttggtctcgatgtttgtcgcaagaaccctctcattgcatttccatcttccgttgcatga

SEQ ID NO: 161959 - DNA, 445 bp, Arabidopsis thaliana landsberg
ggactcgaatccgatgagggggagatggctgagcatagcctgatccgggctggtccacgtgttgattccttcgacgtggaaccgcttgaagttcctggtgctccgagaaatgattacgaggtgattgatagtttcgtgtattagtgcatttcatatcaacatatatagtgatggactagcatgatgtgtgtcttcttaggttcttaaacagtacagtcactttttagctgtttttgccagagctcggatatcaactagaaagggccactgaatagggaagtaccataagagatcaagtcaaaattagtttagcaatatgtggaaattatggattaggaacaggaatcaggaatgctttgtgactagctagtgtgcgattcttccaagttgcagtgatggagatgggctcataaatctattttgtttgggatgttgttttgatctg

SEQ ID NO: 161960 - DNA, 2148 bp, Arabidopsis thaliana landsberg
gtaaaggcctatttgttaccaattgaatacttacatcaaatcaggcgatgtgcaatatgtgttatgcaggtgttcgatggatataataaccatgtggcagaagggaccaatgttctgatatgtattgagggctatcgtattgaagactggatgggcatcaaccgtaaggtgtgagaagcttattttagtcaagaataggaatctctgtttgacttactgagtatatagtatatcgtattctcgccattgtaccactatctggatgacgcagtttgtttcttaaatgataggttgatagtcgtggctgcattaatctatctggcattcttaaggtcacagaaggctatgggaaatctggtaatgtgatcctttcaatttctatatttttccggtgacattcctttttgatgatttgctgattgtctagcgtctttgtttctctacagtatcactctctgtaatgtctggtaatgaagttatcttctgtaaagagtcacaaattgatgaacgacagctaagacttgtaaccgaggtaaagattattttggcgcagtttggttttgtttcttgccaccaagcttttgtcaggaacttgtctctctactgacttctgatcctgaaattgtttgtgttgatcagctgcccgactgctgtgctgctggttcaaatcttacaaaccttattttcaaagtgacggattcagatggtgctatggatactcgtatccatcatgatgaaaaatctggatgtttccatacaatgagcattgaaactgattcaagcagcgatgagagtgcaatcagatatgcctttgtccatggttcctgcaaagttcctactctttccctacctgagagcgagggtgtcctttctttcaaggttttccattctagatttcccgagcttcatctgagcttaaaggtagtaatttgtggactgggttatcttacaatatgttctcaccatgagtagaaaatgcaggttgttgataacatgtcctcttaatttacagattcagctaacgcctgctcaaacatttgaaagagatgagatagggtgttctacaccttattcgaggatgagtttaacacctcaatcaaagatggcttcaactacaaattcacctgtggcttcaactgaacaaactccatgttcacagtttagagtcttggccattaaggcatcgccatcgactctcagtagccaaacaggcctgatagatatggcacagttcactgaggtatgtccatcaccatttaagccacaattgttgatctttacgtttcatttatgtcttagtttggtttctagaatgatcgaactttggttttccgagttaacatttcatttgaatgttcctgcagagcttaaaggaaaaactcattatatacagtgaacacagagtggaaatagatgagcgcctaaaatgtttggaagctgaacaaaaccaggctaaggaagagttgcgtaccttgcaaggttaactgttatcttggtttagatcatatattgtttatgttttctatactcatttgcagaagtttgataactatattgggggttgaagttgcattgatgctacacatttttgttgtttactgtgccctgtatttggtgtctacaacatagcccgcatctttaattctgaaaacactttaagcttaattttagagtttcacaaaatcgttattagaacatagtcttacttccacaattttctaagcaaagaatggtgagtgatagcacaaaccggcaatttttaactgttcatgttgcctttatctcagcttctctggaacctcttggtgctacgttcccagaatgcctatccaccaaagaatcaatgatgaaacagattgaagagaagcatcatattactgcagcatcggttttctgttgtttgtacagaaaggcaccgcctccaaagtctctgtttctgtcaaagaaaggagtgtttggccttgtagctcttcttggttcagtttcctccacctcccttagcaggtgacatcaactaatatgaagttcattgctcatgttgggctcaaaacttctgtatctgaagttatttggtatgcagggtgttgtctgaatatttgggagaagactgataggttacgggtgccgttggctggtgtgagaagaagg

SEQ ID NO: 161961 - DNA, 1354 bp, Arabidopsis thaliana landsberg
atggatcagaaccggagaaatcttgacggaagtggaattgagaatttgagagagttttggaagattcagagcttccattcgtttcttgttctcttccactcttttcagacgaacttcttcgtaagttgtttgtttttcgaccaccatttttgtttttctctgagtgaagataaaccctagctgacgactgttcggagctcaagtatttgaattgtctggcactgacttccagaaacaatggtcaaagagtcaaagcaggattatgataataccacatatatttgggcctatgtgggctgatgataaaacatagaatattaaattggaacctatgaacagtttaagcccaactagtaaaagcccacaaggagcccactcgcgatgtagaggaagagtctggtgacgaacaactttgtttcccggcgaagggaaaactgaaaaccagagatgtaatatctcacttgcgaatcaggttctctgatccttaccgtgaatgaggtgtatttgacggttaattaatcgattagcggcccaaatctatccgagagtctttctaggagctaattttaaccccattttcaggtatgattctaaaacaatttagtagctagagagatccttagctaaatagttgtttgaaattcctagtaggcgtttgttgtgaacgcaccccaccaaaagtgtgtgattactgaatttagaagttgcagtcttctagctaggaatagattactttgtagtccaggtttatgaagattgtcacacagtaattaagctgatttcaagagttgtgggacgtgagattgttttaatggatctgactaggtttaatctttttatgaataagattattggtagaacagtgactttggaaaattttacttgtgaggtgagaagctcgtgtcaaaaatgtaacaataagagtcataaatatgattctgacttgtgtggtggtgaataagtcaagatccagctcaaaagaggaaacttctgtcaagttgcctcagaaatatccaagaaacaatgaagcaatatctaggtaccagtgtaccactgagctaatactatattattttgtaatctgtaggaacttcatagcaacctctctctcagtttttttttttccagaatcacctcttttatggcttcttcatcctcttctcgtaacaggtcatatgatgttttcccgagcttcagcggagaagatgtccgcaagaccttcctcagccactttttaaaggaacttgataggaaactgatccttactttcaaagacaacgagatcgaaaaaaaccagtcactcggtcctaagcttaaacatgcaattaaagattccaaaatgtcggtggtagtg

SEQ ID NO: 161962 - DNA, 881 bp, Arabidopsis thaliana landsberg
atgatacgaagagtctccaccacctcatgtctctccgccacagcttttagatcatttaccaaatggtcctttaaatcttctcaatttcacggcgagtccctcgattcctctgtctcacctcttctcattcccggcttccacgtcttccattgtccggtacgtatatgaatccaataatcattgatgtctccccataatttcttttggtcctaatctaactgaatccagtttttctttttgaagtttaggatgtcgttgggattgtagcgaaactttcagattgtattgctgctaaaggaggtaacattcttggttatgatgtttttgttcctgagaacaagaacgtcttctactctagaaggtaaagcttccaattttcccatttgaaaaatcttacctttgatgttacttcaatagattctttctgaatcaatgtctttaaagtgaatactaaaagcttggagcagttaaaagtttctatttttgggtttagttgtgatgaaaaggtaatttctttgggcagtgagtttatatttgatccagtaaaatggccgaggaggcagatggatgaagattttcaaactattgcacaaaagtttagtgctttgagctcagtagtacgagtgccctctttagaccccaaatacaagatagctcttctactgtcgaaacaggtaaattttatgtcataaagaagatcctttttattctgtgccttctttttcctggagttgtgtgattcttttgtattgtaggatcattgtctggttgaaatgttacataaatggcaggatggaaaacttcccgttgatataacatgtgtgataaggtttgcatatatctcttccaacgaactaaatggatatattagttatgactag

SEQ ID NO: 161963 - DNA, 1112 bp, Arabidopsis thaliana landsberg
aagatccacaacaagaggaatgggtttgttcttagtcctattccccgaccacaacaacaacgactcttcttcttcttattctgcggcaaaaactaccttccgctccaaattatcctctcgtcttctcctctccaaggctgaatccacaatctcaagctgcatcatcctcctcttcctcactctcttcctcttcactctctctacattcgaagaaccttcctctcgttttcccgccatttcttctcctcaccggcgatttcttctcaaccgcaacatcatctctcgtcgtttcgctctacaaggaatgggtactctgtttctaagaggaaccaacagcatgcacgatgtaatcattgctcatatcgcttccgtttccaacggagaacgttctccgtctctttatacgggtgcttcaccggtccggagttacttcaaaatccgacgtcgttttactcttcaattcaccttcatccactacaatattcaccgagttgatcgaacaagagaacaactcgttcttaaagctcgttcatgttcatcggaatgattcgatgacatcatcatcatcatcatctgagcctgttatttgggggaagaagagtcgtcatcgagctaattataactcgaacgagctgactcatggctcgatagttggtttcgacgtaactgagttggatcctgaaaactcgttatccgggtttatggatcaagttccgttaagcttgaggagatgggcttgttacccaatgcttcttggtcgagtacgacgcagtttcaaacacgttatgcttgttgacgctaaaacttcatttttcatcggtgacccgtttacccggattcgtaaccggagccccgactcagtcctcttcttcttctcaaaacacaagaacgcctccgaggttaatccggagattttgatcggtggagctaaaggaatcaggagattgtcgagctccatgcatactgagattgtgagagcgacgatgatgaagaagaactcggttacggaagtaacggaatcggttgtgttgagtcaactcgtcgggaatgttcatatgacgaagaactttcaagtggttttaagtgagtcagtggtgccggaagcgaattag

SEQ ID NO: 161964 - DNA, 611 bp, Arabidopsis thaliana landsberg
ttctcgaatcttggggcgtttagtaaaggtaaagcggctggttataagttgatggagataattattcagttaccgacgataattcaagacccgttggatggaaaatgtttggaccaagttcatgggaacattgagtttaaagatgtgacttttagctatccttcacggcctgatgttatgatcttcagaaactttaatattttctttccttctgggaaaactgtggcggttgttggtgggagtggctctggaaagagtactgtagtttccctcattgagagattctatgatccaaacagcggtaatttgatcgaatttgttttttgctatttgagtctttggctagtgactggatcataactttgttcattttttcttgatgagcagggcaaattctgttggatggtgttgaaataaagactcttcagttgaagtttttgcgtgaacaaatcgggcttgtgaatcaagaacctgcgctctttgccactactatactagagaacatactctatggaaagcctgatgcaacaatggttgaagttgaagctgctgcttccgctgcgaatgcgcatagtttcattacattacttcctaaaggctacgacacacag

SEQ ID NO: 161965 - DNA, 1794 bp, Arabidopsis thaliana landsberg
cgaatcaaaattcaaatggcgggctaaacttcgattcagtctctctctttctctctttggtgatggaacaaattagcaacatcgctggtggagacacaacgaaagagactatggcgtctctgggtctcatctgtgagaaagacattcatgacagcgtctaaatcgattcttcatcgcttctcctttccggagatcgatgaactctttagtggagcgagctcaagccactgctcaaagccaaggtaaaatttaaaattcgcatagtaccactcagttccgtatgacccagatcgtaaatttcacacttttttacggtttaggctctgtctctctgaaattagggttttaaaatttcgacatcagactggtaaaattgagcggttctgtgaaatgtttctttgattttacagtggaactaatgaatttgaaagcggatctgagagaagcagaggatgagctagaaaaagtgttggcaggtattattacctcaaaagcttgaaactttgaacttagtttcttaaatcataagattctccttggtgttattttcatgcttacatacattgttttgctgagtttggatatcttactgtctttgggatgttatatgtttgatgtttagtgaaaacccgtaaagaggcacggcaaatggggataagagattccatttctgcaacacaatctaggattgaagtacttagaagaaatttgcagctacagaagtcaaagaaggatgattctgtgagaattatctcccaacagttgcaaggtatcgttatataattctgaagttcattatacatacaagtttcatgagtcagctacatgctttgggattttgtaaagtgaagatatctataaaaagtactctgcttgtttcaataagagatcacatgaatcactgaagaccaagctaacatatttcttccaataaagccttgtcaacatcgaaggacaacgctggtaaagtcaccgaagacaaagcagatattcatgaagcaatctcttggtataatcatgctctcggttttcacgttgaagctggacatggtaatagagacattttgagtttgtaacaatcttagttctatattactaaaccttagccctaaaagagctttgttgttttaacttctcttacaggagttaaattcacattcaccaacattgatgcaaaaaggccgacccgcgaattttcgttcacagttcactatggaaatgacatctacacacgtgagtatatatatgtcttcttgaagcaagcatcaactacattataatgtttacaaaaaaacctagtaatatgaactgtttacaatcgtttacttatatgatcatcagtattggatagcgatctgcaattggattacatcaacgagatggttcaagaattgaataaaaccaatgaccttttcagatttgttcgtctgatgagggagcagtttctgaaatccactttatctggtaaattgtctcaagcctatccttttataacctctatctccataagtgagaaatcttattttcgatatatataaaagttgaatatgaccaagacttgtgttttattggattttgtcagagctgccaacacattcaggacaactgcaacaggaaacgtctgccatatctgcttcagctccagctatatcattttccactgatacaaacatgtcaactccagaaaacaaaagatctaaggttcaagtgaatcggcgacaaaaaagaggtagcgaatcaccactcctagctccggtatccacatctgccactcgccgttcttctcgctttaag

SEQ ID NO: 161966 - DNA, 739 bp, Arabidopsis thaliana landsberg
atgcgaaagcacaacggaagtaagttcttacttcattggcataattgcattatacatttgctattcaaagaaagtagtagaaaacttttgttcccattaagataaagattttgagatacaaaacataaagggtattttcgtctttctaatgtcaaatccccggaggagcgttatccaatggagaaccaatatggctttgccacgctgaaaccgtcgatagcgaagtcttcactcgttctcttctagctaaagtaagtttgtttgaattggaaacgctgacgctagaattcacgaacgctttatctgaaaacgctcttttttttttttttttcgttgggcgttttgctcttaaagagtgcttcgcttcagacagtggtttgtttcccgtttcttggaggagtccttgagattggcacgaccgaacatgtaagcctatatttccttttttttttccaacactatcaaaacattcttaaaagtacccaaaacttatcttttgttcttttagattaaagaggacatgaacgtgatacaaagtgttaagacgttgttccttgaagctcctccatatactacaatatcgacaagatcagactatcaagaaatttttgatcccttaagtgacgataaatacactccggtgtttataaccgaagcttttccaacaacttctactagcgggtttgagcaagaacctgaggatcatgattcgttcatcaacgatggtggtgcgtctcag

SEQ ID NO: 161967 - DNA, 808 bp, Arabidopsis thaliana landsberg
aaaaaacaaacaacccgaactgtctcctgcaccattgctcttaaaacctctctccgacacgaatccctccaaccctgcttcaccaccggaacattgagaaatattctcggtgacactgaggttgaaaaacccaatcgaaccgcagacgtaccaggaatcgaaccatgtattaacgccattgaaaaagtgaaaaacgaaatattgagaatttgtttgctttggacacgtgtccgcctctctcattttaatttagttttgattaatttttcatcgaaaatatcaagagagcctcacaaaaattgcattacagcctcccattggaggtgctctaaataccccatagcaaaacaagctgctcagaaacactttgtttttaccaaaaaataaagctggtaagttgttggtaagtacataagagtcgggtcagtccaattgataagggattttacttttcttgcaaagaaaaacaaaatatcaagttatctagactggattataaaaaaaaaaaatctcatatgtatatgtaattatgtatacacaaaataaataaaattttcattcttttcttacaaactcttgacgtttctcatctttcataaccagtgctacatgtagcaagtccagaccaaaacatatatagttcaactaagtaaaaaaagaaaattaacgtgctataccagaaattagatgcatctcgtgaaaagagtatgaatactaataacaagagccgttgcggttgcagtttagagggccagcgtctgcagttaaagaagaaaccaagtttccgggagcgactgtgaatcgctga

SEQ ID NO: 161968 - DNA, 236 bp, Arabidopsis thaliana landsberg
atgatcaatccggttccaaagaatgaacctctttccctcgaaatgaatgactcattgattgttatatcagagcttgaaggagaccaacccatcacactatgaaaatatatacaatctcatataccacatatgttatagtttcttacacaccaagcgacattgggcaaggagactgactcacaaatgcaaacaccaaataagtcgttgaatttgtacaaagaaacaaatcctttgac

SEQ ID NO: 161969 - DNA, 4214 bp, Arabidopsis thaliana landsberg
cttcttcacagtcacgcctcacgagtcatgattgtcgccgtcgtctctttgataaaggcaaaaattgaggaaccctaataaaaaaatggagcgcactacgagaacgtcgtcgagggagaatcaaatttcgagattcaattgaatgtaaagaacgccggagacagagaggggagaaataaaatgagttagcaatttaaaatgtaaagaaaaaaatggtggttcaagctgagtacgagccagcggaccatagtggatttgtgtggcgtcgaaccgttgtccgtccactgctgagagcgggaggtagtcgctgctctgtgaagccagcctaacgcaataccctcaacctttagcaaccgtacggaccaaaccttcgattggttcgtatggttcactcacagcttggactgggcggtctagaactatgccaacaacaaatccgacccgtgggccgatccagtgttccaccatcttacagtccccacttgggttacaagctctcgttacatagctcgacgttaagaagttgatttaatgagatatataaacaagacaaattatgagtagaggaaccgatgtgggatattggagaagtttcattgtcccacgattagataaattatcgaccaaaacttatatgtagataattacattttaacattgataccaaaaaaaagaagaagataattacatttttcttattagacatatcagtttttggtaattgtgaaggatgctttgactccatcaaacctcaatacaaaaaatctttgtaagtcaaagatttaatgatgaaaattaaccaaagcaaacactgaaacttgtgatagagagtagagattcttccattttcttattttttgtatgatttttttgtaggataagttacataaagcatacaatgggaagaagaaacatagcaccgccctctgttttccttgttcttctctgttttttcctctacatctctttcgtttccgagccctcaaacgcccagtctttgccggcgtttgcctgcaacgttgcaggaaacccttctctcgctgcctttgggttttgcaacaccacactaaacattgaaacccgagttgcggatctcgtcgggagactaacgttgcaagagaaaataaggtttttggggagcagtggaaatggcgcgagccgtttggggattccaacatatgaatggtgggcagaggcacttcacggcgtatcctacatcggaccggccactcgtttcaccgagctagtccctagtgccacatgcttccctcaagttattctcactgccgcttctttcaatgtctctttgttcaaggccattggcaaggtacaagaataacataaaatcacattttcaaaaccattaacagtacgttagatgatgtttgctttcattgaattaactctcattttatgatatggtttaaggctgtgtcaacggaggcgagggcaatgtacaatgtgggactggccggattaacgtactggtcaccgaatgtgaacatttttcgagacccaagatggggaagaggacaagagactcccggtgaggacccaacactctcgagcaatacgctgtggcctacgttaaaggtcttcaggagactgaaggtggagatcctaaccgtctaaaagtcgctgcttgctgcaaacactcaaccgcctatgaccttgaaaaatggaaaggagtttcacgttacactttcaacgccgtggtaaaaactttcaaacacttatacagtttgatatttggtccgactccgaccaaactacatttggatgatctctcctaattgtttggtgtattgggttaggtgacgcaacaagatttggatgatacatacaacgcaccatttaagagctgtgtgattgacgggaatgtggctagtgtcatgtgttcttacaaccaagttaatggtaaacccacttgcgcggatcctgatttgctttccggtctaatccgcggtcaatggaaattaaacgggtaagagtagaaaaagtggtctctaaataacatatctaattctatgttgcgatttttcatttacgggtttgttttaggtacattgtttcggattgcgattcattaggtattttgtatggttcacaacactataccaagactccagaggaagcagcagctaaatctatactggcaggtttggatctaaattgtggttctttcttgggtaaccacacagaaaatgcggtcaaggaggggctgatcgacgaagcagctattaacaaagcaatttcaaacaattttgcgaccctgatgcgtttaggattctttgacggtaaccccaagaatcagccctatggtggtttgggtcccaaggacgtgtgcacggttgaacaccgagaactagctgcagaaaccgcaaggcaaggcattgtcttgctcaagaactcagctggttcgctaccgctctctccttccgccatcaagacgttggccgtaatgggaccaaatgctaatgtcacaaaaactatgataggaaattacgaaggtgaattcataacttatatcaaattaattttaaactcaaacctcgaacgtggatcaaatataattgttatgttttcaggcgtggcttgcaagtatacaacaccgcttcaaggacttgagaggacggtgttgaccacaaagtatcatcgtggctgtttcaacgtgacttgcaccgaggcggatttagattcagccaagactctagcggcatctgcagatgcgacggtgttagtaatgggagctgatcaatccattgagaaagaaacattagatcgcatagacttgaatcttcccggaaaacaacaagagcttgtgactcaggtggctaaggtggcgaaaggacaggtggtgctagtcataatgtccggtggaggatttgacataacattcgccaagaacgatgagaagatcacaagcattatgtgggtcggatatcctggtgaagccggtggtctcgccatttctgacgttatcttcggtcgtcataatccgagtaagactctgttctccgatttgaaccagtgattatcgaccggtttggttttatgattgtcattttcataaccggtgatttttttatctgttaggcgggaaattaccgatgacgtggtatcctcagtcatacgtggagaaagttcctatgacgaatatgaacatgagacccgacaaagcaaacgggtatccgggtcggactttcagattttacaccggagaaaccgtttacgccttcggagatgggctcagttacactaatttcagtcaccagcttattaaagctcccaaactcgtctctctcaatcttgacgagagccaatcctgtcgatcgccggaatgtcaatctttggacgcgatcggaccacactgcgagaaagccgtcggtggaagatcggattttgaggtttaattgaaggtaaggaatgtcggagacagagaggggactcagacagtgtttctgttcacgacgccgccggaggtacacggatcgcagaggaagcaacttctagggttcgagaagattcgtttaggaaagaaggaagagacggtggttaggtttaaggtcgatgtgtgtaaggatctgagtgtggttgatgagatcggaaagaggaaactcgcgttgggtcatcatcttcttcatgtgggtagcttgaaacattccttgaatattagcgtgtaacaatagggactgatatggtgaatttattttttaatggtcaatgtttaaaaggaataaaatttcgagggcttaaaaaggaaaataatatattattttggtaccaaatcgcttcctggacgattggtttccatttcaaattaaattgactaaattacccttttgacaaatttttaaaagttcatagttactagtcttttggttttcttcttctcagttacgtctcacgagtcgtgattgtcgccgttaacggtatctttgccgccgtcgtctctttgataaaggcgttaggttacggaccctaataaaaaaatggtacttgtctcacttttaaattaataaacaaattttaaaaagagaacgacgaccttcgaggaattttataatgaataaaaaggagcagatactacgagaactcactttttctgattccaactgggttttaatttcttactttaggggaaaaagtttcgatctttcttctcttcaattgggtgctttttttttgttggtaggcattgggtttaagcagtg

SEQ ID NO: 161970 - DNA, 3858 bp, Arabidopsis thaliana landsberg
gggatggcagaaaggccagcttggtcatggtgacaatgatacaaaactacttcccgagtgtgtaatttcattgacgaatgaaaatatctgccaagttgcctgcggacatagtctcactgtttctcttacatccagaggacatgtgtatacaatgggtagcacggcttatggacagcttggtaatcctaccgccaagggaaattttcctgagcgtgttgaaggagacattgtagaggcttctgtggaggagattgcatgtggttcttatcatgttgcagttttgacatctaaatcagaaatttacacatggggaaagggattaaatggccagttaggccatggaaacgttgagaacaaaagagaacctgcggttgtgggttttctgagagaaaaacaagtgaaggctataacatgtggatcaaactttactgctgtgatttgtgttcacaaatgggtacctggctctgaacattctctatgtgctggttgccgcaatcccttcaactttagaagaaaacgccacaactgttacaactgtggtctggtattttgtaaagtatgcagtagtaggaagtctctgcgagctgctctggcacctgacatgaacaaaccatatcgagtgtgttacggatgtttcaccaagctgaaaaagtcgagagaatcatctccttctacgccaacttcacggaccagaaaacttttgaacaagcggaaatcgacagatgtttcagaaagagacagcttaactcaaaagtttctttcagtgaacgccagactatcgtctgctgactcttcattgcattacagtgaaagaaggcaccacagacgagacttaaaaccggaagtaaataacagtaatgtcttcccttccatgaatggcagtttacagcccgttggttcgccattttccaaaggatcaacagctttgcctaaaatccccaagaatatgatggttaaaattcctggttccggaatgagctctcgcacaacatccccagtttcagtaaagtcaactagtccacgtcgatcttatgaagtagcagctgcggaatctaaacaattaaaagacagttttaatcaagatatggctggtctaaaggaacaggtatacatcatctattgtcagctgtaaatcacatcaaagcaaaaatgcttctagactaaaaacatgcatctatccactgaacattgtaggtagaacaacttgcttcgaaagctcaccaacttgaagaggaactcgaaaaaaccaaaaggcagttaaaagttgtgactgcaatggcagcagatgaagcagaggaaaacagatctgcaaaggaggttataagatctctaaccactcaggtttgaaaatttccagactctactacacatgtttgtctcttatatctatttctcattatgttactatggttttcgcagttgaaggaaatggcagaaaaacaatctcaaaaggatagtattagcactaactcaaagcacacagacaaagagaaatcagagactgtaactcaggctagtaatcaaacacatataagaagcatggtttctcaagatagtcaaaatgagaacaatctaacaagtaagagcttcgctaatgggcataggaaacagaatgataaaccagaaaaggttgtgcaagacgaaccaggagtgtatttaacgttgttgtctttacctggtggtggtactgaactcaagcgtgttcgcttcaggtatatgatttgcttcttatctccacaacatgacatatcatgttacatctcgttgaagctcgctaagactttgtttttttggctgcagccggaaacaatttaccgaagaacaagcggagaagtggtggggtgaaaatggagctaaagtgtgtgagcgccacaacattcttgtttcttaggactcctatgtcttcttcaatagagagagagactaacaaagataaggaaaagatagtgacatatagaataaatagagacatggatgcagattttttatttggaacatgatgtttttctgctgttcatagaaaaaaatgtttgatgtaaattatatattccattcaaatttttgtcttagtattttttatttccttatgataaacaaatatcgaatcagagcaagtacttcattgtcatggttgactcaaaaggtcaatcatcacaactaagaaaacagaacaaatctaattttcgatttttccaaaaaatattatctgactgttttagaaaagaaaaaaataccaatttatgatgttggtaatggtaattgactaattgttacaaacaaatatttaagaaaaatccccaaccgcagagaaacccttcatcttccatcatctttcttattcaatctgcaaaaattccaaggtatgtggttgtaatttttattttttacatactaaaaaatctttgttaatcttcttatctttgatttgaaagttttacattttggtgtttaaattcgtcaattgttattttttttttccaaaagcttgatgcttacacgtccttcatgtttctccaacaaaccctaatttcggtataacatgacgaaatcctcaattcgtgtgtgtgtatgttgcagattcatggctacaacaagacttaacccctcttgccactttccagcgagcacaagactctcttgcgagagctatctcggtctgagaacgaccgggaggattagttatgcccgaaccctaactgctccacgtggctatcttgctgtaaaagcaaacggtggtcaagcttccgtggtgactgcggcggctataacggagaagcaacaaaagaagtatccaggagaatcaaagggttttgtggaggagatgagattcgtggcgatgagattgcatacgaaagatcaagcaagggaaggagaaaaagaatctagatctccagaggaaggtccggtggcgaaatgggagccgactgtggaaggatacttacattttcttgtggatagtaagttggtttacgacacgcttgatgggatcattgatggatccaatttcccaacttgtgagtttttttttacttcatatgaattgaagtgttgtgttgattgtgtttagatccttaataaatgttttggacttgatttgcattcaaatgtcagaccaattttctaggatcatatgcacacacacatagaataagttcttgaaacagtcttagagagattacagtttgcaaatgtaggtcctttttcttgtgtaacattgtcaaaatctctgtttttgttgtgtagatgctggtttcaagaacacgggattagaaagagcagagagtttgcggaaagatttggagtggttcaaggaacaaggttatgagattccagagccaatggctcctggtaaaacatattctgagtatttaaaagatttagcagagaatgatcctcaagcattcatttgtcacttctacaacatttactttgctcatagcgccggtggccaaatgattggaacaaaggtaaagaaaacaactttaggtactatattcatttggaagttggaatattttctgaaagtttacgagttatgcaggtatctaagaagatactcaataataaagaacttgagttctataaatgggacggtcaactttctcagttgttgcaaaatgtgaggcaaaaactgaacaaagttgcagaggtattgaactttacactactgtattgaacaaagaagattaacgtttgtgtattctaatagctaatgtggatatttgaatgggcagtggtggacaagagaagaaaagagtcattgcttggaagagactgagaaatcgtttaagttttcaggggagattcttcgactcatattgtcctgatttgattcataaactcttcagatcttcaata

SEQ ID NO: 161971 - DNA, 533 bp, Arabidopsis thaliana landsberg
cgatatatcgaatgcagggggcacaaacagagaatgaaatggtgaatcaacctcatcctaatcgtcttaactctgttatagccaagattgagagactttatatggtaccttttcttactactgtttctattgattatctgaacaagtaagatgaatgtttgatttcttattcggaacatttttcataccatgcattagcactggttttgcaacagatttctgattagcgtatacttcataaaataaatttcagggtaaagacggtagtgatggggaagagttagacggtgctcctgacgatgatgactatgacactgaagattcatttatcgatgatgctgaattggttagtgtagatatcctgactatggctttcttatgtgatcaaagtgtatcttgatagctgagacatccttctttctttctttcttttttcccattgtaggatgagtattttgaagttgataattcgccaattaaacatgatggattttttgtcaatagaggaaagttagaacgaatgtaagtttttt

SEQ ID NO: 161972 - DNA, 1003 bp, Arabidopsis thaliana landsberg
atgatcaagacctccaacgacgacgtttccagactcaagatcgtcgtcttcagctacgaatatgattcttgggacgataacgccacggtctctaaacgatgcgtttgcgtttgcgtttgcggcggaggcagagaagcggaggcgtgaggcgcggcaacagatgtaagaagagagaatgattgtggagataagaacgaggaaacctagagctatggctatggagtagccaaggccgaggctagttatataggtagggatagggacaggaggtggaggagggaagacgacgagggtggcggttgacatttgatggtgaagaaagaggttagggccatgtgggattggcgtcgatggcaaaaaagagtgatggagagattattattggtgtatttatttttttggtgttttggggaggtgggtggggaaatgtagctacggcattgaatacaatgtttggcaaaatattaatagctttgcatttattaggttttcttgttatacgttttgtgaatagtgacttcacttagtagtgtggcccaagggaggtcaagtttttctagtcttatttagtttaaatgcttgagccgtatgacattgacatgtgtgatattttgttgttgtttacctctagctattttcgtttcatcattcaacattttattgagcaatgagcagatagtaacagtatctcacgacttctaagttcattctattttacagtttccggaaataaaaaaacagaaagcaaaaaaagactccgttgccgggactcgaacccgggtctctcgggtgagagccgagtatcctgaccagctagactacaacggatttgtgatcgatttcttagctcaaattatatgaaacttaacaagaattgactcaaagaatagagaacacgaaggacttgttgtacttgattaaactagtctctttcggctttatgtctagttcttgtggtccatctattccggcagaaattatgattcttggattaaaagatcct

SEQ ID NO: 161973 - DNA, 639 bp, Arabidopsis thaliana landsberg; identical to SEQ ID NO: 1602
  unsure (1)..(639): unsure at all n locations

SEQ ID NO: 161974 - DNA, 829 bp, Arabidopsis thaliana landsberg
aaccaaatggtagtgaaaacttaaatcagaacaatcaaaatggagtcacggaagattaaagtaatggcgacagcaatagctttaataatggtggctatggtggtggatgccgccggagctgataaagggaaagacaaggaagagtgtacggcgcagctggtgggtatggccacatgtcttccttacgtgcaaggacaggcaaaatctccgacgccagactgttgctccggcctcaaacaagttattaattccgacatgaagtgtctttgtgtgatcatccaagagaggaatgatcctgatttgggtctccaggtcaacgtctctctcgctctcgctcttccttctgtttgccacgccactgctgacatcactaagtgccctggttcgtagctttacctctctctagcattttacgatatattcttcgttacgtgcggtctggttaaaacagagtatgtatagacattttaaacaaacaagtgaaaatttattatagactaatattagcagactagtaatatttttgggatgggtgttcggtttcagctttgcttcacttggacccaaattctccggatgcccaagtattctatcagctagctaaaggtctgaacgaaacaggcccagcctctgctcccactggctcggcctctgagcccactagtatgtcttcgaccccaggatccagtgctggtaacaacagtggtcggacgacctctgtgccaggcacgaaccacgctcaaagcttctccaaacaatggctagggctcgaagttgttgcccatttcttcgtaattttttatattttcatcctcgtttagataagtga

SEQ ID NO: 161975 - DNA, 1160 bp, Arabidopsis thaliana landsberg
acgaaaaggcttcgagttttgtaatttcttcttctgttacaagttcttttcactgtgaaagtaattcttcaatggcgaaagacggacctaattgggatggtttgcttaagtggagtctctctcacgccgacggtactcgacccactcgccagttgaggtacggacattcatcttgtagttggttttttaggttctgtcttttgatttgtctgaaactgatgggatgcttggtgggtagtttaggtatctgtgtggctatgattgagctttcacttgaggagatgaatcttatgagtgaattcgaatctgggtttgtttaaagtagttttcttttttgaagatatctgttcagttcatcggtttggttaagattcaattatcgaattctgctgttgtgtaggtgaaaggttatctattttctcgtttttacatgaaactctgttaattttttttaagggaattcacgatttgttcatgtcaaatcattctgtatgtgttttattgtggattgttttgttgatttgagttgttttaatgagacagtgaggaggatcgaaaatggtttatggaggctatgcaatcgcagactgtagatgtagtcaaacgcatgaaggagattacactagttatgcaaacacctgaacaagttttggtggaacatggagtaacacctgaagatatccaaggtgcgtaatttgtggctataatacatagcttagatctttatcttttgccattgtgtgtagggtactaattgagtttattattctggtagatttgctggatgagctgcaagagcacgttgaatcgatcgatatggctaacggtacattatctctaacttggactttgctttttttttttttttttttttcctgttctggttagctcaatttgaacattgcttgtaacaacttgtttacttactattgtgtagatcttcattcaattggaggcttggttcctcttcttagtttccttaaaaactctcatgctaatattcgggcaaaagctgcggatgtcgttagcacaatagttcagaacaatcctagaagtcaggaacttgttatggaaaccaatgctctggagtcattgctctcgaatttcacttcagacactgatattcacgctcgaacccagggctcttggcgcaatatcat

SEQ ID NO: 161976 - DNA, 729 bp, Arabidopsis thaliana landsberg
tgggaatctagaatgcttcttcagctattatgaagctctaggaaatatggacatgagcctgcactcaatggaagttgtgaataggctcacaactgcagttgaacttcccaaggacttcatacggatgtacatcactaattgcatatcgtcttgtgagaacgctaaggtattaaaacaaagcgtccttttgatttcccgttaggtacttaaaacaaagctttctatgagtatccataacgccatcctataatcttgtgtgaaaaaacttctgcttgtgctttgcattatgtgctttgtgtatatgattctcggatttgttgatttcaatgtagttgttttgttaacggtatagtgatatattgttttcgatctgtagcagcaagacaaatacatgcagaataggcttgtacggcttgtttgcgtcttcttgcaaagcttaattcgtaacaagatcatcaacggtatgcattctctgtttctgactgattgctatcaaattaggcgttttgctttgctaataacacagaaagatcactagatacattcacagaggaagcttttatagtctattagtatgatgtacaattgtgggtgatatatgttttttttgggtaaaaaatgtaacagtgaaggatctattcatagaagttcaagctttctgcattgagttttctcgggttcgagaagcagctggtctcttcaggcttttaaacaatgagcaagaagtac

SEQ ID NO: 161977 - DNA, 396 bp, Arabidopsis thaliana landsberg
gcccaaggagaatggaaacaaccaaatcttgaatccgtcttcactaacaccggttattttcgttaggttgcagagcctatcaaattcatccaagtggtcgagtggatcttccataggcagaccataaaacttgttcctctgaatcatcgagatgagatcactcttaatcacgaagatgttgttctggatagcaggaggtgcaattcctttcctctaacggtgatctcgtggtgcatctccagcaccaatgttcgcgggtccattttgttgattttattcatctgccattttgagtggttgctggtgtacaaggttaactgtctttctcctttcccgtagttcgcgagctatacggtcgatgttatcgttgaaaagaaggttctggttgtcggttga

SEQ ID NO: 161978 - DNA, 732 bp, Arabidopsis thaliana landsberg
gtcttggattctaaagaagaatcattgaatatcggtacaccaacttcgggagattctcagagaatcaaagagacccaaacaattgtaattttgaagcctgaaccaaataccttggatgttggatcatcgcctggaacaccttctacagacaacaaggccaaaaatgagaaattcagttctcgctttagtctcagtagaatcagaagaagactaaagtttgcggttggaaagaatccatgcaatgctcaacatgactctgatcctgatcctgatgcagatgcattgtcgtctagcatgagtcaaaactgttgtttgggagaagagatagagaccaatcccgggtcggatggagaaatcttgcctgacattgcttcaaaaggtgaggctaataaagaggatactttccatgaaagtgaaaaagattccaagaagagtatgtgtggcatatacagtgctgccaagagacacctgtctgaaatgcttgcagaaggagacatagatgctgacttaccggataaagaagtaccaagaatccttgggaagattcttgctctccctgagttcttcacaccagaaaacagtcctagagtgaccttggcacttgatcatcagataatcgaaaaaccaaatattcagcaatgcagttcaaaagattactactatgagccacttcgactggattcaaacaaccatgaagaaacagagtttatgccagttccggaaggtgattaa

SEQ ID NO: 161979 - DNA, 151 bp, Arabidopsis thaliana landsberg
tttcagatatgtgataatcagccaggcatcctcaagcatacgccggtatcccccaacggaactcactcagatatccatagccctctcctagttttacgtgcgtagggcttagtatctgccatggctcctgatgcttctactgctcttgcag

SEQ ID NO: 161980 - DNA, 697 bp, Arabidopsis thaliana landsberg
cctaaccccacccccaaaaccttcgattattactgaaacgccactgctctctcgccgggattccggtgaagaggaggagatggatgtcggagtttcaccggcgaagtctatacttgcgaaacctctgaagctactcactgaagaggacatttctcagctcactcgcgaagactgccgcaaattcctcaaagacaaaggtttcttcttcttctacctttctccatagtcttgtttccttctccgatttgcagcggaagtcaaattttgaaattctctactctgtcggagcttttttttgcttgtttattctgagaatggaggctgacacatgtcgaaataggaatgcgaagaccgtcgtggaacaaatctcaggcgatccagcaagttttatctcttaaagctctctatgagcctggagacgattccggcgccggtatcttccgcaagatcctcgtttctcagccagtaaatccgcctcgcgtgagatatttacttcgattttgcttctatttctcgtttaaactcacagattgaaaaaagtgaaaatctaagttgccttgtttgttctgatatctacaggtcacaacaacgtttattgagccaagcaacgagctggaagcttgtggccgggtttcttatccggaagataacggcgcgtgccatagaatggattctccaagatcagctgagttttccg

SEQ ID NO: 161981 - DNA, 1527 bp, Arabidopsis thaliana landsberg
  unsure (1)..(1527): unsure at all n locations
cgtccattgcagcgacaacatttttccgattacgtctacgatggtgcttattaaatccctttaccgaactgcttcgacggcctccatcgctacactttggtcttctagatccgccgcctctagtcacttattgcgcaatcgtttcctctccacgcgaggattctttgctgtttcttcttcacctccttccaatcgaactcccatttgttagtgatttttaaatcgttgcctctttcgtttttccgatgaatgcaactgtatagttaccaaacattgcaatcttatcttccaaaatttcactctgtatagctttagaggatcctcgaattcattctgagatacctttcattaggtattattcgatttgtgtagagattgcaaaatcgttacctcctatttatatttgacggtgaaatgttcagatatgcagtatccttgtgcaatgtgcattggacaagtccggagatttagcgaagatgtatctcacatgcttgaaatgaaaaactctgatgttctgaatgcatttaaagatttgatggctgcagattgggctgagcttccttctgctggtggtcacgatgcgaaaagcgcgatatcgaaaaacacagaggacgaggcaggacaagaggctttgaaatatgtgttccgagcagctgaagctgtagaggaatttggtgggattctcacttcgattaagatggaaatcgatgatagcattggaatgagtggggaggtttgttgtttgtctcacttagtttggcgtttattgattgtttgatgtttagtgattttgtatgttgtgtgcagggtgtgaagcccttaccgaatgatnnnnnnnnnnnnnnnnnnnnnnnnnnnnnnnnnnnnttgactaccttgattcctttgaacctgaagaagtatatttgaagaagaaggttgagatggagttggggacaaagatgatccacttgaagacgagatgcagcgggcttggttctgaatggggaaaggtaatcaaatcagatctttctctttgattctaagaacctagactctcaaaacatgtactctggtgatttgcatctttgatagcaacatataatcctgagtttgcataattatcgactagttcaaccatctttctttcaaccttcatgcatctttaggctatctgaatcaaatcatatagaaatttgcagacaccaatgttttcattaagacgaaaccactgaaccagtacttgtttttctaatgctttgttttaatttcttctctaggttactgttcttggaacctcaggactctcgggatcttacgtggagcaaagggcataaaatggaaagagaagatcttagatacaagcaaaacttgttatgttgttaacacataatcaaggtcaatctgaccaaaagacctttaaggtgagtttgttcattgtttcctccaaacgaagctttcaaatttagagcttaacacagctccaacaattttaacaggcttctgttcattcattacagtttccttacatgagatatcttttgttta

SEQ ID NO: 161982 - DNA, 714 bp, Arabidopsis thaliana landsberg
atggaacttgtgtcgttgggagtagaaaagctttgggacagactgagccaagaatatgaccaatttaaaggggtcgaagatcaagtaactgaactgaaaagtaatctaaacttgttgaagtcgtttttaaaagatgcagatgccacgaaacatacgaataagatggtgcgacactgtgtggaagagatcaaagaaattgtttatgacgcggaggatataattgaaacgtgtattcttaaggaaaacgttggaaaacaaagtggcgtcatgaggcgtatcaaaagatttgcttccacctttgtggatcgaagggaactggcgtccgatattagaggcataagtaagaggatctcaaaggtgattctagatatgaagagatttaaagtacaacagatgattgccgatggcagttcgtcttcacgtccactacaagagagagaaagggatatgcgacaagagtttgctagggattatgaatgcaattttgtggggttggaagcaaatgttaagaaattggttggatatttggtggaggaagatgacattcaaattgtttcagtaaccgggatgggtggtcttggtaaaaccaccgttgctagacaagtctttaaccacgaggatgtgaaacatcattttgatggactcgcatgggtgtgtgtttcacaagattttacccggaagaatgtgtggcaagctatctttaggaatctcaga

SEQ ID NO: 161983 - DNA, 1148 bp, Arabidopsis thaliana landsberg
gaagttgataagcttcgtcccattccgtttgataaagtgtttcagtttgaaagattcaactctctctgttcagggtttgtgcggctttctcggttctcggatgttaaaaacagagcacaagtgtttgatctagagaaaggtagtggaagaagatggacggttataagagacttggaacacttgaaacaatccgctcgtaaagagtccatcgatgagtttgaagtgatccgtctcatagggaaaaacccgttcttgtggcacgatcattggcctgttgaagactatgctaaggtctttgagtgtatggtggtggttgatgaaatctcaagagaagcagataaggttgtgatgaaaatccgagaagcaggtgaggcagaaagggcaaaactcgcatcgaaaaccgaaatcctcggtccggtaccttttgttgcggttcacatgagaatagagatagattggatgatacattgtaagaaactagagcaacggaaaaagatctcagagatttgtagtagtaaaagagagattttggacagagtagggaacatttcaggtttaaagactccaacagttctttaccttgcagtagcagatactctcttagaagaaaaagaagaagattcatcggttttaagtggttggagagacggtttaataccatttgagaagaagaagcttggggttaaagaggagatatatgggaagtattcatatttgatacaatcggctatagattacgaggtgtgtttaagagcggatgtttttgttggtaatagcttttcgactttctctagtctcattgttcttgagaggacacagaaagcgagaaggttagggtttatgagttcttgtaaagatggtggaaacaagtggagatcttatgcatataatctggctggtgaatcaaacggagttccaaggagatggatgacaaatatgactcattcgagcttgcaagctattagctatggctcaaattctgtttcttgttctagtggatgaactggcattttaggtctagttttttttggcttttctatacaattcgtttatttgtggggtaaaaaaaagttgtgtaaattttacaggaaaaagacccctgcttagatcttctttttagtttttataaataatctgtccttctgttc

SEQ ID NO: 161984 - DNA, 2458 bp, Arabidopsis thaliana landsberg
gtgacgagaagagtgtcgatcgacagaagcggctccaaccagatccatttacgcaccgccttggaaggcgaggaggcagcatcaatcctccaccaccactccacccacatcctgaactccgccaagttaagctattgactcaaaacaagcgcttagtgggaggcaacccgttggttagatttttcttttccttttcttttcttttcttttcttttatttttgattttattttcccgctttctctggatttgaatgccactggggacactatcgtttaagtctgggggaggttcgtactaatgatgcttttatttttgtttcttattttgcagttattttggttatttcttttattttctttcaaaaaaaaaaaaaaaaaaaaaccgttttctttagtttagttaggaatcatgatctatatttctcttgtttattgcctgattgatgagtgttgtaggttcgagtcaatctgactaatggaaaatctagatggcaaaccaacaaacttgaggatatcctagtttctaactcaaccactaaggctggagctaatctcactgctcttccttttacctcttcaaacagttagtattcatagatcttgactccttgttcataccggatattgagaccaatgtgataaaaagaatatgttcctctcctgttataaaaagaaaaaaaaaaatataatgagagattgaaacaacttgcagatagtgtataggggtaggaatgtttcctatgaccccattattatatattatttggaatgatcaattacaaaggtatgaaaatgccgagggtgtcgatccagtatgcgagttcccctttgtttactctctaaaaagaataagtctgggagagaaagaacaacgaaaaagaaaaaaaaaaaatatatatatatatatatatatatatatatatatatatatatatataaagaatggtcaatttatcatggtatagtacaggaatgagtatagaaggatcttgaatgctggcttgtttgatgagacccaacgatgaaagcctggtgagtatagttgtggaacttaggtatggaatctagaatattgtgtaagctttcagagaagtacattttggttaggatttggttagacttgttacgcatatggacttagtttgaatgatcatggcaataggctagagaatgttgggagttcctttgttttcaaaaccttttccacgggttcggcttttgtgttttgcttgagggcaagcaaaagctaagtctgggggagttgatataacccgattttcaatgattttatctatgttttaggtataagattttgagtctttttgttatttctcgagtctttttagtgtcttttcaggtattttatgcaatgggacaacaatcgagataatgagacattttggagcaaaagctaaggaaaaggaaggtaaggacgatttttgtttaggaatcagcgaggagtgtcgattgacacactcttggtgtagatcgacaccagttttggcccaacaaaaaccctaggcgctttcaagtttacagaagttcaaatttgcccgaggagacttccctatttgcattattagtctgtggacgtttttagggtctatatagattgtttttagacctaagtttcttttatcaagttctttgcaaaaccctattgtaagagacataggctattcatccattatactgctattactttgttcgcttttattttcactactaccctgctagtttaatctcgatatttaactcattgtttgaacaaaagaactccgtgaattcgatccttaaatactgcaattgatctcgtatttgagagagtagttctaggtaatttgaaccatatcacagatgtctggtcaatgaatggagaggagtgagtcgatgaatttctcaccagtttatgaaaactggagtcatcatttcggtgcggaagactgggtatcgtatgttggaggagaaggcgatgagggatactattatcccaatatgtaaggagcgcctgattgggatgtttctggaactacactggaatactccttaccaaggtctgtgcactatagcacatctgaagggtcacactcaggaacaagaccacatgttcctgtgtatcaacccactacacacccaaatccgtcgctgccaagagaagttaatgaaggaaatgggaaaagtcataatgttcaaagtgtgctggagactcaacatacgttgggaatgattgagaccttgttgactcaaatgattcaacaacatcaacatcaacaatagatgcaggaaagccagcgtgctgaatctccttcggctaagttcttaaagttggttatgatgaagaaggatctgaagtttaaaggagagcaaaatattgttttagcggataagtggttaaggaacctggaaatgaattttgaaacttcaaggtgcccggaagactttaagggccacatagtg

SEQ ID NO: 161985 - DNA, 963 bp, Arabidopsis thaliana landsberg
atgggaagagcaccatgttgtgagaaaatgggggtgaagagaggaccatggactcctgaagaagatcaaatcttgatcaattatattcatctttatggtcattctaattggcgagctctcccaaaacaagcaggtgagtttcctttttacattttactttgtatattgattatctattaatgattcttgaaaatgaagcaattttggttggtgtttttgtgcaatttgtttaggtttacttagatgtgggaaaagttgcagacttcgttggatcaattatcttagaccagacattaaacgtggcaatttcactcctcaagaagaacaaactattatcaatctgcatgaaagcttaggcaacaggtttgtcttcttttttcccctaaagagtgattgagaaatcaaacagttttagggtcgacgtttttttttttttttgtaatgtcaacttcctttttcctttttccactttgcattacactgactctctgagaagtgagtattacccagtctaagttactaaatgattatttatgtaacaatttgcaaaatattttaacaccgtgggggtggtaaggagattcctgtccgtgatttcctctgtctcaaaccaaaccaaagacttcattaatttgttttcaaatatacttttaaaaaaaaaaacagaaacaagatcttcaatattactatttaaaaaggatatgcactttgatcaatgcaaaacatatggcatgtataagcttttgatttgttgttttcatctgtttttgagcaactaaagagcaatataaaataagaaattgatgaaatctatacaatactattatacgtggggcgcgtttttaaaaagtgatttgttttttgtttgtttcttattaatttagatggaaagaaattgctgcaaaattgccgggacgaaccgacaatgaaataaaaaatgtttggcacactcatttaaggaaa

SEQ ID NO: 161986 - DNA, 306 bp, Arabidopsis thaliana landsberg
cctcctatctcttccactccttttctctcctctcctctcacttcccttccctctcctccttgatcttctccgacgatgaagatctctcctcgatccctcccgcttcctacttcttcgccttcgccgtcttcttcgccgcttcaattgcgtttctcgacctttgttgtggacccagatcgaggaagtgtcggaatcccaagtgtaaaggtttgaagaaagcgatggagtttgatttgcaattgcagacggaggaatgtgttaaatctggagctactaaggagatcgatcgattgccatggaaaggag

SEQ ID NO: 161987 - DNA, 480 bp, Arabidopsis thaliana landsberg
ctaccttacttgaagatggtgatcaaagaaacatggaggctacatcctccagtacctcttctacttccaagagaggttatgtctgaatttgagatcaatggctacaagatacaacccaagacattgctttacgtgaatgtttgggctatagggcgtgatcctgattcctggaaagatgcagatatgttttatccagaaaggtttatggataataacattgatgctaaaggacagaactttgagctgttaccgtttggaagtggccggagaatctgtcctggaatgtacatggggacaacaatggtggagtttggtctagcgaatatgttgtatcagtttgattgggaagtaccagatggtatggtggtcgaagatattgacatggaagaatctcctggactcgctgtgggcaaaaaaagtgagcttctacttgttcctgtcaagtatttaggtcattgatgatcacttaaagtactaatt

SEQ ID NO: 161988 - DNA, 590 bp, Arabidopsis thaliana landsberg
agcaaatgtgaccatcaatcggtaaccattctctgcgttctgtatagttctgaatgtgaaatcattagctatataacagacactatcaagaaagaaaagaaaatgctataatgtagtttctgtttttaagattgtcttggatgcaatgtaggtattttttattgttcatggtggagttctattaagtttgatgcttgaaaaacggttttcttaactatttgacaggagtggcttgaaaagcatggagattacgaagctatactagatggagcaaatattgggctctaccaacaaaattttgcagatggtggtttcagtctaccacaggttctcatagatttttcttcctttgcatttctgaatacatattcctgcaaatactgacacagtgaaacattgtgaaaaagagcagcttgaagctgtagtgaaggaactttacaataaaagtggtagcaaaaaacagccgctaattctcttgaacaagaaacgggtcaatgcgcttttagaaaacccgaatcaccggaatcttgggaagaatggattaataacgatgtcctgtatgcgactccaccaggttccaatgatgattg

SEQ ID NO: 161989 - DNA, 537 bp, Arabidopsis thaliana landsberg
ctttagtaaaataagaatatttcttgtatatttcaaccataagtagatatgttaaaatttaacactcagattactacattgttcattgttttagctttggtgtgtgcgtttgttccggctttctcagtcgaagaagctgaagcaacattattatggaatacttgtcttgttaaaatcactcctaagtgtgctttggatataatcgctgctgtctttgaaaatggaaccatgcctgatccttgttgcaaggatcttgtcaaagaaggaaaagtgtgccatgataatctcattaaatatattgctgacagaccaagcttaattgaacgtaaagcacaatacttgaagaaaaggtatcacgtgtggagtcattgtgtctcaatttctaaaactgcttaaaatatgtatgtttttaatactattttgatcgaatatatttatattttgtctttgtaacattttcgttatcataaatttatttctatgtattaaatttaataaaaaaataaattaaagcaatctgtcgtaagatgaataaaa

SEQ ID NO: 161990 - DNA, 2002 bp, Arabidopsis thaliana landsberg
agagagaaagagatttgatggaaacggagacagatccagttgttaatggcgatgatgatggcgtcggtggttacgttggtgatgatgatgatgagggttgataacgacgacgacgacaacacataaaagtcatacaatttttatttgttttctctaaggtgatgaatcaagggtaatagcgtcatttcatttaaataaaagtacctaaatccgtaagtcatatcgaaagtacctaaatctataattttttaagattttgtggttttctggacaattaactctttaaatgtaacataaaacattatacattattcaaaaaatgtaatgataaatataaactcttttttgggtataaaatcaataaataatatttctattggcataaaacgagaaacacgtgtgatgggatggttctagtacccaatcaaattggataaaaacaaagaaatatgatttggctgggtctactataataactgctgcttggtgaccaaaataagacgaaacggcttcttcatcaaaccattcatcctcatcctcagactttggtttttgtttctcgaagatgaacgacgccgatgcttccatccagatccagcagatggttaggtttatccgccaggaagccgaagaaaaggctaacgagatctccatctcctccgaagaagtaagtccatacattacatccactctcttttgatctcgatctttacgaatacgtgactctgttgacaattgcgtgactattttggtttgttcttttgaaaatatgttgactgttgttttacattgatcttcggatcttaagatcctctgtgagattatttctgaacatgaaaaaatggctctgagtctaaaaccgattggtcttttgatgtgacaggaattcaacattgagaaattgcagcttgttgaagcagagaagaagaagattaggcaagagtatgagaagaaggagaaacaggtcgatgtcagaaagaagatgtgagagctcttttcacttctctatgtctctcttatctgtttgattttgttcttgagatctgttcctctttggctcattaattcctagtttaatggcattgagcgtttagatgctagttttgagctgactcatatcgttctttagatcttgttgatttaggccacttgttaattgtgagtttgctctgtttattatgttttgtaaaaagtgattactcaatgcaactgaacgcatcgaggatcaaagttctacaagcgcaagatgacattgtcaatgcaatgaaagaagaagcagctaagcaactcttggaagttagccaacatggctttttcaatcatcatcaccatcagtataagcatctcttgaaagatctcattgttcaggttctgtcttaagcacaactagctccctcgtctgtttctttgaaatgtgttctttatattggttttttttggggtatgtgttgtagtgtttgcttagattgaaagagcctgcagtgttactccgttgtcgtgaagaagatcttgacatggttgagtctatgctggatgatgctagtgaagaatattgcaagaaagcaaaggttcatgctcctgagattattgtagacaaggacattttccttcctcctgctccttcagatgatgatcctcatgctctttcctggtaaaatttcatcaaaccaaaacactataaactataaaagaaccaaaaactctaataccaatatgacacttgtggatatataacagtgcaggaggagtggtgttggcttctcgtgatgggaaaatcgtgtgtgaaaacacgctcgatgcgaggttggaggttgccttccgcaataaacttcccgaggttaataaaaagtccccatttgctctcctatatttacagtaccatattcctatgcttatatcttcttattggtttcaaagcttttgaaatggtattctaaatgatcttttcttgaaatgtgtgtagatccgaaagtcgctcttcggcaaggttggtgcagcttga

SEQ ID NO: 161991 - DNA, 845 bp, Arabidopsis thaliana landsberg
agaaagcaggttgatggatattccctgatagtagaaggagactcaagcaccgatgatgagagtgactgtgagacttcagcttatgaggaggcacgagatagcttacttcagcgtgccgacaaaatctttagtgatgcatctgtggtgtactccgagctttcaagggtgaagtcgatatttaaaaggggtgcgcgacacccttcacctgctttccgggctgcttacacgtctttgaccgttccttccatgtattcaccttatctaagactggagcttttgagatgggatcctcttcatcaggatgtcgatttctctgacatgaattggtaaagctactagctagctagcgctttccaactttttcctaattatccaaactttcattgtcaaacacacacttcaccttttcagcaccatctcttaagcatatcatctaatgaaacccattgttttgtttccatttttgcaagtgatctcacttgccattaatttgtgttttctttgcttttttgcaagtggtctgacttgcgatttatttgtggatctccaggcatggactgctgtttcattctaggattgtgtgtggttctacaccagtttgtactaatcccaactttgtatatgatctattgaaatatggtgcggttccaattttgcaccatcagatagttcgttgctgggatatacttagcacccgggagacaagaaatgctgttgctgctacaagcttggtgacaaattatgtttctgcttcgagtgaggccttagcagaactatttgctgctattcgtgctcgccttgttgaagccattgcagctattagtgtataaatatgaattcgttac

SEQ ID NO: 161992 - DNA, 172 bp, Arabidopsis thaliana landsberg
accatgttgaatatcttatataggtggttcgtcgatggaactccgatcagagtttttagtgtatacgaaagtgaaggaatcgcatacccgagcaagcaaggtatgaaagtgtttgcaagtttatggaacgcagaagactgggcagcacaagaaggtcgagtgaagactaact

SEQ ID NO: 161993 - DNA, 744 bp, Arabidopsis thaliana landsberg
cggaggagatgattgagaagataatgaacggagatcaagttcggatgaaatcttgtcgatgatgtgatttgtctgctttctcttggctctggagctatggtatgtctgctctgtgatcgccaaaggttgattcttggtgcaataaaggaagtaaaatcatcatctgaagaagaaccttaagcttgcggagaggaaagtgtcatttaaccatgcctttccacatactgatcatatcagtaacctccatggtttggtactcttgtgttattggttatcatacaaagtaactattatgcattgcaaactgatagccagcacttagcgaaggttaaaatgtacatatagattccaactcgttatagtgcctgaagttgtagacataaagacaagccaaacacacatcgtgcatagtcatataacatgattaaagttgaatagtgattaataattgattgcaacagaccagatgcatacaagaggtgtctgtctattatttttattcttcttcttcttgttctcgacttactttaccaaagcaatttcaagactcatgtgttctggtaccccatccatggttttccttatgatagctttgtgatcacttgaagaaacacctgtatacttgtaacttatgtagaagattgcattctctgcgtggagcttctcacgcgcctcagttatgtaatcttctttagtttctaaaactaccttgctgatctccaagggtgggaaagccaccaattc

SEQ ID NO: 161994 - DNA, 476 bp, Arabidopsis thaliana landsberg
cattcttttccttgtgattcattattttgcctagttttacttttcaaatagacttctaacaaaagttatgactgaaaaccaattatatagctttataaccatgaagagttcattgtctaaatgcaaacagtcttcttctttgtctttccctttgtttggtctgatcaacttcttcctcatcggttttttcagatgggtttcttttgctcagttatttttctctaggttctggcctcttgttcaacaccagcaatgtgtttccgagaagaagagcaaagatcttgagttccaaacttcgatcaaacacgaagaatatcgtgatgatgatgatgatggtctttgcagagaagatgtagggatggttatgaaaagcttagggctttccactgaccaagaaaacgagggacttcaaaaacagtacagttccaaggaggtttcgaatctgttcgaagagaaagagccaagcttagaggaag

SEQ ID NO: 161995 - DNA, 628 bp, Arabidopsis thaliana landsberg
gaaataagaatgattcaatagaaactaaggcaattcactggcttgcaaaagtcataaaaaagcagtgaagttggtattcacaaataacagaaaggagcttaaagttgacaactttgtatccaaatcaaagacatatctgaatctaaattacagaatcctccatagattacttacatgatcatttcagagtagaacacaaaacctaatagatctgaaatcagaggaaaaccccaaatgtacaccaaaattgggggaaatacgaaatcaaacaagaagccctatttgtgagtcagcgaaaatgcaacaaaccacaattgaaacaaaaaagctcgatctcaacgaagcttgaaatgaagaacatgaagaagaagcgttagattaggaacacaacatggtgagacaaaaacgcagacacaaagacagagacccgtaatttatggtgagagaaaaataaaagaaagtgaaaagaagagggagaagacctcgattcttgggattcgattcctcaactcttgctcttggtttttttcttccttcaaaatttgaagatcgaaataatgggaattgaaagaaaaagttggaaactttataatccctctttcgatgtgtgtgtgaatgtgcaaaaaga

SEQ ID NO: 161996 - DNA, 505 bp, Arabidopsis thaliana landsberg
atggaagtgggcagcttggtgtccgctgcttccggagctggcggcagaggcctggacaggttctggttgctagggtttgggaacaaccaggcttatttgaagtccagagcagggcagccatctcttgaggctgtctgggagctgcaccccatcgtcgtgccggacggcggcctcgcgctgagcctcaggtgcaacaggtacggtgtttagatcgattatatattaacagtgagtttgcaataattaacggtgacgataagatgattgacgtctgtaaatgccggatggttctttgttcctcgatcgtctagtgacgccgaacaagctagagcaacaaggccttggcccttcgctaacggcactgcagcaaccggcgacagtgagctcatcactttgtcctgcgccaaggtggcggcgacaactccaaatgtgccccatcggcttcagggctaccaagttcaagatacgaccagactgcgagccgctgcggatcctctagagtcga

SEQ ID NO: 161997 - DNA, 951 bp, Arabidopsis thaliana landsberg
atggtgagctcgcggaggtttgaaatgtgaacacttttggcagtacctcaaatctcctccctgcaaataacataaccaaagtaacaagtgaatcccaaagccacaaaacatgaggtcacatatggaatatcaaaacctcaactattaaggtcctaattagaagttagctggaaaaaaatctgatcacttgaaagttaaattgtctcatacatgccatcaaaacaacgttagagaaacaaacaaaactacaagaatcaccactctaactaatccatgtagccaaaagatgaagtttttactgcaatccccaagagtcaacctttaatgtccctcactaataattagaagaagctaggaacaaatttgaaaagttgaaatttctctagcaagccaacaaaatctatcaagagagtcaacaatctacaagaatcaccattcaagtaaattcatagagcctaaagattgaattttgatatgtacagaaaatgactacacaccatagactatctagagaattattttgacaaatatggtaaagttctaatacagagataatggcaaatctctttgacattgaaatgaactaaaaccgatcataataataatccaaattccaaactaatactgataaatctctgaattgactattcatcaccaagtaacagctaaatgggagagaaagagatgacctttcgcttaatctcatgaacaggactctccggatcttcaacatccggcatgtaattgagtggaacccgacccggatccctgaaaaccgcgatggagtaattgtatatacacatcagagccaaagcggtgaaagcggcggcgttacggattccgggagacgaagtgaggctgaaccaccgatcgatgaaagtgaaaaacgatcaccacattcaccactgtgacggggagagtgataatcgagacgtatctcttccgattttg

SEQ ID NO: 161998 - DNA, 538 bp, Arabidopsis thaliana landsberg
gtaggtaaatctctctaggagtatcgcatgctaacatttttcgtcacaggtccgaatggttgaggatgatctcatgtacaacactttccttgaggtgtatgagaatcactgtggaaggaatggtcgagagtcagatcttcctattacctacttcaaggagaaactcaatcaagctatcacagggcaaatctcaccagaagcaattggagatcttcggctacaggcttatggtgaaatcacaaagaacatagtcaatgacactatattctctcagtacatgtacaagacatcaatgagcggaagtcatctttgggctttcaagaagcaatttgctgtccagctagctgtctccaatttcatgtccttcattctacaaattggtgggagatccccaaacaagatcttgttcgccaaaaattctggaaaaatgttccagacagaatttcacccatcttaccattccaatgggatgatcgagcttaacgaaactgtgcctttccgccttacaaggaaacatgcacgcatcttctctttcatt

SEQ ID NO: 161999 - DNA, 1431 bp, Arabidopsis thaliana landsberg
  unsure (1)..(1431): unsure at all n locations
cacaaactcagttctttgcaagaaacacaaacttaagtattcaaaatatcgtcatcatgttctcaagattccatgctctgtttcttctccttgttctttcagtaagaacatataaatgtgtatcttcttcttcttcttcttcttcttcttcttcttcttcttcttctttctcattctcttcattttcttcttcgtcttcttctcaaactcttgtcttgcctctaaagacccgaataaccccaacggatcatcgacccaccgacaaacttcatttccaccacaacgtcactctcaccgttactctcaccgtcggtactcctcctcaaaacatctccatggtcattgacactnnnnnnnnnnnnnnnnnnnnnnnttgcaaacggtcctcaaacccaaacccggttaacaattttgacccgacccgttcctcctcttattccccaatcccctgttcctcacccacttgtcgtacccggacccgagacttcctcatacccgcttcttgcgattcagacaaactctgccacgcaactctatcctacgccgacgcttcctcctccgaagnnnnnnnnnnnnnnnnnnnnnnnnnnnnnnnnnnntccaccaacgactccaatctcattttcgggtgtatgggttccgtatccggatccgacccggaagaagataccaaaacaactgggttattgggtatgaaccgtggttccctctcttttatctctcaaatggtttccccaaattctcttattgcatctccggcaccgacgacttcccggggtttcttctcctcggcgactctaacttcacgtggttaacgccgttaaattacacgccgttaattcgtatctctacgccgttaccttacttcgaccgtgtagcttacaccgtccagctcacgggtattaaagttaacggtaagcttttacccatccctaaatcggttctcgtaccggatcataccggtgctggtcaaaccatggttgattccggtactcagtttactttcctgcttggaccgtttacaccgcacttcgatcccatttcttaaaccggacaaacggaatcttaacggtttacgaagacccagattttgttttccaaggaaccatggatttgtgttatcggatttcaccggttcgtatacggtccggaattctccaccgtttaccaacagtttctctggttttcgaaggagccgaaatagcggtttcgggtcagccgctattgtaccgagtcccgcatctcacggttggaaacgattcggtttattgtttcacatttggaaactccgaccttatgggaatggaggcttacgtgattggacatcatcatcagcagaacatgtggatcgaatttgatctacaaagatcaagaatcggtttagctccggtagaatgtgatgtatcgggtcagagactcnnnnnnnnnnnn

SEQ ID NO: 162000 - DNA, 1010 bp, Arabidopsis thaliana landsberg
atgaagggcttcaaggaacttgtcgtgttcttgctccgtccagttctctctagatttggtgatagtgtaaggctttctaaccttctttgttggatcctcaaaaaacgacatcgtcctattgctccgtatggaaaccggtatcgttgttgccgtgtggggaagagtattgaaacccggtagactcattttcataggcaaacaatgagcttggctagggtttacagtcaccataaaactcgacaacacacacaaagttcccttttggtttgaaacagagtttgtgacttgagagacttgtgtgagagtggtggtggtataagcgggagagggagacaaggttagaagtgtaatctcattcgaaaaatggatttaagccgaacacgtgtaaggagccggttgctctggttcagagcgtgggactaacaactacaagccatgtggacattctcctaacactcatgccacgtacaaatttaaatccacggcacataaattgccacgtggaatacgatcgtaagccagcaatcttatttacgagatagctgcctagctggggcctggttcgactaaaaatgaaggttactttcttttgtagtttagctcaaattttagttatgtacgatgatgtgttttatgtacgatgatctctaaaacacaaacgcagcatatacaaatacaatacacacacctatttcaaactactaaccaaacacacaatgctttcgagttcatcacgaccagacccagaaaacaacaacaaacgtccctctaagacaagctcatcggatgtttctgcaaaccgagaataaataaaaagaaacaatgattacagatataagttggttgataccaactacacaacacacgacacagtctcgaaacacaaaaattgggtgtctctgtttttcgtctgtgaatcctaaggatgttaaagtaacaaaagtaattaaaagagagaaactcacaaatggagagactctgtttttctttttaatcgatccaacgtgtga

SEQ ID NO: 162001 - DNA, 1514 bp, Arabidopsis thaliana landsberg
atggacatagatgccgagacatccgacaagccggatattaaagtagacccgcagcctactaattggagagatcccatcaaactctacattgctgatggcgaaattccggcagatcggtgggaagctcgtcgcctaaaggcaaaggcgcgaccaaggcgttcctcacatgcgtaaacaaagaggaagccgccataatcatgaaggaaacgcacgacggggacggagggaatcattctggtggacgagctctagcgctcaaaatcaagaaggatggtcactactggccaactatgttggctgactgtgaggcctacgcggcgaagtgcgaacagtgtcagcgacatggcctgatgaagaatgttcctcccgaaatattgcactcgatcacaacgccataccctttcatatggtgggctatggacatcgtgggactaatgcccccgtcagggtctaaaagatttctgttagtcctaaccgattatttcaccaaatgggtcgaggcacaggcgtactacgaggttaaatcaactgatgtcgtcgcattcatttggaaaaatattagctgtcgacacgatcttccctatgagatcgttacgaataatgggaagcagttcgtcttactcatcaccaggaacttccttgctaggtggaacattcgcatgagcaattcgactccacggtatcctcaaggaaacagacaagccgagaccacaaataaaacaatcatagccgagatcaagaaaagactcggtcccaagaaaagaaatttggcaaactagctggaaggcgtgttttggtcataccgaactacccctcgacgacctacgtcattgtctcttttttccttagcttatggcatcgaggcaacggctccgagcgaagctggaattccaacgttacgcagatgcatgatgtcggaggaccctggactaaacaatcgactgctatgagatcacaacaacttcgccgaagaacatcgcgatcaagctatcatccggatccaaaactaccagaatgcggcgacaaagtactataatcgaaacattcgagaacgtcgcttcaacgtgggtgatctcgtacttcgagaagtcttcagtaacaccaaagaaaagaacgccgaaaagctccgagctcaatggaggggaccttacttgatttcaaaggtactttgataatagatttttagtcaattatcctaaaacaccaatcatgtcgttgtagtattttaggttgtcaatccaaatgggtgtgatgctaacaatcaagatgtgatcagaagtcactaagtcaagccaaacaataacaagtttttgggtgttctagcagtcctaagtgaacatttaggaaacagaaaatcaagcaaaaggtgtaaaacactcaaccaacacagctcgttgcagagcactgggtgtggtcgagtgacatgtcgagtaacagacagaaaatataacagggatactcgactgcacagtctgttggcagacaactgggtggtcaagtatcaggtcgattaa

SEQ ID NO: 162002 - DNA, 1104 bp, Arabidopsis thaliana landsberg
  unsure (1)..(1104): unsure at all n locations
atgtgtgcagagataacacaagcaaagatcagtgcagaggaactagaggcacatagttcagatgcattagctgaactggttgacccttctgttatattggcaactccttcctccttttctccctcgaaaggaattctgaaaagaagtatgagaggatgtagagggatatgctcttgtttgaactgctcctccttccgtctacacgccgaaagagcatttgaattctcaagaaatcagttacaagatactgaagtaatggttttggatctagttggagaaatatctcatctcagggatttgttggagaaatataattcagcagatcacagtgaaccctacaaaagtcaggtcagtgcagaacaaacttcataatcaattgtctcttagatatagactcatatcaaattggtttagtatcttcactaaagtaactaaaatgagaataaatattcacacctagaccaacttttgtaatgtagacacaagttcttaaaaacttgttaagttagtaataaatttgtgcaaccttatcttgtaggattaattggatataaatattgatctgtaaacaggctggtgaagcttcgaagagagcttgtgaggctgcagagcttgcaaaaagccgcctccaccagatgaacgatgggcttcaaggtcactacagaatccccgtgagtaatccataatcaattgtctcattctgctttatgttaagacaacatctagtagttgaagcagttaaaaacacatgattctcactctcaatattttgtctacagaacgaacaacgagcaagagtgaaatttgctcattatatacacgagaagacgattgtaaaagcatccgaacctaacaaattgatcagtagatcnnnnnnnnnnnnnnnnnnnnnnnnnnntttaatgtcattatctgtctccagattatccagtttcatgctcttttctttttttaattttgaaaagtgaaagaggtattactagctgtctttttctttttgtcaccatcctaaacatagtagaagcatagatcaaagtgccattatacatatagaccatgtgatcatatttattacactttttttttttcttttaaaaacacaca

SEQ ID NO: 162003 - DNA, 619 bp, Arabidopsis thaliana landsberg
ggtcttgttccccttctgcacaaaatgaaaagttttcagtatttaaaggactagcgtaaacaatgccgccacatagaagcatttggtttatagcaaaacaattctcaaactacaaagttctataagaaagaaaaaaaaaaagaggattagtgttacctgaatcaagaactcttccctccagttattaagattatcaaaagatttcataacattgacatcatacacaagaacacaacaatccgctcctcggtaaaacgcgactcccaaactttgaaatctttcttgtccagcagtatcccaaatgtatataatgtaccaagagattgtattagtaatagttctataaatctctatagacaaccaaaaaaaaactgtatcttcctaagaagcacacgaaattgaacctcacaaagcaaaattttgactttttctgcattataaacccaaaaaggtaggaacctaagatccaatcacattctaagaatcaaaatgtttgattcattcaaagaatacctgtaaagtgaagattctatcatctatttgaacctctttagtcaaaaaatctgctccaatcgtcgctttatactgattactaaactttcgattcacaaacctatta

SEQ ID NO: 162004 - DNA, 237 bp, Arabidopsis thaliana landsberg
ggaagaaaaaagttaggtttgaaacgaaagtaaactagttaggtgaaaagcgaaacaacacccacagagcaatggcccctgctctcgccgttacacgagatcttaccgccgttggatcttcagagaatgcttctgcgaaaggacgtgcttcggtttacagtgaagttcaatcaagccgtattaacaacactttttctttgccttttgttttaaaaggagctttcaaaatcgttgaag

SEQ ID NO: 162005 - DNA, 196 bp, Arabidopsis thaliana landsberg
gactgaaaacgtatgcagaatctcatatggtgttcctcgtcctgaatgtgatagtcctggtctaagtagctctcaggttcaagccatttctaaccacgtctcaaaggtgaaatctgacaaggttattgactacatcaagagggaatacaacatcagtcacgtcaccattcagattgaacgccaacgatgcttttga

SEQ ID NO: 162006 - DNA, 556 bp, Arabidopsis thaliana landsberg
  unsure (1)..(556): unsure at all n locations
atggaaacactttctaatggtagtgctattgaggaattgcttcgatccgtgatagatgaagcttctcgtaagcatggtggggctcgtccaactcttgttctgnnnnnnnnnnnnnnnnnnnnnnnnnnnnataagactctgaaatggatagccgagaccaaacttggtctggtgactcagtgtttcttgactggtcctgccactaaaggaggtgatcagtaccgggcaaatcttgccctcaagatgaacgcaaaggttggtggaagcaatgtcgagcttatggatactttctctttcttcaaaaaagaggatgaggtcatgttcattggtgctgatgtcaatcatcccgctgctcgnnnnnnnnnnnnnnnnnnnnnnnnnnnnnttgtgggaactcttaactggcctgaagcaaatcgctatgcagctagagtcattgcccagcctcaccgcaaagaggaaatacaaggatttggcgacgcttgtttggagcttgtcaaagctcatgttcaggccacagggaaacggcctaacaagattgtgatattccgtgatg

SEQ ID NO: 162007 - DNA, 18754 bp, Arabidopsis thaliana landsberg
  unsure (1)..(18754): unsure at all n locations
ggctcgggcacgtctcgccaattggacgtcttgtcttcgtcggccatcaaggcaaggggcctccgaacgagaggcggctcgggatcatcgggcaaatccaattcctgagcaatatcggcattggtatcttcccgagccgtaaaagagatcatctgctcgtgggcactcgaagaagactcagcatcatcttcagaagacatccaaaccgctctccgtttgtagatggggggaaggtcatctagatgattcgagtcactggaatcggcgagagaggcgctcgggatcaaaagagactggctagaactcattttcggctcggggatgctcgacgagatgagaaacgaccagaaaacaaggaatttctaaaccggaaaaatcataaataacaaagaaacggcagagcttcaccggaaaagagagaacaatagaaatatcaagatcagagagaaggaagcaaaccttgttttttttcnttgaaaacttcaaatgagctcctgaaggaatggctcgccgtatatatagaatttttggaggcgcgttgggtacgcaacaagtaaataaaacgcgttgtagtgcgtgggctcggcagaagagacacccgcgtgatcctcgggaataagcgagaaacgtttccacttctcaaaaatagtcggcggcacgcgacggaagtttgaccgtccgggaatatgaagcgacaaaggtagacttaagaagatgaacagtcagctcgggaaatccattcatgaagctcatttttctgctaagtcagtgaactgggggggaaactgttggggtcggatttcacccaggatagcgagccgaccacacctccgcctcgggaaccatcgatgaattatcccgaaccggaccacaaaacacctcggaggtctcgtcaagaatccttacctaggcgatgtcgagaacacgagatgagcagtggtcccccgacccgacctcgaaacgcctcgggcataaaacttggcaaatcgtcccgaggcgggctccaagatgcctcgagagcttgtcttcgaataccgcggaccgagcatcccgatcatgacccgaggacaacttaatcacggctcggaaaggtctcgggttagacgaggaaaaacttcaaaagacttagccgatgtaagttcaaaacatttcacctccgaaaaccccggaagagataatcttcgaagatatcaccggatacagaaatcccagaatcctcggaagataaaaacaatctccaacaagataaagataaagaggaatcttccgagaatatcgcgagaggtgatagtctcggaccctataaaagcaccccagagaacaaacaaaaggggacgtacaaaaaatgctctaaacttcaggctatcaaaaacgctctgactttgaaggcaaaaacacctatttctcatattctaacacacttgtacgataaaatcattattttctcattaatacaatcaagaacaccgtccgcggtaattgagaattctgttgttctttgagaatctcacaaagatccattctttgaagatcggattaaccaaccaaagttagcttcaccacctccatggggatggtcgacagggttcataactactcctcttactacaggacgtttactgtaacgcccgcgatcctcaataggatcgttggctaggacttggtccgagagaagaaggtggagtctcggacaagtgagaaggagctggccataagctcggacaaaggggaaatcatgcaggctaagctaggatcgtaaagaaatcagttgggtcagctcgcccaaagctcaagctcagctggaaggagtgacggttactcaggtcgagtgacagtccagctcgggcagctggacgagtgacggttgagctcgaggtagctggacgagtgacggacgagctcgaggtagctggacgagtgacggacgacctcgaggtagctggacaagtgacagactagctgggcggttatgggcgaagagatacaactcttcggaaaggtgcaactcttcggaagggcgcaactcttcggaaaggtgcaactcttcggaaaggtgcaaggaacggatgtgttgattcgggaagcatccattcgccccctatataagggcgggcgcccaggaccattccactcaccacacaacacaccgaaaacacaagaaaactcaccattaaaactctctccctcttgggagaataaatagtcttaggattcggtagccgggctgtgcccggcaataaagaaggagggtcggatcgccctaacctcgagaaggaaggtaagggatcctagactttgagtctaagggttctaggatgcgagttagtagtcggatccttgaaaggaccgactagagggctgtgtagtatccgggtcatgtgcatcctacacaagactcggtccgggtagggatcggctgaggcggggacgcggctcggcggaggaccggcgggtcttaactgacctgccgagaatcggccggactgatgcgcgatcttcccctctctgaattctctccacggatccgagtagtgtatggcatatagagcattacatggacttgcatatgattaagtaaataagattacttatggctctatgactttcaggaacgaatggtgatcgtgggaaggacttggcttaggcgcgagagactcaaggccgggatgatgggtggtgatagttcggatagtctagggatcgattatatgacttgtaatagcttatatgcaaactcataggttgtatcgaatcctttgcttaattaataaagtatccgattgtttgtttactctattcgtctcatatattgaatctcggaatcatatgaaacggattagactaggaaagaacctcataaacggttagggccgagtcacttagtggcttgggtcgagagaactcgcccggactttaggcagtccggatcggggcctttcaagttggtatcagagcatgcttggttctaggactaggtgttgggttaaggggtatcaccactcgtcggcttgagaatctcgcggtagttgttctttactcttttgcgattttactaggagttatgtggattaactttagaggtttcgcagatgggtaagagcagcaaaacgggaaagagtaagaaggacaagggcattgtcgaggagactttggttgaggaggaaacgatgatcaacgagaaaaccagagtcgggacagtgttcgatgggacagactcggccggacctgaggccgggaagaagtccatgaatgaggaagcaccggagagtagtggtgcaagggacatcacggataaccggaacaatactccaacggcccaagaacagtgggatttgatgaagggaatgatggcgcaactagccacattgaccaaggccgttgtagctgatccggtggtcctaaaaggggataaccaaaaggacgatgactcggaagttgtggaagtgaatccacaaccgaattatgggcggaaaaggggagactatctgagtcttctcgaacatgtctcaaggctgggcacgagacacttcatgggcagtacggacccgattgtggccgatgagtggaggagtagactcaagaggaacttcaagtctacccgctgccctgaggattaccaaagggacattgcggtccatttcctggaaggagacgcccataattggtggttaaccgtcgagaaacgcagaggggacgaggtccggtcctttgcggatttcgaagacgagtttaacaagaagtactttccaccggaggcttgggataggcttgaatgtgcgtacctcgacctagttcaagggaaccgcacggtgcgtgaatacgatgaggaatttaaccgcctaaggcgttatgtgggacgtgaacttgaggaggaacaagctcaagtgcgccgatttatccgtggactaaggatagagatccgcaaccattgtttggtccggacattcaactcggtttccgaattggttgaaagggcagcaatgattgaggaagggatcgaggaggagaggtacttgaaccgggagaaagcaccgatccggaacaatcaatccaccaaacctgcggataagaaaaggaaatttgacaaggtggataacactaagtccgatgctaagaccggggaatgcgtgacctgtggtaagagccacagcggaacttgctggaaggccataggtgcatgtggccggtgtggaagcaaggaccatgcgatccaaagttgcccgagaatggaaccagggcagtccaaggttctcggtgaagagacaaggacttgtttttattgcggaaagactggacatctaaagcgagagtgccctaagttgactgcggagaagcaggccggacaaagggacaatcgcgggggaaatggactgccgcctcccccaaagcggcaagccgtggcaccgcgagtttatgagttgtcggaggaagctaacgatgccggaaacttcagggcgatcactggtacgttctcacaactccctattcattatttcaataactgcattgcattgcatcatgcatatgggaaaggggaggtactcagcattctaagggaatgtgtagggaccttgagagtaggtgacgtagtaacgcacactctatttgattctggggctacacattgttttgttagtccagaattggttgaaataggtgggttcaggaaagaaccaaacaccgattatggaatggtacgagcggccggcggacaggcaatgtatccgaccggacttgttcggggcatctcggttgtagtgaacggtgtcaatatgcccgcggacctaatcattgttccactaaagaaacatgatgttatcttagggatggactggttggggaagtacaaggctcacatagattgtcaccgaggacggatacaattcgagagggacgtgggtatgttaaaattccaaggaataagaacaacctcgggaagcttggtaatctcggcaatccaggctgaaaggatgctcgggaaaggatgtgaggcatatttagccacgatcacaaccaaggaagtgggggcgagtgcggagttgaaagacattccgatcgtcaacgagttctcggacgtgtttgcggccgttagtggtgtaccaccggaccggtcagacccgttcacgatagaactcgagcccgggacaacccccatatctaaagctccgtaccggatggcaccggcggaaatggcggagctaaagaaacagttggaggagttgttggataaaggattcatcaggccgagtagctcaccatggggtgcgccggttctgtttgtgaaaaagaaagatggtagctttaggctatgcatcgattatcggggattgaataaagttacggtgaaaaacaaatatcctttaccccggatagatgagttgatggatcaacttggaggtgcacagtggttttcaaaaatcgacttggcctcaggatatcaccaaattcccatagagccaacggacgtgaggaaaacggctttccggacaaggtacggccactttgagtttgtggtcatgccattcggattgaccaatgcaccagcagccttcatgaaaatgatgaatggggtgttccgggatttcttagacgagtttgttatcatcttcattgacgatatacttgtttactcgaaatcttgggaagctcaccaagaacatctaagggcggtgctggaacggctaagggaacatgagctatttgcaaagttaagtaaatgctcattttggcaaaggagcgttggttttcttggtcatgttatctcggaccaaggagtatcggttgatccggagaaaatacggtcgataaaggagtggccacgaccaaggaatgccaccgagattaggagctttctcggactagcggggtattaccgaaggttcgtaatgagttttgcgagcatggctcaacccttgactcgactgaccggaaaagacaccgcattcaactggtcggatgagtgcgagaaaagcttcctggagttaaaggccatgttgactaatgcaccagtattggtcttaccggaggaaggtgagccctatacggtttatacggacgcatccatagtgggactaggatgcgtactgatgcaaaaggggagtgttatcgcatacgcatcaaggcaattgcggaaacatgagaagaattaccctacgcatgatttggaaatggccgcggtagtatttgccttgaagatttggcgatcatacttgtatggtgctaaagttcaaatctatactgaccacaaaagcctaaagtacatattcacccagccggagttgaatctaaggcaaagaaggtggatggaacttgtggcggattacgacttggatatagcgtaccatccgggcaaggccaaccaagtcgtcgacgccctgagtaggaggcgctcggaagttgaggcggaacggagccaagtggacttggttaacatgatggggacattgcatgtgaatgccttgtctaaagaagttgaacccttagggttgggagccgccgatcaggccgacttgcttagtaggatccggctggctcaggaacgggacgaggagataaaaggatgggcactaaacaacaagaccgagtaccaaacctcgaacaatggtacaatcatggtgaacggtcgagtatgtgtcccgaacgatagggcattaaaggaggagatcctaagagaggcgcatcaatcgaagttctcaatccatcctgggtcgaacaagatgtaccgcgaccttaaaaggtactaccattgggtaggaatgaagaaagacgtggccagatgggtggccaagtgcccgacttgtcaactggtcaaggcggagcatcaagtaccaagtgggttgttacaaaacctacctataccggaatggaagtgggaccacataacgatggacttcgtcactggactgccaacggggatcaagtccaaacacaatgcggtatgggttgtggtagaccgattgactaagtctgcgcacttcatggcgatctcggataaggacggagcagaaatcattgccgagaagtatatagacgagatcgtgcggttacatgggattccggttagtatagtgtcagaccgagacacaaggttcacgtcaaagttttggaaggctttccaaaaggccttaggaactcgagtgaacctaagtactgcctaccacccacagacggacggacagtccgaacgaacgattcaaaccctcgaggacatgttgagggcatgcgtcttagattggggaggaaactgggagaaatatctaaggttagtagagtttgcatacaataatagttttcaagctagtattggtatgtctccctatgaggcgttgtatggccgagcttgtagaacaccgttgtgttggacgcccgtgggcgaacgtcggttgtttggacctacgatcgtggatgaaaccacggagagaatgaagttcttaaaaatcaagttaaaggaagcccaagatcgacagaaaagctacgccaacaaacgtcgaaaggaattggaattccaagtaggagatttggtgtacttaaaggcgatgacctacaaaggggcagggcgattcacctcaaggaaaaagttaagcccaaggtatgttggcccgtacaaggtgatcgaacgagtaggggcggtggcatacaaacttgaccttcctcccaaactaaacgcgtttcacaacgtcttccatgtgtcacaattacggaagtgtttaagtgatcaagaagaaagcgtggaagatatacctcccgggttaaaggagaacatgacggtggaagcatggccggtacggatcatggaccgaatgacgaaagggactcggggaaaatcaagggatttgttaaaagtcttgtggaattgtggaggccgtgaggaatacacttgggaaaccgagaataagatgaaggccaattttccggagtggttcaaggagatgggtaaagatcaacttgatgcggattcgaggacgaatccaattcaagggggggagacttgtaacgcccgcgatcctcaataggatcgttggctaggacttggtccgagagaagaaggtggagtctcggacaagtgagaaggagctggccataagctcggacaaaggggaaatcatgcaggctaagctaggatcgtaaagaaatcacttgggtcagctcgcccaaagctcaagctcagctggaaggagtgacggttactcaggtcgagtgacagtccagctcgggcagctggacgagtgacggacgagctcgaggcagctggacgagtgacggttgaactcgaggtagctggacgagtgacggacgagctggtcaattatgggcgaagagatacaactcttcggaaatgtgcaactcttcggaagggcgcaactcttcggaaaggtgcaactcttcagaaaggtgcaaggaacggatgtgttgattcgggaagcatccattcgccccctatataagggagggcgcccaggaccattccactcaccacaacacaccgaaaacaaagaaactcaccattaaaactctctcccttttgggagaataaatagtcttaggattcggtagccgggctgtggccggcaataaagaaggagggtcggatcgacctaacctcgagaaggaaggtaagggatcctagactttgagtgtaagggttctaggatgtgagttagtagtcggatccttgaaaggatcgactagagggctgggtagtatccgggtcatgtgcatcctacacaagactcggtccgggtagggatcggctgaggcggggacacggctcggcggaggaccggcgggtcttaactgacctgccgagaatcggtcggactgatgcgcgatcttcccctctctgaatcctctccacggatccgagtagtgtatggcatatagagcattgcatggacttgcatatgattaagtaaatgagattacttatgcctctatgactttcaggaacaaatggtgatcgtgggaaggacttggcttaagcgcgagagactcaaggccgggatgatgggtggtgatagttcggatagtgtagggatcgattatattacttgtaatagcttatatgcaaactcataggttgtatcgaatcctttgcttaatcaataaagtatttgattggttgtttactctattcgcgtcatatattgaatcacggaatcatatggaacggattagactaggaaagaacctcataaatggttagggccgagtcacttagtggcttgggtcgagagaactcgtccggactttaggcagtctggattggggcctttcaagttggtatcagagcatgcttggttctaggactaggtgttgggttaaggggtatcaccccttgtcggcttgagaatctcgcgatagttgttctttactcttttgcgattttactaggagttatgtggattaactttggaggtttcgcagatgggtaagagcagcaaaacgggaaagagtaagaaggacaagggcattgtcgaggagactttggttgaggaggaaacgatgatcaacgagaaaaccagagtcgggacgatgctcggtgggacagactcggtcggacctgaggccgggaagaagtccataaatgaggaagcaccggagagtagtggtgcaagggacagcacggataaccggaacaatactccaacggcccaagaatagtgggatttgatgaagggaatgatggcgcaactagccacattgaccaaggccgttgtagcggatccggtggtcctaaaagtggataaccaaaaggacgatgactcggaagttgtggaagtgaatccacaaccgaatcatgggcggaaaaggggagactatctgagtcttctcgaacatatctcaaggctgggcacgagacacttcatgggcagtacggacccgattgtagccgatgagtggaggagtagactcaagaggaacttcaagtctacccgctgccttgaggattaccaaagggacattgcggtccacttccttgaaggagacacccataactggtggttaaccgtcgagaaacgcagaggggacgaggtccggtcctttgcggatttcgaagacgagtttaacaagaagtactttccaccggaggcttgggataggcttgaatgtgcgtacctcgacctagttcaagggaaccgtacggtgcgtgaatatgatgaggaatttcaccgcctaaggtgttatgtgggacgtgaacttgaggaggaacaagctcaagtgcgccgatttatccgtggactaaggatagagatccgcaaccattgtttggtccagacattcaactcggtttccgaattggttgaaaggacagcaatgattgaggaagggatcgaggaggagaggtacttgaaccgggagaaagcaccgatccggaacaatcaatccaccaaacccgcggataagaaaaggaaatttgacaaggtggataacaccaagtccgatgctaagaccggggaatgcgtgacctgtggtaagagccacagcggaacttgctggaaggccataggtgcatgtggccggtgtggaagcaaggaccatgcgatccaaagttgcccgagaatggaaccaggacagtccaaggttctcggtgaagagacaaggacttgtttctattgcggaaagactggacatctaaagcgagagtgccctaagttgactgcggagaagccggccggacaaagggacaatcgtgggggcaatggactgccgcctcccccaaagcggcaagccgtggcaccgcgagtttatgagttgtcggaggaagctaacgatgccggaaacttcagggcgatcactggtacgttctcacaactccctattcattatttcaataactgcatttgcattgcatcatgcatatgggaaaggggaggtactcagcattctaagggaatgtgtaaggaccttgagagtaggtgacgtagaaacgcacactctatttgattatggggctacacattgttttgttagtccagaattggttgaatcaggtgggttcaggaaagaatcaaacaccgattatggaatgatacgatcgaccggcagacaggcaatgtatccgaccggacttgttcggggcatctcggttgtagtgaatggtgtcaatatgcccgcggacctaatcattattccactaaagaaacaggatgttatcttagggatggactggttggggaagtacaaggctcacatatattgtcaatgaggacggatacaattcgagtgggacgagggtatgttaaaattccaaggaataagaacaacctcgggaagcttagtaatctcggtaatccaggcttaaaggatgctcgggaaaggatgtgaggcatatttagccacgatcacaaccaaggaagttggggcgagtgcggagttgaaagacattccgatcgtcaacgagttctcggacgtgtttgcggccgttagtggtgtaccaccggaccggtcagacccgttcacgatagaactcaaacccgggacaacccccatatctaaagctccgtaccggatggcaccggcgaaaatggcggagttaaagaaacagttagaggagttgttggatcaaggattcatcaggccaagtagctcaccatggggtgcactggttttgtttgtgaaaaagaaggatggtagctttaggctatgaatcgactatcgaggattgaataaagttacagtgaaacccaaatatcccttaccccggatagatgagttgatggatcaacttggaggcgcacagtggttttcaaaaatcgacttggcctcaggatatcaccaaattcccatagagccaacggacgtgaggaaaacggctttccggacaaggtacggccactttgagtttgtggtcatgccannnnnnnnnnnnnnnnnnnnnnnnnncttcatgaaaatgatgaatggggtgttccgggatttcttagacgagtttgttatcatcttcattgacgatatacttgtttactcgaaatcttgggaagctcaccaagaacatctaagggcggtgctggaacggctaagggaacatgagctatttgcaaagttaagtaaatgctcattttggcaaaggagcgttggttttcttggtcatgttatctcggaccaaggagtatcggttgatccggagaaaatacggtcgataaaggagtggccacgaccaaggaatgccaccgagattaggagttttctcggactagcggggtattaccgaaggttcgtaaggagttttgcgagcatggccccaacccttgtctcgactgaccggaagagacaccgcattcaactggtcggatgaatgcgagaaaagcttcctggagttaaaggccatgttgactaatgcaccagtattggtcttaccggaggaaggtgagccatatacggtttatacggacgcatcaatagtgggactaggatgcgtactgatgcaaaaggggagtgttatcgcatacgcatcaaggcaattgcggaaacatgagaagaactaccctacgcatgatttggaaatggccgcggtagtatttgccttgaagatttggcgatcatacttgtatggtgctaaagttcaaatctatactgaccacaaaagcctaaagtacatattcacccagccggagttgaatctaaggcaaagaaggtggatggaacttgtggcggattacgacttggatatagcgtaccatccgggcaaggccaaccaagtcgccgacgccctgagtaggaggcgctcggaagttgaggcggaacggagccaagtggacttggttaacatgatggggacattgcaagtgaatgccttgtctaaagaagttgaacccttagggttgggagccgccgaccaggccgacctgcttagtaggatccggctggctcaggaacgggatgaggagataaaaggatgggcactaaacaataagaccgagtaccaaacctcgaacaatggtacaatcgtggtgaacggtcgagtatgtgtgccgaacgatagggcattaaaggaggagatcctaagagaggcccatcaatcgaagttctcaatccatcctgggtcgaacaagatgtaccgcgaccttaaaaggtactaccattgggtaggaatgaagaaagacgtggccagatgggtggccaagtgcccgacttgtcaactggtcaaagcggagcatcaagtaccaagtgggttgttacaaaacctacctataccggaatggaagtgggaccacataacgatggacttcgtcaccggactgccaacggggatcaagtccaaacacaatgcggtatgggttgtggtagaccgattgactaagtctgcgcacttcatggcgatctcggataaggatggagcagaaatcattgccgagaagtatatagacgagatcgtgcggttacatgggattccggttagtatagtgtcagaccgagacacaaggttcacgtcaaagttttggaaggctttccaaaaggccttaggaactcgagtgaacctaagtactgcctaccacccacagacggacggacagtccgaacgaacgattcaaaccctcgaggacatgttgagggcatgcgtcttagattggggaggaaactgggagaaatatctaaggttagtagagtttgcatacaataatagttttcaagctagtattggtatgtctccctatgaggcgttgtatggacgagcttgtagaacaccgttgtgttggacgcccgtgggcgaacgtcggttgtttgnnnnnnnnnnnnnnnnnnnnnnnnnnnagagaatgaagttcttaaaaatcaagttaaaggaagcccaagatcgacagaaaagctacgccaacaaacgtcgaaaggaattggaattccaagtaggagatttggtgtacttaaaggcgatgacctacaaaggggcagggcgattcacctcaaggaaaaagttaagcccaaggtatgttggcccgtacaaggtgatcgaacgagtaggggcggtggcatacaaacttgaccttcctcccaaattaagtgcgtttcacaacgtcttccatgtgtcacaattacggaagtgtttaagtgatcaagaagaaagcgtggaagatatacctcccgggttaaaggaaaatatgacggtggaagcatggccggtacggatcatggaccgaatgacgaaagggactcggggaaaatcaagggatttgttaaaagtcttgtggaattgtggaggccgtgaggaatacacttgggaaaccgagaataagatgaaggccaattttccggagtggttcaaggagatgggtaaagatcaacttgatgcggattcgaggacgaatccaattcaagggggggagacttgtaacgcccgcgatcctcaataggatcgttggctaggacttggtccgagagaggaaggtggagtctcggacaagtgagaaggagctggccataagctcggacaaaggggaaatcatgcaggctaagctaggatcgtaaagaaatcacttgggtcagctcgcccaaagctcaagctcagctggaaggagtgacggttactcaggtcgagtgacagtccagctcgggcagctggacgagtgacggacgagctcgaggcagctggacgagtgacggttgaactcgaggtagctggacgagtgacggacgagctcgaggtagatgggcgagtgacggacgaactgggcggttatgggcgaagagatacaactcttcggaaaggtgcaactcttcggaagggcgcaactcttcggaaaggtgcaactcttcggaaaggtgcaactcttcggaaaggtgcaaggaacggatgtgttgattcgggaagcatccattcgccccctatataaggaagggcgcccaggaccattccactcaccacaacacaccgaaaacacaagaaaactcaccattaaaactctctccctcttgggagaataaatagtcttaggattcggtagccgggctgtggccggcaataaagaaggaaggtcggatcgacctaacctcgagaaggaaggtaagggatcctagactttgagtctaagggttctaggatgtgaattagtagtcggatccttgaaaggaccgactagagggctgagtagtatccgggtcatgtgcatcctacacaagactcggtccgggtagggatcggctgaggcggggacgcggctcggcggaggaccggcgggtcttaactgacctgccgagaatcggccggactgatgcgcgatcttcccctctctgaattctctccacggatccgagtagtgtatggcatatagagcattgcatggacttgcatacatatgattaagtaaataagattacttatggctctatgactttcaggaacgaatggtgatcgtgggaaggacttggcttaggcgcgagagactcaaggccgggatgatgggtggtgatagttcggatagtctagggatcgattatatgacttgtaatagcttatatgcaaactcataggttgtatcgaatcctttgcttaattaataaagtgtccgattgtttgtttactctattcgtctcatatattgaatctcggaatcatatgaaacggattagactaggaaagaacctcataaacggttagggccgagtcacttagtggcttgggtcgagagaactcgcccggactttaggcagtccggatcggggcctttcaagttggtatcagagcatgcttggttctaggactaggtgttgggttaaggggtatcaccactcgtcggcttgagaatctcgcggtagttgttctttactcttttgcgattttactaggagttatgtggattaactttagaggtttcgcagatgggtaagagcagcaaaacgggaaagagtaagaaggacaagggcattgtcgaggagactttggttgaggaggaaacgatgatcaacgagaaaaccagagtcgggacagtgttcgatgggacagactcggccggacctgaggccgggaagaagtccatgaatgaggaagcaccggagagtagtggtgcaagggacatcacggataaccggaacaatactccaacggcccaagaacagtgggatttgatgaagggaatgatggcgcaactagccacattgaccaaggccgttgtagctgatccggtggtcctaaaaggggataaccaaaaggacgatgactaggaagttgtggaagtgaatccacaaccgaatcatgggcggaaaaggggagactatctgagtcttctcgaacatgtctcaaggctgggcacgagacacttcatgggcagtacggacccgattgtggccgatgagtggaggagtagactcaagaggaacttcaagtctacccgctgccctgaggattaccaaagggacattgcggtccatttcctggaaggagacgcccataattggtggttaaccgtcgagaaacgcagaggggacgaggtccggtcctttgcggatttcgaagacgagtttaacaagaagtactttccaccggaggcttgggataggcttgaatgtgcgtacctcgacctagttcaagggaaccgcacggtgcgtgaatacgatgaggaatttaaccgcctaaggcgttatgtgggacgtgaacttgaggaggaacaagctcaagtgcgccgatttatccgtggactaaggatagagatccgcaaccattgtttggtccggacattcaactcggtttccgaattggttgaaagggcagcaatgattgaggaagggatcgaggaggagaggtacttgaaccgggagaaagcaccgatccggaacaatcaatccaccaaacctgcggataagaaaaggaaatttgacaaggtggataacactaagtccgatgctaagaccggggaatgcgtgacctgtggtaagagccacagcggaacttgctggaaggccataggtgcatgtggccggtgtggaagcaaggaccatgcgatccaaagttgcccgagaatggaaccagggcagtccaaggttctcggtgaagagacaaggacttgtttctattgcggaaagactggacatctaaagcgagagtgccctaagttgactgcggagaagcaggccggacaaagggacaatcgcgggggaaatggactgccgcctcccccaaagcggcaagccgtggcaccgcgagtttatgagttgtcggaggaagctaacgatgccggaaacttcagggcgatcactggtacgttctcacaactccctattcattatttcaataactgcattgcattgcatcatgcatatgggaaaggggaggtactcagcattctaagggaatgtgtagggaccttgagagtaggtgacgtagtaacgcacactctatttgattctggggctacacattgttttgttagtccagaattggttgaaataggtgggttcaggaaagaaccaaacaccgattatggaatggtacgagcggccggcggacaggcaatgtatccgaccggacttgttcggggcatctcggttgtagtgaacggtgtcaatatgcccgcggacctaatcattgttccactaaagaaacatgatgttatcttagggatggactggttggggaagtacaaggctcacatagattgtcaccgaggacgggtacaattcgagagggacgagggtatgttaaaattccaaggaataagaacaacctcgggaagcttggtaatctcggcaatccaggctgaaaggatgctcgggaaaggttgtgaggcatatttagccacgatcacaaccaaggaagtgggggcgagtgcggagttgaaagacattccgatcgtcaacgagttctcggacgtgtttgcggccgttagtggtgtaccaccggaccggtcagacccgttcacgatagaactcgagcccgggacaacccccatatctaaagctccgtaccggatggcaccggcggaaatggcggagctaaagaaacagttggaggagttgttggataaaggattcatcaggccgagtagctcaccatggggtgcgccggttctgtttgtgaaaaagaaagatggtagctttaggctatgcatcgattatcggggattgaataaagttacggtgaaaaacaaatatcctttaccccggatagatgagttgatggatcaacttggaggtgcacagtggttttcaaaaatcgacttggcctcaggatatcaccaaattcccatagagccaacggacgtgaggaaaacggctttccggacaaggtacggccactttgagtttgtggtcatgccattcggattgaccaatgcaccagcagccttcatgaaaatgatgaatggggtgttccgggatttcttagacgagtttgttatcatcttcattgacgatatacttgtttactcgaaatcttgggaagctcaccaagaacatctaagggcggtgctggaacggctaagggaacatgagctatttgcaaagttaagtaaatgctcattttggcaaagaagcgttggttttcttggtcatgttatctcagaccaaggagtatcggttgatccggagaaaatacggtcgataaaggagtggccacgaccaaggaatgccaccgagattaggagttttctcggactagcggggtattaccgaaggttcgtaagaagttttgcgagcatggcccaacccttgtctcgactgaccggaaaagacaccgcattcaactggtcggatgaatgcgagaaaagcttcctggagttaaaggccatgttgactaatgcaccagtattggtcttaccggaggaag

SEQ ID NO: 162008 - DNA, 332 bp, Arabidopsis thaliana landsberg
ctcaaactgttatattcgaagatttcacacaaatgcagggcagctaattctataatggtgagtttttaatgatattcttttacaggttcattgataatccatatatttgcaaaagtgcgtaccttttagcagacatatcttgacaactccgtggcgcagcgcgcggtacggctggtcgccgaggggatcggcggcgcgccgctactgccggccgaaccggcgctgggcgacctcgtcgccgcgaccagcgcgggacaggcgctgctcgagaccctggcctcgcacctcgtgttgcaaggcaacagcatacgtccaggtgataaagtacgagt

SEQ ID NO: 162009 - DNA, 2844 bp, Arabidopsis thaliana landsberg
tataaatccaataactctagatttatgaagattttaaattagtttttataaatcttaaactaataataccaaactttaacaaattttttaaaaatcatgattgaataacaacagattctccataacatattaactcattaatactctatttaaatcacaaaatcaataacacctcctaaatcagtagcagattttcgaagaaccttaataaaaaccaaaccctagatccatagagtgctcggcaattgaacgtatactcatggatatgacaaccgattcgatgaagaaagaggagacacaaaaaatgtatgagaatcatgattggtccaagctttgatctgatattttgacaaagatcatcgaaagcttgagctctctagatttttaccgagcaaaaattgtttgctcagattggtactccgtttggaaaacatgcgtaaagcggcctcgatgtccatggcggatcatatatagagcaaagtattatattagtacttcattgatgttgttcgatcccgaccaagacaagatttataagaatcttgtcggagtttctgacgagagctactgtatggctagctctggaaactggctcctgatggttgatcgttgtctcaaattctatatttataacttgttgaccaaggaaaggatcgatcttccatcaatggagtcaaaaatacgtggcggacaagtaagcttcaaacctaaaagcaacaattacaattttggatacttggtcgggccttctcgtaaggatgatatagtgccgtatgactatgaagccgttgaatggaaaaaatcattagctattctgtgtgtagacgagacaacatgagattatgtcattgcttagacttttatgcggcaatacttgttctcatacaagaaaggagattattcttggtgtaatctgaatcataatgggaaaagtttggttttgtttgatatggcttgtgacaacaataagctttatttgttgacaatggatcatcacatcaagattttaaatttctatggagattttttaacaggagaacaaaacctgtatccgtttaacttcgttgaggatccgacggaatacgtttggaagaggaagatagtgatttggagatcaggagaggtaccgatagtcttgagcttaaaaaaaaaagtgtaaaatgaagagaaacttttgttttacatctttaagatgaatcttgagagtcgcaactgggaaagagtttactctattggagatgagatgttgatttttggtcgtgggattacagtaactctcgctcttaaagatcttggtcacggaatcaagagtgattcaatctatttcgtcgacgaagatgtttggccagatcatcaagaacatgatcatcgtgtttcgaattgcggtgtcttcgatattgccacaagtaagatcgaatggcctaagaagatctattgtttcattaatcattgttgtgggagttgcttattaggagttattgagtgtaggaagctaatataattttattgaaatttctagtgttattcaatgatttttgaactctatttattcttctaaaaatcaaggacatttccaaagtttcaaaaaaactcacgaccccgagttctctccctgtcccgattatcaagacctttttccgatctaccttctccggcgccggcaaggcctttggttgccggcgtcgggacctttgtctcagtgctctttgttgcttcttcaagatgtttgtctctctttgtttttggccattttctcaatcgtctcaacctttctcccctattctaattactgacggcgatagagctggtgctcgagttgctagttggtttccggtgaacctcctccctttccactctatgcccatttatcctccactgaatttgaatcgattggagtcatcctttagcagcgacacttcctcttttgaaggtgagatggaacgctccgttctgctcagatctatcgaccttggccctctctcgatctcctgcgttaaccttttccaccggatttcgtcaccggagaagaacggcggcattgacctaatttctattgttgtccctctgttggataacctcttttgccaaatgggcccgaacccaactctcttctccttaaggcccaactccagatggtgtcctccaaacatttatctgcaaaagcccaggtttcttcttcttcttccgttgctccttcttagacaaatcttgtgtcgatttatgaaaacaattgttagtggacgacgattggattcaaatcaaactgaattgctaggttggtgtaacctttgttcgagaaactggccactagattcatctaggagggttaaccttaattttcaaagtttgcagaagacttttcccgacttttccctatgccaaggacagttgaaaagcctgaggaagtgcggcattatgatctcgtctctacagagagttgattaccgcaacttcctcaaccccctttagtcgtatcccctgtttaccgagcttaaagatgtacaattcttcaacattagtgaatacccccatctgctcaattctgtgaagttcaggtctgtctaccctatttacgtgtcaagccggctacgaactttgtgtagatttcttaatctctatggcattcgctatgcgagagagaacatacatgttatgttacgactttacaatcgttgtttgcgatccctgatgttaacttcacttagtatcttgagttatgaccttgttggcctgaagggctttgttattcaagtgggccacttccattacctctcctcgttgctaggacttggctatgctcaactctcaacctacaacaaccctagcaaacaatctaaagcttag

SEQ ID NO: 162010 - DNA, 420 bp, Arabidopsis thaliana landsberg
  unsure (1)..(420): unsure at all n locations
ggttaggatttgattagaattgttaggcatgtggatttagtttggatgatcatggcaataggctagagaatgttgggagttcctttgttttcaaaacctcttccacgggttcggcttttgtgttttgcttgagggcaagtaaaagctaagtctggaggagttgatannnnnnnnnnnnnnnnnnnnnnnnntatgttttaggtataggattttaagtctttatgttatttctcgagtctttttagtgtcttttcaagaattctatgcaatgggacaacaatggagataaggagacattttagaggaaaagctaaggtaaaggaagctaaggacgattttggctcaggaatcagcgaggagtgtcgaccgacacactcttggtgtcgatcgacaccagtttcggcccaacaaaaaccctag

SEQ ID NO: 162011 - DNA, 887 bp, Arabidopsis thaliana landsberg
tttttgaaagaggcgaaattcgagcaagtgatcccgccggtgaagatcgacgacggcgaaggcataacttacaaaaacgcgacggatgcgttacggagagcagtttctttctactcggctttgcagtcctccgatggccactggccggcggaaatcaccggaactctcttcttccttcctccattggtatgtttctttttcgttttcctttcgattcttacttgatatctaccggcgaatactcttagggttctaattagggatttatatagtaataaggaagaagaatcacgaagagaattgtccttcctgcaggtattttgtttctatatcacaggacacctcgagaagatatttgatgcagaacatcgcaaagagatgcttcggcatatctattgccaccaggtatatatacttttagttgtaaaggtcactaatctcgaattaatgtactcttacatgagattatatatgttttgtctttttgcagaacaaagatggtggatggggattacacatcgaaagcaagagtgttatgttttgcaccgtgttgaattacatatgtttacgtatgcttggagaaaatcctgaacaagacgcatgcaaacgagctagacaatggattcttgaccgtggtggagtgatctttattccttcttgggggaaattttggctctcggtaaaatcttttgagccatgtatattttgttaacttaaatgggagatgttgaatgcttaaggttctatatataaaccatcagttggttttctatatctagatacttggagtctatgattggtctggaactaatccaacgccaccaaaactaaaaatgctgccttcttttcttccaatacatccaggtttgatatgttctgctgattct

SEQ ID NO: 162012 - DNA, 2885 bp, Arabidopsis thaliana landsberg
tctatttagttttgattgcatacccgtgtgcgattcaaggaaggtagtgaccggaggagcctccaaaacgacaccgttgtggtagagaaatctgcaattcgacatttttgcttctctcttccttgaggaaattagataaaacgggaaaagagaacgtttttaaaaaggaataatccccaaaacgacgccgtttaatagacataattagggtttaagcttccttttttttttttttttttggtgtatctccgggatttcaagttgtctcttttatttatttctccgatcatcttttctctgctgaagatagttgagagaagaacctcgaaagatgagatctttattggtttttagaaaaatcccttcacggattcgtcttcgtaacttgagaaacaataaacccttttgttcacagtctcagtttcccaaagaatctgagaatccaagtcagagcagagactactagtttacggatccacttgtgaagaaaacccagttacctccaaagtgagtattttgtctgcgaagcctgaacagaaggacgatgcatctgtaatcgatgttcttctcaatcgcaggaacaacccagaagctgctcttcgtttctataattgggctagaccatggcgtggaagttttgaagatggtgacgtcttctgggtactcattcatattctggtcagttctcctgagacctatggacgtgcaagtgatttgctcatacggtacgtttctacgagcaatccaactccaatggcaagtgttttggtcagtaaattggtggattcggcgaaatcatttgggtttgaagtcaattcacgagcttttaattacttattgaatgcttattctaaagataggcaaacggatcatgcggtggatatcgtcaaccagatgttggaactagatgtgattccattttttccatatgtgaataggaccttgagtgctttagttcaaaggaattcgttaactgaagctaaggaactctacagtaggatggttgccattggtgttgatggtgataatgtaacaacgcaattgttaatgagagctagtttgagagaagaaaagcctgcggaggctttggaggtttttagtagagctattgagagaggagcagaaccggatagtttactgtatagtcttgctgttcaggcttgttgcaagacgcttgatttggctatggctaatagtttattgagagagatgaaggagaagaagttgtgtgtcccgtcgcaggaaacttatacttctgtgattttggcttctgtgaagcaaggtaatatggatgatgcaattagattgaaggatgagatgttgagtgatgggatatcgatgaatgtagttgctgcgacgagtctgatcacgggacactgcaagaacaatgacttggttagtgctttggttttgtttgataagatggaaaaggaaggcccctctccgaacagcgttactttttcggttctgatagaatggtttcgtaagaacggggaaatggaaaaggcgcttgaattttacaagaaaatggaagtcttaggtcttactccttctgtctttcatgtccacacgataattcaagggtggttgaaaggtcagaaacatgaagaggcactgaaactctttgacgagtcttttgaaaccggtcttgcaaacgtgtttgtatgtaacactatattatcctggttatgcaagcaaggtaagacagaccaagatacagagttattaagcacgatggaaagtataggtattggaccgaatgtagtttcttacaacaacgtgatgcttggccactgcagacagaaaaacatggacttggctcgtattgttttttcaaatatactggaaaagggtctaaagccgataactacacgtatcccattctgattgatggatgtttcaggaatcatgatgaacaaaacgctttggaagtcgtcaatcatatgacttcttccaatattgaagtcaacggggttgtataccaaacaattatcaatggtttatgcaaagttggtcagacatccaaagcaagagaattgttggcaaatatgatcgaagaaaaacggttatgtgttagttgcatgagttacaatagcattatagatggatttttcaaagagggtgaaatggattctgcggttgcagcatacgaagagatgtgtggcaatggtatttctccaaacgtcataacttataccagcttgatgaatgggttatgcaaaaataacagaatggatcaagcattggaaatgagagacgaaatgaagaacaaaggtgtcaaactcgatattccagcctatggtgctcttatcgatgggttctgcaaaaggagtaacatggaaagcgcatctgctctgttctctgaactccttgaagaaggattgaatccaagccaacctatatataacagcttgatttctggatttcgtaatctgggaaacatggtagcagcccttgatttgtacaagaaaatgttgaaagacggtctacgatgtgatctgggtacatatacaacactgattgatggattgttgaaagatggaaatttgatcctggcctctgagttgtacacagaaatgcaggcggtgggtcttgtccctgatgaaatcatttacacagtaattgtaaacggtcttagcaagaaggggcagtttgtaaaagtggttaagatgtttgaggagatgaagaagaataatgtcactccgaatgtccttatctacaacgcggtgattgccggacattatagagaaggaaatctcgatgaggcttttagacttcacgatgagatgcttgacaagggtattttacccgatggtgctacatttgatattctagttagtgggcaagtcggaaacctccaacctgtacgtgcagcaagtttgtag

SEQ ID NO: 162013 - DNA, 3763 bp, Arabidopsis thaliana landsberg
  unsure (1)..(3763): unsure at all n locations
ctaagcgatttttgggtctgaggagtcaaatgggcggagggggtatttatatggtccaaggtcggtgattaggtcggccaaggcaagcacgaggtggcccggaccaatcaaaacgttaaaattgtcgaccaacagccgctctgggacactaatcggcctccgattggttccttcccttttcggataaaaatcatccaaaagtggataaacacgaccttaaaaggataaagatgatcggaatgtggataagcatcggccctaacggataagcttgagctgcgattcaatccttgccatccattctctcatttcggaggatcctacgatctgtcaccggaccgcaagaaaattgagacggcattctccgtcactaatatctcaagagggtacgtgacacaagtcaagggtttctaaggactataatacattacatgccagaattaaccgagcaggccagttatcgtcacttatccgcattgtccgatcaataccttgaccattcacgacccatactcatatcccactgcccaaatggattcccctatggtctcctagtccttctaaggtttcctagtccttctaaggtttcctaaaactaaggttttcttaagctatcctaggtctaagggctagcttaatggtttcgaggtttaccgatagtcgcatcgtagctaagcttagtccgtctgatggagagtcattcctttacccgtagacttgatccattgcaatgctccttacccatgacttgccccatcaannnnnnnnnnnnnnnnnnnnnttttcatggcttgatctcgcattttactggatagactgcacgtccggccgtatagtcaaggtcaggggcattacagtcaatgtgatatcaagggagttacacaccctcaactctcaccccggagattggatcgaacttggaatcgcagaatttgctcgcatcccggattgtatgatgctcattcttgacatcgccagtcaaggggtccaagtgttttgcaagacgcgaagagtctcctagtttgaagtgtagacatgccgagaattcatttttatttgtcgtttttaataaatgtaactttgcttcttgttttgtacgttcgcacagccaaacttctttcctcttgtttgttcgcacagtcaaacttcctttcaaatgaataaaacaattttcattaatagctgaactcgtttccgagctgcctacgtaccctttttcgggatcaagccacaccgtagttcatgtacaaaaaatgcgtgtcacttttaaacataaaatttctttaagttgaccacattccaaggacgctggactgatctatcttctaaatccttcaatctataaacaccattccggaccacttcggtgacgatgtagggaccttcccaattaatgccgagctttcctgctccttcttccttcttgttatcaaacacacgttttaaaacatagtcgcctacaaagaatggactgcttttgattttcgaattgtaataccgagctgctgcttgttgattattctgaattcggattaaggcttgatctcgcctctcgttgatggtgtctagcgagtcgtctagcattgctgaattttcatcttcatttaaaaagtgataataggtttttcagccaattatcctaaaataccaatcatgtcgttgtagtattttaggttgcaatccaaatgagtgtgatgctaacaatcaagatttgatcagaactcactaagtcaagccaaacaataataggttttggggtttctagtaggtctaagtgaacatgcagaaaacaaaaattcaagcagaaacagttaaaacactcgaccaacacagctcgttgccaagcactgggtgtggtcgagtgacaggtcgagtaacagacagaaaatgtaacaggtattctcgactgcacagtctcttgccagacaactgggtagttgccaaacaactgggtggtcgagtatcacgcaaaaaatgcaaaaagtaaacaacatgcagcaagatgcagtaaacaaagcagattaaacaaagaaatcaattagatgagaaagtcccgaggatggggtaattgagtagtttcgtttcctcagtttacaggtgattgacatgctcaataaattatccctagaaaacaagttcgataaccaaatctaaatgccaccgcaacagagaccctcaagttaaaccagtcccagactcaatcaccattgacgagagctaacctaacaggcattacgaatcaacaagtaaagccaaaacgctccttgtaaccaatacctttgtacagagccatgaatgtctgggctcaaattccagttgatcagaaagcaataggcattaagaataactaatccataagggatatatcaatcaatactcaatcacctagcatactgagaattctacactactctaacccatcctcagaaacctattcactactcagacatcataacagaaagcataaacattgaacaagttgaaaacatgctaacaacagggtaacaaaaggatgataacagaatgaacaacaataaacgaaatcaagaacaaaagctgaatactgaatagataaagagaaatccggattacaaaaagtctagaacacaaggtctgcggaaataaaactaggtaaaaaacttcttgtctgcgaaaatgagaagtacatgctacttatagccaaatatcccgaaaccctaatactcaaaacgacgaagtatttggacgggttaagaactgtactcgacccaggtggtcgagtgagaggtcgagtgaatagctggagtcttcttttcttccttgtgctcgagtgtctggttgagtgcggaatgaagaaggctctgaagcttgtcatcgagtatgcagtcgagcggtgtgatggaggtactcgacctctaggtagagtgatgaggtcgagtattggtctagcagtgaaggtgaaagcactcgacctgggggtcgagtgaggtgatcgagtggtgtcagaagatactcgacttctaggtggagtgaagaggtcgagtggtgaagtgaagtggtgatgtcctatgctcgacctgggggtcgagtggtctcttgggatcttgaagctcctgctcgacctcttggtcgagtggtttgtcgtgatcaggtctgcttcttccagatggctcgtcaacagctccaaatcacctgaaatcaacgcaaatatgcaacatgcatgcaaaactatcctaaacatgcaaagtggtgacaaatgatgtgaaatggtataaaacagtgatgatatgatgctaaaatgatgacaaatggatgctcaaaacatgcaaaatacacacttatcacacttcagggtcgaattccactgagctctcgctgttcaaacaatagacttatgatgttattgaatgaagtaattgaatgtaaatgacaaataaacaagtaaacgagttgtagattcaagtgattaaagcatcgggtctaaggaattgtctcgggagatagataaattgtagatctagctaatattaggattgttatagcacagataaataactcaaactatgattctagagtaacctgtggtgttctgcgaaactttttatacttagagctaagataaccggagaagccgagaaatcttatactaaagcatgcatttttatcaagaatgattagttcacctagtatctaaactagagcccttctatgagcctatctgttctttcttaaatgcctaggctcatctatgatggatcaaatagcaagtacctatggtggacat

SEQ ID NO: 162014 - DNA, 431 bp, Arabidopsis thaliana landsberg
tcaattctaacaatatttgaatccagaacaatagaaaatagaaacagacctgcacttccactgaatccagacacgaactcacggcgtttgtctcgtgcagaaacatactcgctctacatacaatttaaaaatcgaaactttcactcaaatcaatgaacaatacatgattaagtaatagtagacgtataatcaagtaatctgagatcggatcatgaatcaaaaaagggtaattcaattgaaaataaatcaaacctggtgatagtcttcggaaggaacaaccaaagcatcaagaggaggagagtgagaggccattagtgacctcaacgaagagagaatctcggacatggcgatgtttggagttcagagaagaatttgactgcttcaaggacgaacagaacacagatgcagcagcagatagatataaaaaagta

SEQ ID NO: 162015 - DNA, 1047 bp, Arabidopsis thaliana landsberg
acgtccaccaacgctttggtgaagcagccgccaaacgaaacgactccggcgataattgtgttcggagattcaatcgttgatgccggaaataatgacgacattatgacaacgttggctagatgcaattatcctccttacggcatcgattttgacggtggaattcctaccggaagattttgcaacggcaaagttgcgactgattttataggtaaatttcacgttgctttctcagatgtaattttgattatatttcgagaatttccccaatagataacaactaaacacacacttttagttgcatttgtgttttgtgaacactctgaaaacttctcaagcctgtaaactgaaaagagacaaaaaatctatagaaagccttttatcaataaaaaaacaaaacaaaaaacttatataaaagtcatttattgtatcgtacgtagtgctgaataatatctaagtgactgactagtgttaaaactgttaatatgtatgtaatttacattattgactaaagatatacgtatggtacacaaaaaaactccagaaaatggtaccatcacaaaaaaaaattattatattttacacaaatgatctttcttttttttccaagttttcaatatgtgtcattttcttgagatataaaaactcaaaagcgaaacatcaaagaaattaaggacaaatgatataaatttatataactggtaatagttattttctcttgcaaatcatagcgggaaaattcggaattaaaccaagtataccggcatatcgaaatccaaatttgaaaccagaagatctcttaaccggtgtaacatttgcgtctggtggtgctggttacgttcccttcacaacccaattatcggtaatcaaacttctaaatcttacactatctataaaacaaaatatgattacttctaagctgtaattagacgtacctttttatatataaaccattgttgttcttaaagggaggaataactttatcgcagcaactgaagttattcgaagagtatgtagagaagatgaagaaaatggttggggaagaaagga

SEQ ID NO: 162016 - DNA, 2700 bp, Arabidopsis thaliana landsberg
atggcgtctttaaggcagctgaaacaagtgttctacatcagcaagtggccaaggtgagggtgtgatctgcagagattcgattacaagtttctatgtttatgcttcatgattcattgcataggaatagatatgtttgcttagtaataatgaattgttataaaggattggcaatatgatgattgttctagtattataggatgattgaattattgtacttgtgataacaagtaattatatgtgccatataagaaagtggaattaccatcttttgagatgatgaaaagtggagcagtggaaaatggtctacattaaattgatgggttctttgtagctcaataaaagactggcgagtccagtggatctagataggttcaaaggtcaggggagatgatcgatcctggtattgatgtagagagctttcttaagcaagaatgagatgtgtgttatagtcttgcatagtgatgcatactatatgagtgttgtgtctttttctatgtgattgctgattgtgttttaaaggtagaatcgcgtatggtacttccactgggcggaaaagatcctctcactgagtaattctttactcaccccttttcctccaggtcacggtgagaatcgtgtgtagtcgctcaagtccgtcttgcttatggtgtattttttgaacttcgggtttattttctactattgttattttcttatacgatttattaaagagttttcaatgatttaagattatttttaagacaattttgttttttaattaagaaagtggaatagaggaaagatataagtaaggggaaagcgcgccgtctcaatgttgaggaagacgggcttgacaaatggtatcagagcggaggttaaagtcaagccggtgctgacccggaaggctaagtcgaagagttttcttaaaagattgattttaacaaagagtttataaataaaaaaaattagtatttgataaacgtgaagaagaattttccaaaatataaagagcattaaaggagcgagactggcgttaaagttattttgtacagtttaggttttcatagagagcatatcatttcgatggttaaagtagagaagttatagtggaaaaaaagcagagtcgattcaaagtttgctaggaaagagatagaattcatgagatatagtggaaatcggaaagagtaatgcaggtagactactacccagaatttttaagaacgacattgctcaacaaggaattttgaattcggggacgaattctccttaagtgggggagtattgtcacaccccaaacccagtcccttgaacgcaccctattttgttaaaaacaaaaatccatggagcccattgaagcttaagtgaagcaaattgcaaaataaaagggtttacacatgtgtatgtatatctatctccttcttagtcaccacttgagccaccatcacgaccataaaccctaatctaagagcagccacgccatagttatccagagaagagaagacaagtctcaaacttaaggtggaggagatctgtgaagagaggaaaggatcgtggagaaggagaagcgacggaagagaagggatcatcaccaccgtgaaggaaaaacattgggagagggagatttagttcaaaacagtaagggggattcacgctgaagaagatcaaagcatcctaggcgggggcaaagcaaaacagaatcaaagaaggaaaaagatgaagggaaaagtgcagtttcaagttggggttttgcgaggctgattcccgtcctacgagaaaacgttagatggtgaataagacgtctttggaaaggtcacagttccatgaatccacagcaacagacggagtttgaattgaggttatattcaagaaatatgagcgtttcttcctagataagtaactgcagaatctggtgaacttggaatcccataaatctatttccgattggcttcttcgaggcaacgtttgaaggtctgcaactatgctgatcgggacgaaattcggtggagagcttcatggtactattggctagataatcacggagggattaaaacattaacggttcactgaagagttattagggcgtctttgaggcagctgaaacaagtgttctacatcagcaagtggccaaggtgagggtgtgatctgcggagattcgattacatgtttctatttttatgcttcatgattcattgcattggaatagatctgtttggttagtaataatgaattgttaattaggattgatgatatgatgattgttctagtaatataggatgattgaattattgtacttgtgatgacaagtaattatatgtgttatatgagaaagtggaatcacgatcttttgagatgatgaaaagtggaacaatggaaaagtggaactgtggaatagtggaaaatggtctacattgaattgacgggttctttgtagctcaataaaagactgacgagtccaatggaactagataggttcaaaggtcagggagatgatcaaacctggaaatgatgtggagatcttgcttaagcaagaatgagttggtatgttattgttttgcatagtgatgcagactatgtgagtgttgtgtctattttctatgtgattgttgattgtggtctaaaggtagaattgtgtaccgtatttccagtgggtggaaaggatcctctcactgagtaattctttactcacccctatcttttccctttttccctaggtcacggtga

SEQ ID NO: 162017 - DNA, 397 bp, Arabidopsis thaliana landsberg
atgcaagaccataccagggatttgccagagaggaattcccatcccaacagcaacttgagcagcaggaagattaacctcagcgatccactcggttacaggatgctcaacctgacatcgaacattcgattttcaagaccaaaatctttcattcgaaaaggaaaggtagctatggtgtgtatggaaagaaacctgtaagcgagggttaagctctaagaagtagtactccccagtgtccgtactatagagatactcaacagtagcagctcccacatagttaacactcttagctaaccttctagctgcttgttcaactttcttgatggtttcttgcggagctacgaaaattggaccttcctctatgatctgtgtgattcaacaaaccataagaaataaaaaa

SEQ ID NO: 162018 - DNA, 1358 bp, Arabidopsis thaliana landsberg
agtttcaatcggaattatattcgagaagatatgagtatttctttctgggtaagtaactgcagaagttgtccaaatctgtgttaagtataaatcaagaacagtgtgtgactactggttttaagtataaatcaatcaaggaacttatagtagatgacatattgtccatcggatttaagctccatccagaattgaccttagaagtttgcccagaatcatctcaagttgcagaaacctagatatcagttctaatgcaacatcttcagaagaacatgggagattcatgtaaagtccgatcgggatgaaacttcgtgtacttattcatgatactactggctatatatttaacggtgggattacgtttctaacggttagttcttgacttatgagtatgttactgagacagttttgtatggagtaaaccatgacaagtttttattgtttgaatgggaaacgggttcggttggagctgaagctttgcagaagcctttaggactcatggagtaaggttttggttgatggagaagcaaggtggagctcaagagtatgcagttaaagctcttatagtaagtttttctattaggagagaaaggagaatagagatgtggttcatcttcaactaggctaaggtgagggtggtatttgcgaaacatattatcattgtcttttgttatgcttcttgacgcatgatatgtaggcttagatctgattgcgtaggataagattatgtgatgatataatttgatgattattgattgatattgatggtgatgatgtctgactatgatatattatgtatgagaatgttaagtataagtatgtatatatgatgagtatgtatgtttgtatgaaagactggggagaatcgaggtatgggtcgtggtctccctagtgatgtggacagtgatggaccgacgggttaacagctagccaagaacggctgacgagcccgcaatgcatggaagtgtttgagccacgaaggccagcctccacttattaggttcaagtcgtcaccaggatgactggaccttacgatgtgtatgtttatatatatatataagatgattgttatgaatttgttgttagaagttaaagcacgtgaggttgattgcgtgtgtctaagtttatatgttatgatgatggttgtatagctttagaaagtgttatacgtttcagtgggcagagttgattcccctcactgagtattctttactcacctttttttttttccttttttcctcaggttagtaaaaatgaggaattgtgtgcaatattttgttcgtgtgtgaaatttaaaaaaatgttttggcaagatcagatgaataacatgccgtcttggcctatataacgggacgggtgtt

SEQ ID NO: 162019 - DNA, 248 bp, Arabidopsis thaliana landsberg
aaacactgttggaacataatcctgtaataacaagatctcaacagtcaccaaaagctatcaagaaaagcaatccaaaagagagagagggagagatggatttatatacagtggggaacgtgttgctggtgtaggaaataagaagacaagttttgcccacagctccatcgccaacagtgacacactttataaacgttgtagctgttgctgatgatgttgatgttgcagccattgaagctgacattgattga

SEQ ID NO: 162020 - DNA, 142 bp, Arabidopsis thaliana landsberg
ggaggttttttgcttcactctttgcttatttgggttctgggttttgattatttctacaaagtaaccacatttttcactttccggagatggagctgcaaacgatgaagataacgaaagattgtgtagttgaagtcagttctga

SEQ ID NO: 162021 - DNA, 183 bp, Arabidopsis thaliana landsberg
  unsure (1)..(183): unsure at all n locations
taaaccacttttcaaatattgaaagctacgttcacatataacacaatcaacttccaagtaaaaactctggaagcaacaatatgtttctaacaaaagttcgataaaagtcctnntcgcttccctgctatctaactttgaatcctagtttaataaaacattcaagatccagncaacagagnagta

SEQ ID NO: 162022 - DNA, 124 bp, Arabidopsis thaliana landsberg
gcaaatagaccatttttgaattgccatagaatcatatttttttcatcaagataatattgtttggtaagatgttatctacttaagcgatcacatatcatgtagcattagcacatcttagtcaggt

SEQ ID NO: 162023 - DNA, 135 bp, Arabidopsis thaliana landsberg
gagtgcatttcccggtttatgccttgggcttggaagacaggttttctctgttattaatagttggccattcacctggttatgcgtttttgtatacatgtgactgcgtttgcaattgtgttttgtgagtttgcttag

SEQ ID NO: 162024 - DNA, 383 bp, Arabidopsis thaliana landsberg
ttttggtttctgtaatttaatcggagcaaacttcaataatagtaaacaaacaaccttttgtttaacaatgtccctaattttattctgtgatttcgtcattacacatctaagatctgaaaacatgagctcaagaactgtaactcaaatatcacaaactctccaaaacacataaacaacaaacacattgacattgtcagagatcaaatctaagggtttcttctctaagaaaaaaaacaaccatggattagtctcgaagttacacaataacagttcctcaaacgaagctaataacttaaagttaccggatacttgtcaatacaatcttcccaaggactgttgttcgaaggtttcacatgccttaatgcttcccaaatcgcgctatt

SEQ ID NO: 162025 - DNA, 285 bp, Arabidopsis thaliana landsberg
ttgggtttgtaataatagcacttcaaaaacctgattgaaatttgattttaaaacccatttggtatacagcgcagcatattggaaagatgaaagcaccaaaacaaacagagagacaattccatcaacaaagcgaatgagattttgaatggcacactgaaataaagttgcaatggacgtgttcgctctttaaggtttcatgtatcgatcttaagtagagaattgagtgaagtgctgttgaaccgctgagcaaagccgcgaatgacaagtactataacatcgcggaga

SEQ ID NO: 162026 - DNA, 427 bp, Arabidopsis thaliana landsberg
ctaagaaacatcacaaactctcgacttaatactccgattacaaataagagactgacaaactttcaacccttcactcagttgctagattgacgcaactcaggtcgaacaaagtctgcatcagcagctacagagatatcaacgtaggcattgagctgtgcgcagacctcaatggcaccatggactggatcagagaagaagttactgattaggtctctgttgattgctgcaccactgtccacagccacaagagcttgttgggtcaggatgtagtcaaaccgtggcgcccatttcctcgaacccaatcttgctgtggttgagcagttgtcaaccatgaaggacactcccctggtgtgcataaatgggtttagagagtccacggattcaatcacactctcgttgatgatttctgagtaagagtgacctttct

SEQ ID NO: 162027 - DNA, 85 bp, Arabidopsis thaliana landsberg
ataagaaagtgtggaaaggccacttgtggtgacttgttttatttcgtgggaatttgatagtaatgggatctctttgtaagcaaat

SEQ ID NO: 162028 - DNA, 502 bp, Arabidopsis thaliana landsberg
tttattataagtcaaaaacacatatgtaacaacatatttcttatcacagtgtttcattgcaaaatgtatggaatctgcatatcctcaatttacaagacaatggtacagaatagtatagaggagcctactttgaagatattgagtttgattcttgtgaatgttatggcgaatggagacacaacgacaacatctgggacttctggtgatcgtcattcactttttaactgttcctgaaataaaagttactacaagtcagatcaaaccacagataaatcccagaaacaggatttgctcatcaaaaaaagaaagatacaggtcaaatatgtgaattttcgttttcaagatccaagtttgtgtactgcaagcagagtatatagatacaaccatgagtatttagaaatggcgaagtcattaacctaagtttaacagagtcttttcgcttgctgttgcttcacattacacagctacagctgctggtcgtttgctggccttaattcctttt

SEQ ID NO: 162029 - DNA, 190 bp, Arabidopsis thaliana landsberg
atatatcatacatttttaaaaatcggactaattctatacaaatgcagttccaaagagtacacagagagaagacaaataacaacaaatgatactatacatttttcatggagtctctatgagacaagactccactctgtttctcatatatttgtcatgttttacatttgagactctagaaactccaagatgg

SEQ ID NO: 162030 - DNA, 136 bp, Arabidopsis thaliana landsberg; identical to SEQ ID NO: 57690

SEQ ID NO: 162031 - DNA, 307 bp, Arabidopsis thaliana landsberg
acgttacctcatggtgtgttctcttgcgaaagctcttgtttcgtcccagctcatcaatctcttgacccgataaagtctccactcgttgagctccggtcgccgggaaagaaaaagatacgtgacggcccaggtttccttcaaaaaccggcgagaacgtccgcaattctcatgaacgcatagatgagtattcagaagcatcagtcaaatacaggctaagcccctcaaagctcggaccagaggaaacgggtttggtatgttagggtccctcatgaccctgatgacataccgtataccaaaaaaagtagaa

SEQ ID NO: 162032 - DNA, 212 bp, Arabidopsis thaliana landsberg
aaattataaatattttaactttatcaaaagttaaatattataattttaaaaacttttaataaagtttagctttaaaaaatgttttaaatatttataattttaaaacatgaagttttaaaaattacagattgaattaaacaaaaaatttaaatattataaatatatatatatataatatattaatacggggcgatatatacaggagaaatcga

SEQ ID NO: 162033 - DNA, 160 bp, Arabidopsis thaliana landsberg
ttttctcttttatttatcttctattttttttttttttttatttcttattttttttttctatttttttttatattttttttattttaatcttttttttcttttttacttctttttatatttttttttttttttactttttcttcttttatttttttttttt

SEQ ID NO: 162034 - DNA, 738 bp, Arabidopsis thaliana landsberg
ggagcgttctcttctctccttgagcttctcttaccgccattagagctccttcacaaactcataaacctatttgttgagccaggtatcatcatcacctctcgtctgctcacaatttcctgtttgattaccgattctctgaatcgtagcttgttgctctgcgttttgatcgatcggagctaatagtagtttggattttagtctaatcgatctctctagcgaatgttttttggtcttcgattgagatgatcgattcctctttgttgtttccgcttgtatttggtttctgcgtatttgttcttcaagcatggctaatcactgggaaattgaaattgttgagatcgttcttatctgtttgactggattttatgaaacgtgtgtgtactctatggctcattgtttgtttaagtaatcggtcttttaaaggatttttgctatgaagaacaatgcttaattcgatttggaaatgactagcttgaaaattggatctatcgatgcagattaatgtgaaggaaacatagaaactagttgtgataagctgggttgcttgtttaagctgacatttactcaatagttagaatcgtgtggaattgagatctgtggctaaatttgagtatcaagaaatcgttttaattgccactatatgcttgtttcttccatgaaatttatgctgcatttgaacattgctgtgataattttgatggaggcaaggatagacatttgattatgaactgttgttgt

SEQ ID NO: 162035 - DNA, 64 bp, Arabidopsis thaliana landsberg
ctgaccgtttcttcactcctaaatccaagccacaccatattgattctattcactggtaggtttc

SEQ ID NO: 162036 - DNA, 339 bp, Arabidopsis thaliana landsberg
tgctgttggacttccaatggaagttttttcttttagttattgctgagttatgccttcttatatatgtgtatgtgccttaaaatttcgcatctgatatggcacaatgatagactgttttaatgatcttggttatcactaggcacctcttcttggtgtgtggtgatgggaaacttggtttcactggtataagaagtgggtaatattctctattaatcgtatgtttctaaatatacaggtctctattatgacagcaatagtgggctttggtactcgtatgaccagcaaacacaacaatatgttccttgtcctgatcagaacaatgagagtaaagtaacagaa

SEQ ID NO: 162037 - DNA, 351 bp, Arabidopsis thaliana landsberg
atatgccccacattttcggctactaatgctataattttaaagagattcacaatttctttttttattacttttcttttccaacttgcaaaagcttaagcatattaaatattctttttttcttcctcaaataaaaatatagaatcagattctaatgcttaaggaatgttttaaatctccgacatgaagaagatgctttcccaaaccaatcttcctcttcccaatctcatcaaccacactcagatctttacatatctctaccttaaacctaaccaccgcttcttccctcttccccaatcgaatcttctcgaatcctaccaaatgcttcctcggcgatccgtgaatcgccggcgg

SEQ ID NO: 162038 - DNA, 102 bp, Arabidopsis thaliana landsberg
tcagctgtgctaaaaatccagagcgatcataaatgaagtacccattgagcccaaattttcttctctttcgatctcaccaatcttcgatttcgtgtttaaatt

SEQ ID NO: 162039 - DNA, 274 bp, Arabidopsis thaliana landsberg
ttcagtctatgtcttcatatcttcttcagcttttgacctctcaagccattccaaaaagcagctgcgttgatggctttcttaccaccaagctggacttctagtacctgaatcagcaacaccaaatatgagctatataaatagtagattagtgtctgattaccacatcacaaacatctgcttttcgtattaatagtgtgagtgggtctgtaatttggttgatttatagaacagtggcagtgtttcgtctatcggtttatctctaaagctgtacctt

SEQ ID NO: 162040 - DNA, 465 bp, Arabidopsis thaliana landsberg
  unsure (1)..(465): unsure at all n locations
tagagtaagagatgaaaaaccaaatgtcattaagtcagaaaagataanctggttggtgcattggtgtttagagattcttttgaaagggttcgtgttgtagttaagatgtaaccactggaaaagtaaaggctaataactccttgaagttttcagattcctaagaaaaagttcttggtgttatacagttagtcatcaacgtaaagccatttctactttctagaggatacaagtaacaacttcatatcagattataagcggtgtactcagactcagtgtaagaaaacaaatatgaaacaaaatcaatgcatcaaaatatcacatttgtggattctgaaaatagaaaagaacaaaaaataaatcctcaaaacactaattcagaagagaagactttagagtcgatggaaaaatttggagagaataaagaaacttcttgtctctctagtaacgaccaataccccaaaccct

SEQ ID NO: 162041 - DNA, 224 bp, Arabidopsis thaliana landsberg
  unsure (1)..(224): unsure at all n locations
ggggggggggggggggggagggggggggggggtgnggggggggggggggggggggggggggggggggggagggggagggaggggggagaagaaaaaggggggggagatggggggggggggggggggggggggggggggggggggggggggggaggggggggggggggaggggggggggggggggggggggggggggggaggggggggggggggggggaaaaggg

SEQ ID NO: 162042 - DNA, 355 bp, Arabidopsis thaliana landsberg
aaccctacacgttaatctaacacgtagctccataacttctgagggtgtagatgtgccaaacctatttactccataagcaacacctctatctgcatagaaacaggtcctgcctctactaaagacaagggaccaacaaagctcctagagaatttaccacttacgtgatgacacctcaaacaacaatcaaatactcatactaaaatttcaaattctcaaactaaaatttaaatttcctttcccgtcgggtttaacaatgacccgacataagaacgagtcgggcgctccggaaccaaactggcacgtggagaccttggaggcacttgttttagctgatgtccactacaatcgtagtaga

SEQ ID NO: 162043 - DNA, 136 bp, Arabidopsis thaliana landsberg
tgtgtagtttgattgcaataccgtaagtattattatgggttcaagaagaagaggatacatggtaatgacagatctcatgatataaagaacccataaaccatacaagctaacagcaagttcaccaatctctgtggtt

SEQ ID NO: 162044 - DNA, 617 bp, Arabidopsis thaliana landsberg
aaactcacatctaggagtgagattgtccctcaaactgaaaacataatgaccatcacgatcatcgtcccttaatggtggtgacaaaatcctcccatcgcttccatgtcctttaatcacagcccttttagcctatcacaaaaaagtcaaaattcattcattgtcagcatatcaaaatctcaccaaagaaacataaatgctcggtctttcctccacattctaaaccctaattcgaagttctaaatgtcaaagattaattaaaaaaagaagaagaagaaagaggagcaacctctggttcagctggggcctcgtcccaggtcatacgaggacgtttcctgactcgttctttatccatattctcgaatccgttagctatcatcaccgacgcggaaaatcgatcaccgacacatccagaacggaatctgatgccaatctgcagctaaaagagggaaaatttctaccagaaactctttacgtagatgtaatcacaaggcggcgaatcggggagaaggtgataatctccgaaaatggtgaaaacagaggaattgctagggtttggaactagagagagtgcaagagaaagacaactcccaataattttaccggccaaatcccttggg

SEQ ID NO: 162045 - DNA, 343 bp, Arabidopsis thaliana landsberg
  unsure (1)..(343): unsure at all n locations
cccccccccctccccccccccccccccccccccccccccccccccccccccgggggggggaatttgattgaaaacacaggcttcccctcccgggggagaaaacacccccccccccccgaggaagacgacagcgccctttttcccccccccgagtccaagcccccccccacccaacaaccccccnnnccccccccccccncnncccgccccnccccccccccccccccccccccccccccccccccccccccccccccccccccccccccccccccccccccccccccccccccccccccaccggccccccccccttctttccccccgctcgttcgcccccccc

SEQ ID NO: 162046 - DNA, 173 bp, Arabidopsis thaliana landsberg
tggcactctccatcgggatctggtacaggcatgtttgtagccacgggctccaagaactagctggtaaggatgtaagtatcccataatctttctattttattctatggtcggtgaggccccgtaaccagtctgtctcactaggatgttctatctgtacagatatcgaagaggcg

SEQ ID NO: 162047 - DNA, 125 bp, Arabidopsis thaliana landsberg
atgattaatgtctgaaaaatttgatatttgaagcgaatccacaacaacagtcgggttcgtgaaaaaaaaagatttgatcggctaaacttggtcggtatgattctcatctatctggttgaaattct

SEQ ID NO: 162048 - DNA, 367 bp, Arabidopsis thaliana landsberg
  unsure (1)..(367): unsure at all n locations
ctgttggttgttgtactttaaaagttggaaatgtggagtgtattcctccaaataaaataaaggtattaatttcatccttaaagttttacacttgtcaaagtggataacatgtgtttaatcctgggcagaagacttataatctcacacatttccctctttatagtttgannnnnnnnnnnnnnnnnnnnnnnnntatgtgaacacagtcgaggttgagcctcttgtttacaaggccattggacagttccaggcgggtgagatatggacttgacattgtatatcacaaaccctttccccgttgtgactgattcaaataacttgaaaatttaaatccccatccaggaaaatccaaaacagatgatctttt

SEQ ID NO: 162049 - DNA, 169 bp, Arabidopsis thaliana landsberg
ctcttatatagtttcccactaacaaatcccaaatctaattctttcagctaaaaatcttacatcaatcaatcgaattgtcaaaaaaagatatcacaacccttcttctgaattctcatttcttaagcttatacacttgaaatctccaaaaaggtaccatttttatgacttt

SEQ ID NO: 162050 - DNA, 312 bp, Arabidopsis thaliana landsberg
aaagtcattgtggagccaacggcaaatgggactagctctcttcaaaagacatcagatgcaatcagtggaaaggaagtgcaggagaatgctagtggcaaggaagtgcaggagagtaagaaagaagaggatactggactcgagaaaatggagatagatgatgagggtaagcaacatgaaggagaaagtgagacaggagataaagaggtggtggtttcagaagaagaaaagaaagatgtcggttgagacaaggaacaaccagaagcttgttaaatggatgaagacacagatgacaagaacttgaaagctgatgat

SEQ ID NO: 162051 - DNA, 371 bp, Arabidopsis thaliana landsberg
tattatcaaagagcgatttagagagatagattgagaaatggaaaagaagggtgcttcacaatggggacttgtggtgtttcttctagtgtttcttttggtcccaacacatacggagtcttccctgccttctcaacaagaatcactcccagtgatcggttagtgtttctctcacatattcatatatacattaacaaatcaatatccgtaaaaatgattatctaatctagaactcgaaaggaaattaaaactattgaagaaggtctttttggttaactatccatgttttctagaagaaaaaaccaaactaatttcaggagtacatacaattaccaattgaattcgaagtggtgaaattaatatggcttctatta

SEQ ID NO: 162052 - DNA, 158 bp, Arabidopsis thaliana landsberg
ttaataaaaatattttttatttttatagttttacaattggttattaaagtaacattctgccaaacccgtcccgccaacccgtcccgtaaaaaaaccatttattttattaatgttgatcttatttatgatatgtttatgaattattgtctaaatatttt

SEQ ID NO: 162053 - DNA, 294 bp, Arabidopsis thaliana landsberg
  unsure (1)..(294): unsure at all n locations
actaaagatcatataatgtttatatatatacagtaaaaacactataaattaatanatgttgggaccatgagattttattaatttatagtaatattaatttatcctataaattaataaaaaataatttataggataaaataataaatattaatttatagaaatatttacgtaaaatacaatactaaattctcttaaaaatattttttaatttagtttttcttatgttttgttgtttgtatattcaaatatgttaaaaaattatttttctcttgactttttaatttattttccccc

SEQ ID NO: 162054 - DNA, 343 bp, Arabidopsis thaliana landsberg
tcttactagattttaacccgcggtacaccgcgagaataatttattttttaaagttagtatatataaaattttacaaattgtatctatctataaaatatttttactttatagtttacaattgttattaagtaacgtccttccaaactcgtcccctacaaaaattatttattttattaatgttgattttgtttatgatatatttatgaatcgttgtctaaatattttagtcgatgcgggacgttgaacccacacatttttcgtcaattggttaatatattttcatttttaaaatttcgaatcacaagatatgacggaaaaaattttgatttttttttaaactcta

SEQ ID NO: 162055 - DNA, 502 bp, Arabidopsis thaliana landsberg; identical to SEQ ID NO: 2782
  unsure (1)..(502): unsure at all n locations

SEQ ID NO: 162056 - DNA, 125 bp, Arabidopsis thaliana landsberg
tattttatagtttacaattattattaagtaacgttctgtcaaacccgtccagtaaaaaaaaccatttattttattaatgttgatcttatttatgatatgtttataaatcattgtctaaatatttt

SEQ ID NO: 162057 - DNA, 102 bp, Arabidopsis thaliana landsberg
caagggctttaccccaaagggaaatacaaaaattctccaaggcccaagacaaacttagggttaggagggggtttagaaatagttttcaaccagcatagacgc

SEQ ID NO: 162058 - DNA, 374 bp, Arabidopsis thaliana landsberg
ctccaagtgagaaagggaataaccggagcttgaaactgtcctcgctaactccgttgatcttggtgagactacagagtctatcaaagttatcaagatgatccaatgggtccaacattggccgaccatggaatttgttcccctgattcatcgagataagaccactcttaatctcaaaattctcattctggacagcaggaggtgcaattcctttcctctgacggtgatcacgtggtgcatctccattctaatgttggcaggaccattttgctgattctgttcgtcagccatatcgagtggttgttgaggaacaaggttgactgtgtttctcctttctttgagttcgcgagctatgcggccgatgctgtcgctgaaaa

SEQ ID NO: 162059 - DNA, 209 bp, Arabidopsis thaliana landsberg
ctatgatcgaatttccacattaaccaatgaaaaccgcataggggccaagcgaatgcagaagggttctaacttaatcttaatcacctaactaaactagagaagacccgaatctagctaatcgatcctcaagaaccctaatcagtactcaagcaacattctcgataacacaaacccatcaattactgaaatcataccaaaatgtaaatcta

SEQ ID NO: 162060 - DNA, 530 bp, Arabidopsis thaliana landsberg
cccaatttcacattttagtttccattagaaagcttttttcttaaaaagaaatttgattttttttgttctgtttctgtgtttttagaatcttaagacaaaagaaaatgacaatggttagagctaatttacttatttatctcaaacgacccatcaaggccataacttcctgatcctatgaacaaccatcaaaaacaagaaatagccaaggccaaacccacaaggacatcagaacgatgtattaaaaaatacaaaaccagggtccttcataagttgccatgtcttataacttgcgttgctactccatgtggagccgttcaagacctcattcactggctttcagccgctctccaagtagccgagaagaccacgagtcagccgcgctagcataccttggacatggcttactcacatttgagctattaaacatcaaaggctgctgcgcttgagtcatttctgagatatcttgtgtctggggatcaggttgtattggaaggacaagaactgttgcaggaggatgaagagttgtagca

SEQ ID NO: 162061 - DNA, 353 bp, Arabidopsis thaliana landsberg
caggggcagcgagagcgcgtaaaaaaaaagtaattaaaacggtaaagaggataagatgtttgtctacggtaagactcactatacttattatacaccgactgtaaatcaacggtggaagatatgaagatcttcaggttgattgtttatccaccgtagattcgaatcagaacgttggtacgacaccgtactgtgcgtgtgctgcttttcataaacatgactaaggaaaatgtcgtcgtttctgtctctgttcttttcgcaaaccggcctttgatccttggccgtgactctgcataagctttcctcgaagcgtaacgaatcgtcttctcaaatttcctgttctttctcttctctct

SEQ ID NO: 162062 - DNA, 95 bp, Arabidopsis thaliana landsberg
ttcatgtcgatacggaagagaaggtaaactaacggttcaactagtgctgtacttatgggaacgcgctagggatggagtaaaaaaaaaacgaaggt

SEQ ID NO: 162063 - DNA, 283 bp, Arabidopsis thaliana landsberg
agaagttgttgctgatgggaagctatataaggtttgagatcgcatacatgattcaatacattaacaacgggtcatatagaggtaaccaaatatgatccttactaaccacactgagaatagtcattcgtcatagatacagcgcctggttaaagagcacactcacttacgggatatatcgacggtaggcattgtgacacatactggagcagacttattttaggaagcttgtgctcctctctctggctcattcgtctggcattgccaccttaactaatgagcacac

SEQ ID NO: 162064 - DNA, 438 bp, Arabidopsis thaliana landsberg
ttttccaaaatttgaactagatttcagcaactatttaaaacaaaaaatgtttgacaacccaaaagacaattgcaatcccttaaaatgagcaaacgcaactaaatacatttcttatcaattcactaaatcttatttctccaaaatttgaactagatttcgacaactatttaaaacaaaattttgtttgacaaactaaaacacaatcgcaatccataaaatatttattttaattataaatttcaactagcggggtaccgcggtttttttttacaggacggatttggcggaacgggtttggaaggacgttacttaataacaattgtaaactataaaataaaaatattttatagatagagataatttgcaaaattttatatatactaatttaaataaaataaattgtcttcgcggtgtaccgcgggttaaaatctagtgtat

SEQ ID NO: 162065 - DNA, 188 bp, Arabidopsis thaliana landsberg
ttccgttagggtagttaacggaagttaactcgaaggtaagattataccaactttttaaaaaacgaaagttttaataagtaaccaaaattaaccaaggtgtttttcttccaaattaaatagtagaggtattaaacgggaaaattaaaagtaaatgatggttttttaggtttctccctttacagatatat

SEQ ID NO: 162066 - DNA, 150 bp, Arabidopsis thaliana landsberg
gggagaggggggggtaaaaaaaaagaaggagggggggggggggggagaggggaagaggggaggggacgagggggagggggggagaaggggggagagaaggcaaggggggggggagaggaaagggggggggggggggggggggaaagaggg

SEQ ID NO: 162067 - DNA, 350 bp, Arabidopsis thaliana landsberg
aacgattttaatttaagcctatatattaacaacttcaaataattaagaaaacatgtttttaaatggtgaagccaatgtcagcgacggtgaacacattaggaaatgcattttctcaagttctaattgcatcaactgacgaagcaaaagaggcaatgagacaaggttgctatgattacctctctagtggtggtttttgcacgtcggggatgatggctctactaggtggcatgaatcctcgtccgctctctctcatataccatctatgtgctatcactttacattcaattggccatcttctatctccatttccttccccccttagcatttggcatagcctcaggctttttggt

SEQ ID NO: 162068 - DNA, 367 bp, Arabidopsis thaliana landsberg
ttctaaaatctatatctaaatcatagctaaaattagtagaaatagaggtatatcaactaccccagactttagcttttgcttgccctcaagcaaaacacaaaaacgaacccgtggaagaggtttgaaaacacaggaacttccaacattctctagcctattctcttgattattcaaaccaaattcatatgtctaacaagtctaatcaaatcctacccaccacataattatccctaggcttacacaacattccaaatttcatacctaagttccacaactatatccaacaggctttcatcgctgggtcttatcaagcaagctaatattcaagaactttctagactcattcttgcattataccatgataaat

SEQ ID NO: 162069 - DNA, 136 bp, Arabidopsis thaliana landsberg
aaccacaagtagaaatttaattaacctaaatcaacggtcacttttaataagtgaggctttctttatttgacatgtgacataagttttaaattctagttttttacttcttcttctctttaatacctatttatttacg

SEQ ID NO: 162070 - DNA, 197 bp, Arabidopsis thaliana landsberg
tcactctgcgggtgagcaacagttatcgttatttatttagttgagttagttcaagcatttatacaagattctaccaagtataaaatacctaagatcatgtactaggtggagttccaaacatacatgcattaagattaaactcaactagaaagaatagtgtaaacgatcaaactaatccatagaaaccgccaacctaa

SEQ ID NO: 162071 - DNA, 231 bp, Arabidopsis thaliana landsberg
tttaaactatcaccttccattgttgtaaaacatttgacagtttcttacatactattttttttcatatgttcaaataagaggttctgatagaacaatgcagctaaatttctcggatgtgcacaaagataatgttatcgaatcctccccttatcctcatcttctcatctgtgtacctacaaacattaaagtaagcatctctgtattagcaattcaaatgcatgattatatgtt

SEQ ID NO: 162072 - DNA, 490 bp, Arabidopsis thaliana landsberg
attatgatatgttctcaaagagtatctgtatatattccaaccatataacaaaagagagttaaaaaataacaagaagttttccctcatgtattgtactatcgttatgatttattcatctagaacgcatttatttgtgataatgtttatttgtagtactgtgttctaatttggtccttagctagggtccttggtcaaaaggccttattgtcattagactttccggacatcacagagctcatccacaccgcctcctctctcaaacacagcggctgctcccattcccgaacctgtgcggtttcccagtcacagtgagagtgttagtgtgtacgagagagtgggagtcaaaaggagagtgagagtgaacatattacatacctatacacattgacactacgccaaaacgacagtctttaccacgtcgtttcatctcatgcagcagcgtcgcaacgcatctggctcctgagaatgtgtagttgttagatgaggaagg

SEQ ID NO: 162073 - DNA, 703 bp, Arabidopsis thaliana landsberg
caggagattggattaaataaacagcactggagttttttatttgaacaatatatgtttttcgaggggtacaaagtctaccttcaggttgatatactggcagcagatgctgaagatttattggcttggaagggtggggtggagtctctgttcagacagctgaccttaacggttgatagcctgctcttttcatttgatttacagtaataaacctgctgtatatcagtgtttaatcatatttgttgtggtagaaaatataaaattattaaatgtttctcgattttgtttcttttcattcaataatgcagatagaaagagacactaatgggatgttaatgtgccatccccaaccaaatgagtatgtagacacggctaggcagtttctgcattgtgcctttttcatgggcttgcagagggcagagggagttgggggtcaagaatgtcaacagtttgatatacgtggtactgtcgatgagttcagacaagaagtaaacatgtatatgttttggaaacctgggatggatgttttcgtttctcatgttcgtagacgacagcttccaccttttgttttccctaatggatatcgaaggcctcggcagtccaggcaccaaaatctaccgggtggaaaatctggtgaagatggcagtgtttctcattccggctctgtggtggagaggcatgccaagcgaaagaacgatagtgaaat

SEQ ID NO: 162074 - DNA, 339 bp, Arabidopsis thaliana landsberg
tctcggtttcttctgtccagtcagagtttggctcgttccacgagtttggtctcacaccgaactggaaaaacaacgccatctccaatgccttaaataagttactttcgtccaaaaccttgttccatgccccactcactacacagtagttgctgttatacggtgcttggtgatgtcccgggtgatctttccgtgagacaagcagtcccatgtcctgcaacgccaccacgagaggtggaagcttgctcttggttccatgagcccaagcatggaattgttggcttaacaaaatacaaaatgcaaatgtgctcacaaagctatgaaacagaggattgttaattg

SEQ ID NO: 162075 - DNA, 181 bp, Arabidopsis thaliana landsberg
atagtctctactctctaataggtttcagcttacttgtttcgtggacaaccttcggggaagctatgttagtggttttgatgagtatggtttgaagctgcgttttacaagaagagtttctttcaaaggttttgaaccaaaatggtaagagtaaaacaatgtactgttccgtgaactgagcaaa

SEQ ID NO: 162076 - DNA, 143 bp, Arabidopsis thaliana landsberg; identical to SEQ ID NO: 56219

SEQ ID NO: 162077 - DNA, 136 bp, Arabidopsis thaliana landsberg
  unsure (1)..(136): unsure at all n locations
gggnggggggaagggggggggggggggggggngaggagggggggggggagggagggagggggggggggggggggaggggggggggggggaagggggggggggggggaggggggggggggggggggggggggggggg

SEQ ID NO: 162078 - DNA, 1265 bp, Arabidopsis thaliana landsberg
acaacacatctatatagataggtaaagacataatctcacttctcatgtcatttcatatctcaaaacacgacaatggcacaagatcagtacaagttcgttttcactgctaaagaagcagaatcggaaggcgtcaccgaacccatgaggcttccaaatctgatcggaaaggcgatgtcactcgctctggctccaatctccaaatacaaagtcggagccgttggacgcgcacgatcgggtcggatctacttaggcgtcaatgtcgaattaccaggtcttcctcttcaccactccatccacgccgagcaattcctcgtcaccaacctcgcactcaactccgagaaaggcctccatctgttagccgtcaccatctctactgacggtaacgatttcggcgcaccgtgtggaaactgccgccagtttcttatggagatcagcaaagcccttaacatcaaaatcctgctcaaatcaaaacatgaagcagaagggtcattcaagagccttagactcctccttccggacagattctctcccgacgatgtcctcccaaagggttcccctctccttctcgagaagcgccataactgcctcagcctttcgggttctgccgaagagatatgctcatcagattgttcccatttgaagtgcaaggctctagccgcggcaaacaattcgttctcgccgtacactaactctccgtcgggagtggcgctgcaggatgacgacgggaactggtaccgtggatggtacattgaatcagtggcgtctagccctagtttgggaccggtacaagctgcgctggttgatttcgtggctcgtggcctaggtaaagggttcgataagatcgtcgaagcggtgctggtggaaaagaaaaatgcgagggtgagtcaagaacgcacagcggagatgattttagacactatcgcagctccgaactgtgatttcaaggtcttccattgctacgaggatctcgtaaaaaaaatgaattatattacaataccggaggtagagaacggtaaaaaaggatacatagtaaggaaataatacgccagtaggggattacactggtcttcgttattgaactattttattatcctatcataattattatgctttgttgtcttcttggtagggttcattaaaccttttaataatgtcatagaatcataattatgttttgttttcttctttggttcatgttaccttttactataatttcagtgtagtaatcttaacatctcaaatcactttgtacttataaatgtcag

SEQ ID NO: 162079 - DNA, 237 bp, Arabidopsis thaliana landsberg
ttaagaaataatctaccaaagccaataagcagacaagccaatgtcttggtcgagtctacaaatctctggaatttgtagatttgacatccatttgaacgtcttttggacgctaaacgtctatgatcgaatctccacattagccaacgaaaaccgcatagggaccaagcgaacccagaagggttctaacctaatcttaaccacctaacttacctagagagtaccctaatctaatccatc

SEQ ID NO: 162080 - DNA, 281 bp, Arabidopsis thaliana landsberg
  unsure (1)..(281): unsure at all n locations
ccacaccccccccccccccccncccaccccccccttccccccgtttactctcccaaacaccnccccccccccccccccccccctcccccccctcccccccccncccccccccccccctcccccctcccccccccccccccaccctccctcccccccccccccttttctctttgtttccnccccccccccccccccaaaaaaaatccccccccccccccccctccctccccccctccccccccccccccccccccccccccccccccctccctccccccccc

SEQ ID NO: 162081 - DNA, 264 bp, Arabidopsis thaliana landsberg
  unsure (1)..(264): unsure at all n locations
ccccccccctctcccaccccccccccccccccccccccccccggggggttttnnttaccccacccgctccccctcgccccccccccccccccccccccctccccccccacncccccccccctccttcccccgtgtctcgggcgccncccaccaaaaccccccccccccccccccccccccccccccccccccccccccccctcccctccccccccccccctctccccccccccccccccccccccccccccccccccccccccc

SEQ ID NO: 162082 - DNA, 362 bp, Arabidopsis thaliana landsberg
gactggtttaacttgagggtctctgttgcggtggcatttagatttggttatcgaacttgttttctagggataatttattgagcatgtcaatcacctgtaaactgaggaaacgaaactactcaattaccccatcctcgggactttctcatctaattgatttctttgtttaatctgctttgtttactgcatcttgctgcatgttgtttactttttgcattttttgcgtgatactcgaccacccagttgtttggcaactacccagttgtttggcaagagactgtgcagtcgagaatacctgttacattttctgtctgttactcgacctgtcactcgaccacacccagtgcttggcaacgagctgt

SEQ ID NO: 162083 - DNA, 283 bp, Arabidopsis thaliana landsberg
gtatgagaatcagttgataacattgtattttactcattttagggcatgtattttatcatcatttagcttagtgatcagtcattgttttatatcatttagcttattttgcacactaaggcatttagaatcatcttgcatatatattgcatgttttggtgtgttttcaggtgcaaaaggagcttacaaggattctactcgaccttctactctatccaaccaagacggaacgcagcagagaattctactcgaccagttcaaacgatcaaggcagccacagaggagg

SEQ ID NO: 162084 - DNA, 158 bp, Arabidopsis thaliana landsberg
ttagagtattctcattgcataattatttttttgagtgtctcaaaaccaatatatttaatattttaatattaaaagcaaactaaccattaaaaaaaattttacagaagttgacgaaaaaagatttgctcttacagtttgtcaaagtgagaactggtttt

SEQ ID NO: 162085 - DNA, 286 bp, Arabidopsis thaliana landsberg
aattttcgttacccttttaccacgatttgatatgacgaaactgatttctcccaacccctaacgattttgctcctcttccttttctctctatttctcctttataaaacgaaaagtggctaactaaagccctaatttcgagtttccttcttttataggcacactctagggtttccaattaacccaaccaattaaaccggatgatttaaaaacaaaccctaaccgattttctggttcacgggcgttacaccaactaaaatacatttgcaacttgaataaaatcatggat

SEQ ID NO: 162086 - DNA, 289 bp, Arabidopsis thaliana landsberg
ttttgcaaattgtatctatctataatatatttttagttttatagtttacaattgttattaagtaacgtcctgccaaacccgtcccgccaaacccgtcccgtaaaaaaaccatttatttatattaatgctgatcttatttatgatatgtttataaatcattgtctatatatttttgtcgatgcgggacgttgaacccacacattttttgtcaattggctaatatatgttcatttttaaaattttgaatcataaaatatgacggaaaaaattaagatttttttaaactcta

SEQ ID NO: 162087 - DNA, 407 bp, Arabidopsis thaliana landsberg; identical to SEQ ID NO: 28586

SEQ ID NO: 162088 - DNA, 116 bp, Arabidopsis thaliana landsberg
tataagttcatcacgttagtccaaagccatttggggcagacccgatttactaattctatgattgcagttagtattagttgtagggatcgtgaactaagaaagacattctagcagcc

SEQ ID NO: 162089 - DNA, 67 bp, Arabidopsis thaliana landsberg
catttccctatgctctttagatccaaagccagccgctcgttccctctaggcgcgtcagagtaggcct

SEQ ID NO: 162090 - DNA, 258 bp, Arabidopsis thaliana landsberg
aataactaaattttaatccgcggtacaccgcgggaacaatttatttttaaaagttagtatacataaaagtttgcaaattgtatctatctataaatatttttattttatagtttacaattgttattaagtaacgtcctgccaaacccgtcccgccaacccgtcccataaaaaaatcatttattttattaatgttaatcttatttatgatatgtttatgaattattgtttaaatattttgtaattttgtaataattaaat

SEQ ID NO: 162091 - DNA, 268 bp, Arabidopsis thaliana landsberg
gtcgttcgacacctacatgcattttcgtctccggatttcttctgaagcataaattctctgttttcctccagaatgcttcattatctccaaatgaatcccaaacatgtaaagacctgaaaaggactagaaaagactgtagaaataacaaatagactctaaaacctatacctaaaacatagttacaaacggtaaaaatagggatatatcaactcccccagacttagtttttgcttgccctcaagcaaaacacaaaagctgaacccgtgga

SEQ ID NO: 162092 - DNA, 305 bp, Arabidopsis thaliana landsberg
actccctccaaaagagtatgaggcgaaaaaggaaaatgtggcagctagaataatccagagactagagaaaaaattgtttccagggctcagttcatctattacgttcaaggaggttaggcttgttctttattcccctactattttacatgcacattgtagaaatggtgatagtaggtctgcatgatatgagaaatctgtatctgaaacccatgagaataagcctatgccttatttgggtatttagcctgtatatctaaacgttttttgaggcaggtgggaacaccaagaacacacagacgatttct

SEQ ID NO: 162093 - DNA, 116 bp, Arabidopsis thaliana landsberg
  unsure (1)..(116): unsure at all n locations
gggagggggggcggggcggggagggggaggcaggggggggaggggagaggagggagagggggcngggggggggggggggggggggggggggggggcnggggggggggggnnggggg

SEQ ID NO: 162094 - DNA, 572 bp, Arabidopsis thaliana landsberg
ccaaaacagaaaaatgaacacgtaacacgtaacgtgacttcatatatctacatatatgcatgaaatctaaaatatgtacaaactcacgctttgtatactaactttgagttttcttttgttatctggattatcaaatacggtattagcccgagtacaatatgaatctccaagccaaagtaagtatttttttgatacgatttgggttttgtagtagttcaaaatttgaaacgcaaaccaagtattcttcaattttgttcatacgttgatcttttggttttggttctatgtttcacaatttaccagttgttttatttctcttcttcaaattgattagctaatagttgttttgtttttagggaagaaaattttaaaagaagtttgggatcaaacactattaagggagatcatcggtgcatcaggcagtaattcagggagagctccttcatgtaataatagttgtaaacctaaccggccttaacaaaaaaaaaaaaaaaaaaaattgtgtcaacttgatctaatttgggaaagtcaatgacatattaagatatgtatcttacgcttcaagctgaacc

SEQ ID NO: 162095 - DNA, 822 bp, Arabidopsis thaliana landsberg
ggatactttctttggtccaccagaaactggtgtgtacagctcttctgtccaacgcactctcttcctcatgggaagcgccgtactgaaaaggtatcatcatatcagtatatatttattttgctgtttgtgtgattatgtgattcttaccatgataaaggttcttattaacatgatcaggttcgttgatgtatcatcgattcacctaaaactgccaaatatacactttcaaccaagcaaaacccttcaatggtgaaggtaagaacctctatttgatgttgtctttatgatgaaaccacgaaacgtaaacgaaaatgataagtagaaaagtagcagcagtcgtacatagttataaacttaaaatcagacaacaaaaaaaaacttgcataaaagccaataattttaggatatgaatcgtttccaatgaattgcatttgcagtttaaagatgatgtgtacctgccaaaccaatgaacctcacggatctatagaagcaactttaagccgcataacctcgaaactatgaggtcttaagacaatacatcatacatggaaatatcaaacactatttcacaggttctgcaactttttggcttttgcctcttcatgaggtgctatacgttgtaacttgtaactatagtttgtactgtttcaaacacacaaaaattctttgtgtgttttatataaatgtaatgaaatgctgaattttttttcttcacatatctgaaatattatttttatcattgaaaattaacatatctgaaatttctattaaacaattcaaatttttatattaatagaaaaaatttaacaaaaagtatcaaaa

SEQ ID NO: 162096 - DNA, 357 bp, Arabidopsis thaliana landsberg
atatactagattttatcccgcggtacactgtagggacaatttatttttttaaagttagtataattttttttttgcaaattgtatctatctataatatatttttattttatagtttgcaattgttattaagtaacgtcctcccaaactcatcccgccaaacccgtcccgtacaaaaaccatttatttatattaatgttgatcttatttatgatatgtttataaatcattgtctaaatatttttgtcgatgcgggacgttgaacccacatattttttgctaattggttaatatatgttcatttttaaaatattgaattataaaatatgacggaaaaaattaagatttttttaaactcta

SEQ ID NO: 162097 - DNA, 423 bp, Arabidopsis thaliana landsberg
tgttatcacttatcattgcaataacacataaagtttgaagttcaaggtttagagagatgaaaaaatgggcagaccaaccaatgaagctccggcattgacaatgtatgtattcccggagatatatttagacgagtcgtgaacgaggtagcgtaggagagaagtaagccccggatccactgtctgttgtacctttaatgggactgtcctctcgataacggtcttgagccactctttttgcataagaccttgtgtgatctctgactttaaaagccctggtgcgatcgaattcactctgatcttgtaaacacctaactcaagtgccatcatccttgtcatggtgtcaacaccgcctttagaacaagcgtatgcgactccaccaggcacctgaccgcggtggagcccggatactgatgaaatgtttat

SEQ ID NO: 162098 - DNA, 83 bp, Arabidopsis thaliana landsberg
aatcttttgggtcatgtttaatagagtgttcaacctgtttcgaagctccatttttaatacctttaagctttaaactaactgtt

SEQ ID NO: 162099 - DNA, 187 bp, Arabidopsis thaliana landsberg
caggggacgtcatgctaaatgagaatctgtgggttaattcggagtgagaaggctataatagtttctaatggggataacatatttgcacatttccgtggcaacaacagctttgagctttgtgggtttacaagtctggacggagttgtctcttgatagacttagagctgatgggataatcaccaagaac

SEQ ID NO: 162100 - DNA, 281 bp, Arabidopsis thaliana landsberg
atcagatcatgaatttggtgtcgttggaaagatcttgaggagagcaagaagtatcaagtctcgtttttacaatccaaggtaagctccattcgcaaaatgacttacaagttagtgaaaaatcacagtttttcctgaaactagaaaatcacagtgctgtttcatcttaaggtttttaggaagcgtttctggtcactccgaaggatagatagacccaacgacggtggtttcggatagaggaagtgtcagggaagccactagaaccttcagatcaatcggaaaag

SEQ ID NO: 162101 - DNA, 310 bp, Arabidopsis thaliana landsberg
agaaattttccgattttggttctcattagttgatagatctcttatctcactcgaagcttcttcttttttcgatctttagggttcttctcatcccctggttaataatgggtccaatctcgattcttgttcactttaattttattttcacaatatctccaattacgcagatgctttttgacaattttgctccataaaagtgtcttcttttttagctgcattaaatttataggtctctctatctgtactggtatagggttcatgattgagtctacaaaaacatactgaatgacctaaaagcttttaactttcg

SEQ ID NO: 162102 - DNA, 215 bp, Arabidopsis thaliana landsberg
ggttaggatttgattagacttgttaggcatatggacttagtttaaatgatcatggcaataagctaaagaatgttgggagttcctttgttttcaaacctcttccacgggttcggcttttgtgttttgcttgagggcaagcaaaagctaagtctggaggagttgatataaccctgtttttattgattttatctatgttttaggtttaggattttgag

SEQ ID NO: 162103 - DNA, 261 bp, Arabidopsis thaliana landsberg
cagaaaacacaatactttcttcattgaattaataatttacacaaaccaagcatcattccaacaattcccattgcatccatcataaacgcaagaacaaatcttttccttttgtgccctaaatttagaatccagattccaatttccaacctcatttcttagccttagagaatctaagacaccgatatttctcaccactcacagtaatttccagagcaccatcttgattatcctgattcgacgcagtccccataagaacactct

SEQ ID NO: 162104 - DNA, 384 bp, Arabidopsis thaliana landsberg
tggtgttgtagtgttagttggggttagtttgtgtggctatgtttttgtcacgatgtaatctttaaatttttcattttcctaagttgaattatagattaaagttttgtttcttgtaacatatgctttggtctataacaagggtggagaaagcaaaaaccaaaacgaaacacagcaaataagcgtacaaacggctttgagtctttgacattgacacaaaacaactttcatcatatgaacaaatgaacaagaaggatataagctaagaatttggcaagtaaccaaacagatatattataagttcatacaacattacagctcatgaatctgaaaacttaaaattcaaagtactatcatcaatccttcgttctttcttgctcgattttt

SEQ ID NO: 162105 - DNA, 99 bp, Arabidopsis thaliana landsberg
caaaagaggctttctcttctctttggttctgctggtcttgaaggtgcttctcttggccccttgatcgaactggcactttattgttttgccattggatgc

SEQ ID NO: 162106 - DNA, 243 bp, Arabidopsis thaliana landsberg
aacacaatgtatttgactaattataagagttatatagggattatgtagtgtttcgacaacacttatacccattttatccgaaaagaggctaaaaccaacaaataattgcttataagtagtaactagctttgttaatgttgctattgttaaaatttgtcaaaatccaaagcatttgactaattatatgagttagagatggattaggagggtttagaccacatgtatacctattttcttccaaaa

SEQ ID NO: 162107 - DNA, 271 bp, Arabidopsis thaliana landsberg
aacgacgacgttctggtgaccaatgtggcaaagctgggctgaagtgtgtagatacaacccttgagtcaagaagctccattattggcgtgaaactcacacacctcggcaccttgtactgattgatcgatgcgcctctggagatggcatagtccatgagctcctcgaacgttccattcttcacaacacgtatctcgagtggtcctatcgacttatccgcaacccgactttgtctatacacagagttcaacgactcctccatttccaagcagca

SEQ ID NO: 162108 - DNA, 193 bp, Arabidopsis thaliana landsberg
tctctctatttgcagaagtttcctgttccacataagttctttgctcacttctatgttatatgagtggtgtggacgactcttcttcttgctgcaacttggatctatgcaaaatggcgcctttatcttctgaggtgttctagttatccgacattgcaagccgtttaaccggaggttcacatcttttctcctttca

SEQ ID NO: 162109 - DNA, 239 bp, Arabidopsis thaliana landsberg
gaaaacaaaaataattgggcttttctaatggatttggattatggcatagcaacactgggaaataaataaattttatttatttaatcctgaaatcaaaggaaatgaaactgggctgggttttggttccaaaaccccggaacatttaaacgggtcatatgggtaaaaactttcgttggctttggttcattcctggtcaccaaccggagaatggattattcaatgtgtttaccaagaaattt

SEQ ID NO: 162110 - DNA, 373 bp, Arabidopsis thaliana landsberg
  unsure (1)..(373): unsure at all n locations
tcattaccttatgaacaaacatattaattttttaaatattattatttatatatttaaaatttataaaacattattaatatttaaacttataaaaaatttgatctatcacaatttttaacatcattatataatatatagagtttaaaaaaatcttactttttccgtcatattttatgttcaaaattttaaaaatgaacatatattaaccaattggcaaanaatgtgtgggttcaacgtcccgcatcgacaaaaatctatagacaatgatttataaacatatcataaataagatcaacgttaataaaataaatgttttttttacgggacgggtttggcaggacgttacttaataacatttgtaaactataaaata

SEQ ID NO: 162111 - DNA, 357 bp, Arabidopsis thaliana landsberg
gctttgagagatccgagatgggggagatcctatgagagttacagtgaagatcctgacattatttgtgagttgagttcgcttgtctcgggcctacaaggcgagccacctaaagaacatcctaatggttacccttttcttgcaggaaggtatatatacacacctctagctagaattaagtcattaaaagcgtttgatttcatttctcatggttttgttcactatgtgatagaaacaacgtggtcgcatgtgctaagcattttgttggagatggtggtaccgataagggcataaacgaagggaacactattgtgtcatacgaagagttggagaaaatacatcttgcaccatatctgaatt

SEQ ID NO: 162112 - DNA, 218 bp, Arabidopsis thaliana landsberg
tactaatgtacaagaacacttgaagaagctgcgattagtttgtttgagactttcaatagggctactcgagatccttagttgtgtattattacgagcattggttgttgtttcttcctctgattccgttttttttgtccgtggaaatttgcattaaaatgggggcgggtttattggggctcctccacctcgtatctaataagtgtttttttaaaatcata

SEQ ID NO: 162113 - DNA, 549 bp, Arabidopsis thaliana landsberg
atgataaatccaaatctcaaaatcttaatcctaccaaaaaaaaaaaaaaaaaaaattattaatagaaaagttggaaaattggaaaaaaccctagatgtctttacttgttctatattaatacaacattgagagggaaaagaaaaagaaaaaaaccctatcgtctctgcgctccatttttctctccttgcactaagcttctctctccctatctctctcgcgtacggtgattgtttgtttaggtctgggcaggtactgtcacctaatggcatctgaatccaatagctttgcgaaaagagatcgtcttctcgagattgaggtagcagttcgaaagtggtgggaggatgaggatgttttcagggctgaatctcgtgatcatcttccaaagccaggagaaaagttcttctccactttcccttttccctatatgaatggttatctacacattgggcatgctttctcactctccaaggttgattttgcttctgcttaccatagactaagaggtgccaatgtgcttcttccttttggtttccactgtactggtatgcc

SEQ ID NO: 162114 - DNA, 427 bp, Arabidopsis thaliana landsberg
taaatgttatcacttatcattgcaataacacataaagtttgaagttcaaggtttagagagatgaaaaaatgggcagaccaaccaatgaagctccggcattgacaatgtatgtattcccggagatatatttagacgagtcgtgaacgaggtagcgtaggagagaagtaagccccggatccactgtctgttgcatctttaatgggactgtcctctcgataacggtcttgagccactctttttgcataagatcttgtgtgatctctgacctgaaaatccccggtgcgatcgagttcactctgatattataaaccgctaactcaatagccatcatccttgtcatggtgtcaacaccacctttggaacaagcatacgctagtccaccgcgcaacaaaccgcgatgaagcccagagattgacgagacgttaat

SEQ ID NO: 162115 - DNA, 376 bp, Arabidopsis thaliana landsberg
tcattaccttataagcaaaaatattaaatttttaaatattattatttatatatttaaaatttataaaacattattaacatttaaacttataaaaaatttgatatattacaattttttaacatcattatataatatatagagtttaaaaaaatcttaatttttccatcatattttatgattcaaaattttaaaaatgaacatatattaaccaattagcaaaaaatgtgtgggttcaacgtcccgcatcgacaaaaatatttagacaatgatttataaacatatctttaataagatcaacattaatataaataaatggtttttttacgggatggatttggcaggacgttacttaataacaattgtaaactataaaata

SEQ ID NO: 162116 - DNA, 366 bp, Arabidopsis thaliana landsberg
cttccactaaggctgccttgatcgagtaagaggatcgagtgaactaaagcctcctctgtagctgcctagatcgagtaaagaggtcgagtataatccttttaagctccttctgcacctgaaaacacaccaaaacatgcaatgtgtatgcaagatgatcctaaatgcctaagtatgcaaaatgatctaaatgtgatgcaaaatgatatgatacaatgagcaaatgcaaagctaaatgaacgtaaatacatgcctaaaatgagtaaaatacaatgttctcaactcccccaaacttatgtcttgcttgctttcaagcaaacaaaaaatcttaagttgaaggagaggtttgaaggtttgaaggttgggatt

SEQ ID NO: 162117 - DNA, 254 bp, Arabidopsis thaliana landsberg
aatcttgtttcttctagttggcatctttttgaaagtcaggttcttagaattctcctccaagatcatcgcaggcctggtcacggaaaaccctgtttccaagtccaaaaatcacaaaactcatagatgaaaaatcaagctaaggaaagggtttcaaaaaatgtgaaaaacacttacgttttggggctgttatactcttcgcattctctgtcaacgggctctgaagccacgggacgtgagacgggctttgtatcgag

SEQ ID NO: 162118 - DNA, 264 bp, Arabidopsis thaliana landsberg
  unsure (1)..(264): unsure at all n locations
agtacgacatatatggctatatcgctttccaatcgattccttgactgtttcattaggtggctctgaatgataaaaaaatgtttttcgtgcttttgcctctntactccatcgatttagaatgtagttagatgggatttttctaacattattcttgtccagcactttcaatgcatgacgacataaaatcccgccacaactaacagttatgcgactgcaaccaatcgtcttgtttgcaacatcataattaataaaatgcttccgtgc

SEQ ID NO: 162119 - DNA, 247 bp, Arabidopsis thaliana landsberg
ccctaagatcctccttttgtttagcaactgtcgtctccaatgttacaattttctccttaagatcagtgatttggggttccgtgtcatgcaatttatcattgcttccttcaagctgtttcatcacagattccaaagatacagaagcagacctctccaacttgttagcttcttctagctgttcctccagttctttggctttgctctgccactcgttagacaagctgtgtgcattagactcagccatctt

SEQ ID NO: 162120 - DNA, 140 bp, Arabidopsis thaliana landsberg
tgtgatgctaagaatcaagatgtgatcaggagtcagtaggtcacgccaagcaataacaggttttggtgcgttctaacagtcctaagtgaacatgcagaaaacagcaaatcaagcagaaacaaataaacactcgaccaaca

SEQ ID NO: 162121 - DNA, 141 bp, Arabidopsis thaliana landsberg
cttccggttttatcttctcgaatttcagaaaaaaagcccttctctaatatctctctacacgaacaacaatggcgtcgatggctgcaaccaccaatttcaccaaatcgatgctctttccattctctcatggttagtctctcc

SEQ ID NO: 162122 - DNA, 279 bp, Arabidopsis thaliana landsberg
tttcttgtagtgtcggatgggaaaagagtcaggtttagggtattctcaggaaatagatgatagtagatctagaaatagttaggttgttatcgcaccgttctcgaactcaaactatgattttagagtaactggtggtgttccgcgaaactctctatacttagagttaagataaccagataagccgagaaatcctatacgaaagcatgcattattatcaagtttgattagttcacctaatatctacaccagagcccttctatgagcctacctgttcgttct

SEQ ID NO: 162123 - DNA, 338 bp, Arabidopsis thaliana landsberg
  unsure (1)..(338): unsure at all n locations
atttgaactagattttaacccgcgatacaccgggaacaatttgttttttaaagttattatatataaaaatttacaaattgtatttatctataaaatattttattttatagtttacaaatgttattaagtaacgtcctgccaaacccgtcccgtaaaaaaaacatttattttattaacgttgatcttatttatgatatgtttataaatcattgtctatagatttttgtcgatgcgggacgttgaacccacacattntttgccaattggttaatatatgttcatttttaaaattttgaacataaaatatgacggaaaaagtaagatttttttaaactcta

SEQ ID NO: 162124 - DNA, 167 bp, Arabidopsis thaliana landsberg
gctttattcttctcttccccgtttcgatctcctctttaatgcatctgcgtatctgattttgaaagatttaacggtaagtaaacttcaatctccgattattttcatctgttacggaacttaaaaatcgaatttttaaacctagattgatctctgcgctcttctgcatc

SEQ ID NO: 162125 - DNA, 248 bp, Arabidopsis thaliana landsberg
aatgttatgtaagcttgcagagaagtacatgttgcttaggatttgattagacttgctagccatatggatttagttagaattatcatggcaataggctagagaatgttgggagttgctttgttttcaaacctcttcacgggttcggcttttgtgttttgcttgagggcaagcaaaaagctaagtctgggggagttgatatatccctattttcactgattttatctatgttttaggtatcggagtttgag

SEQ ID NO: 162126 - DNA, 410 bp, Arabidopsis thaliana landsberg
acaccgatagaaagatgtacattataaactataaagcataagaaaaactccccaaagtaaaaaaagaaacagtaactcaagagatggtattggtgattgtggaggtgacctagaaacccgttattgatacaaagatttgactcttcctttcttaagcacaatatcacggcttattggcctatccttatcctgagtttgaagatgtgtgatgctgcgcaagcagaacattacccgttcagtgtctcttcttactcttcttcatttcacgcgttccaatcaaaagtgttgaaaccattcactgctcctaaaagttggtttcctaaatcctgttgaccgtttggatcccgcaccatcatcccaactcttccgttcatgagactattgttaccgtttatattattgattccgtt

SEQ ID NO: 162127 - DNA, 212 bp, Arabidopsis thaliana landsberg
tttccagagcttgagtgtaaacatctctctttccaaaaatggtactaagagaaaaaggatgaagacaaagttatctgtacacaagagacgatcaagattttgtatggattccaagaataactttgacccagaaaaggggaaacaaagtagatacaattgtaatgtattagtgggtaatttataagatctctacactattctctctatatcct

SEQ ID NO: 162128 - DNA, 125 bp, Arabidopsis thaliana landsberg
tttgcagtggagatcatgatatgtgtgtaccatatactggctctgaagcatggactaaggcaatgggatacaaagtggttgatgaatggaggccatggatgtcaaataaccaagtcgccgggtat

SEQ ID NO: 162129 - DNA, 143 bp, Arabidopsis thaliana landsberg
  unsure (1)..(143): unsure at all n locations
tttttataatgaaatttagtggggagttttgtattngatacacggttatgaaactatgaccaatgatagatgctagttcgatgtaatcacttcaacatgctcacgtggttatttgtggaaccatccatatataacatataaag

SEQ ID NO: 162130 - DNA, 126 bp, Arabidopsis thaliana landsberg
tgtaacacctgccccgccttataggccaagacggcatgttattcatatgatcttgccaaaaatgttttctttaaacttcatacacgaacaaattatttcacataactcttcacgcttactaacctg

SEQ ID NO: 162131 - DNA, 82 bp, Arabidopsis thaliana landsberg
actccataccttgtcctgacccccgacatcccacacggtgaaactgatgttcttgtattccacagtttccacattgaaacct

SEQ ID NO: 162132 - DNA, 328 bp, Arabidopsis thaliana landsberg
caagtgaatctcacagctaagtgaatttctcccattttcttgactccgttaggatggagcaccaaaagagggtatgaatgtgtataaactcgatcagtctcgagagtagaaagcctgattcttaccttcccgattcttgaatcttttgctcctccaatcttctcacctccatggagatggcagttatcaaaaactccaacagtaacaacggtgcacggatcaaaaacctcccaagtatattgctcattccatcttggtgtaaagctgtcaatgattgtccgagttcgaatccatttctgtccgtacttcgccacacaatatgcatctg

SEQ ID NO: 162133 - DNA, 130 bp, Arabidopsis thaliana landsberg
aggggggggggggggggggggggggggggggggggggggggggggagggtggggggggggggggggggggggggggggggagggaggggggggggggagggaggggggggggggaggggggggggggggg

SEQ ID NO: 162134 - DNA, 504 bp, Arabidopsis thaliana landsberg
aacccaaacaagcttatatatacaacaatgggaaacagcatttcattttaaaaaggtaaagagataaaacttggaagggaaaaagaacattgttgtagagattcagaaagtgatgtttcactggttagattttggttcaatatctttaagaagaccaactacttgctgcatacttggccgctttgaaggaagatcagctgtgcagaggtaaccaatcttgagagcttcttccatctgttcttctgagcctgtctcttggatttttggatcaatagcttttgatgcttgattcttcctaactaaacttctaacccaactcaccaagttagtatctttctcatcaagataatcatcttcaatcggctttttccctgtcatgagttcaaacagaacaactccaaagcaatagacgtcagatttcggtgttggcagctcgtgttcgggttgcaagaactcaggagggagataaccaggtgagccatgaataatctcatcgtccaaacc

SEQ ID NO: 162135 - DNA, 160 bp, Arabidopsis thaliana landsberg
catgattcaattttgttcattcaaatactttggagttactggagcaacgccattgaatctcaaatgtaaacaaatagaatcatcatcttaagctgcacgcataatgtggtacaatttgctttaagattttacaaaacaactacccgttttgaattggggt

SEQ ID NO: 162136 - DNA, 276 bp, Arabidopsis thaliana landsberg
ggtaaacggatgtgtatggttcatcgtaccgtaagtcttgatgacataaagctaatcaagaacgccatgaaaatggtaaaataattctccacacattttaagttagtgatcaattttatattgacatgtcgaattttttacaacatttgagagatgtgacgtatatgatatttcattaatcttgctttcattgattttcgtgttagtagactgtcaaccatgttgtacttggagtatcacaggctggtctctcgcagtatttgaagagaagatacg

SEQ ID NO: 162137 - DNA, 346 bp, Arabidopsis thaliana landsberg
ccaccattttcgtcttcgacgtcctcaccgttttgtatgcaagtccatgaccaaaacgacgccggatactactcttgttgaactcagtcgacgctccggaaactatcaaccttcaccgtggaaccattgttatctcctctccatcgagaataaatatgcggtaaagtattgtactatattttcatgatatcttattgttgcacctaattaagtttcacttttatttatgaattcttttattaacaagttgttactacgtgcatgtttacacatatgtatgaatatacagagtgaaacagaagtaataactagagatgtgtgaagaaaaaagtaagagcatgcttgg

SEQ ID NO: 162138 - DNA, 156 bp, Arabidopsis thaliana landsberg
ttttattgagcgccattaatttcttctctcttttgggttttaagcgccatgaatttcgaaaacctcaaatcacaaaaccgatggtgatgataaaaaattcgactgccgaagagaaactggaatcagagtcgtttgtcactcgtattaatccgaggt

SEQ ID NO: 162139 - DNA, 206 bp, Arabidopsis thaliana landsberg
  unsure (1)..(206): unsure at all n locations
aagaacgaaaaaaaggaacaacaaactagagagcgaccttcctcttaccggcgcgttactctcacgcnnnnnnnnnnnnnnnnnnnngtcgagcgatctcgcggcggcgtttatcgataccctaagctcgtggttgtttcagatttttgttaattgaattctctgcatcgagatagagggagatgtgggttttctatctgatctcg

SEQ ID NO: 162140 - DNA, 634 bp, Arabidopsis thaliana landsberg
  unsure (1)..(634): unsure at all n locations
actctgttttttgttaggtcattttttagcaaagaagaagaagaggaatggcgatgctagttgatcctccaaatgggataagacaagaagggaaacattactacacgatgtggcaaacattattcgaaatcgacactaagtatgttccgattaagccgattggaagaggagcttatggtgtggtttgttcttcaatcaacagagaaaccaatgagagagttgctattaagaagatccacaatgtgtttgagaatcgcatcgatgctttgagaacattgagagagcttaagcttttaaggcatgtgagacacgaaaacgttatctcccttaaggatgttatgctgcctactcacaggtacagcttcagagatgtttatttggtctatgagcttatggattctgatttgaatcagatcatcaaatcctctcagtctctctccgatgatcactgcaagtacttcttngttaggtacgttggttcgatacatattctgtttctcttgttaagctttggtttgatgattgaattgtatctttctgtcgacattgtagttgctaagaggattgaagtatcttcactcagcaaacatccttcatcgcgatttaagccagngaatctctagtgaatgctaat

SEQ ID NO: 162141 - DNA, 440 bp, Arabidopsis thaliana landsberg
tttcttcaaaatttgaactaaatgtcggtaactatttaaaacaaaaaatgtttggcaaaccaaaatacaattgcaatcccttaaaatgagcaaaacgcacttaaatacatttttttatcaattcactaaatcttatttctccaaaatttgaactagatttcgacaactatttaaaacaaaattgtgtttgacaaactaaaacacaattgccatcccgtaaaatatttatttcaattataaatttaaattagcggggtaccgcgggttttttaacaggacgggtttggtggaacgggtttggaaggatgttacttaataacaattgtaaactataaaataaaaatattttatagatagatataatttgcaaaattttatacatactaatttaaaaaaaaaaattgtctccgcggtgtaccgcgggttaaaatctaatctac

SEQ ID NO: 162142 - DNA, 144 bp, Arabidopsis thaliana landsberg
gggggggggggggggtggggggggggggggtagggtggggggggggggggggggggggggggggggggaggggggaggggggagggagaagttggggggggggggggggggggggggggggcgggggggggggggggggggggg

SEQ ID NO: 162143 - DNA, 321 bp, Arabidopsis thaliana landsberg
tcaaaacctgggaataaccctaccaaattttgttcccttggcaacgatttgtttggcgaaaccatttcctccaaaccctaacaattctaggttttctccttctctctctttttctcctttataaaacgaaaagtggctaaataaagccctaatttcgagttttcttcttttacaggcacactctaaggttttcaattaatccaatcgattaaaccggacaatttaaatacaaatcctaaccgattttccggttcacgggcgttacaatagtttagtttgaatgaagatttattttagagattttaactatgaagatttaaa

SEQ ID NO: 162144 - DNA, 251 bp, Arabidopsis thaliana landsberg
aaaagtagaatcactataagcttggatctgctctttagggatttgaagctcataaaacgcatcatcaactctagatttcactacacgatattgaatcaaacaaaccagctgcacaaacacattatcctacaacacagcaacaacaacaagaaaaaacctaatttacatgaatctcaccacatactaacgaaaattctcaaaggatcaaaaggaataagtgatcactaaccttagttttggtttcaattttg

SEQ ID NO: 162145 - DNA, 181 bp, Arabidopsis thaliana landsberg
  unsure (1)..(181): unsure at all n locations
acaagaacccctaaatttgtctggaaaggcagctttttcattgatgtttctctgtttactatgtagagcttcaaaaaccttctcaaggaatgaatgtttctttgatttccaagaaagttttggttcgttgcctgagtttagttttggagatctnnnnnnnnnnnnnnnnnnaaatacttaa

SEQ ID NO: 162146 - DNA, 126 bp, Arabidopsis thaliana landsberg
tagtagttgacccacgctacgcacgggcctttaatgttatttatattaatagaatcgttttttcacatggaagaggaagaagaagaacataacccggttacattttagttctaagaatagaaaatt

SEQ ID NO: 162147 - DNA, 274 bp, Arabidopsis thaliana landsberg
ccaatatgttatctttcagaaagtctttttgtatttcttgatctcgaacatgattgattgatagttgacaatatccctgttgagagcagatccaccatctatcttcttgatacagtcttcgagtcttgtgtaataaagcaaaagttgtgtcattccagctatcaaaatatccataccacacaagaagttactaaagcaagttatgatatctttgtgcatcaattctatcgctgtcttccatctgcttccaaagtccttcaccagcggctctact

SEQ ID NO: 162148 - DNA, 207 bp, Arabidopsis thaliana landsberg
tagaattatttagaacttttttattcattattgtaattagatttttatatgaagacaaaccctatacatttctagcaaaaaaaatgttaaattccattatcataagggaacgaagtacttcccaaccaaccatcaccagaaataaactctgttgccgtgaagttaaaggcatcttcgtaacccatagtgtaaaacccggacagttaa

SEQ ID NO: 162149 - DNA, 314 bp, Arabidopsis thaliana landsberg
  unsure (1)..(314): unsure at all n locations
ctaataaattattgatcaatacaaaagttcgcagctataaaagtttacaaaaatgtaaatgtcaggacaaatgacgacgaatatacaatacaagtcgtagaacctaaatctaaccctagagttcgaattctacgctatattaattaactaatctgacacggacaaaaaataaaaatatgtttttcttattacgttaccattacacaatcaaataaacccgnnnnnnnnnnnnnnnnnnnnnnngtacccaaatacgttaaccgggtcaacactaagaccctgattagccgagacgttcgagttataattaaacc

SEQ ID NO: 162150 - DNA, 78 bp, Arabidopsis thaliana landsberg
tcttcttcttcttcttcttcttcttcttcttcttcttcttcttcttcttcttccaccatgaatacatatagtaatttg

SEQ ID NO: 162151 - DNA, 504 bp, Arabidopsis thaliana landsberg
agctctggatctcaggccaagtgagactaaaagtgtatattccaggaactgagctaatctcaggaacagaagttgagcggttactaaaagtattttgaaggaccgctgtgctattccggagatcaatcgatcttaagcaaaagggtacaccgtcgctagacatttggactgagcaatcaataacatcagcaccatctttgattgccttctcatatgccaaatctgtacatccaggatagtccccactcgcaccatgttttgatataacaagaaaatccactgagcaatgaaccatttggtagatgataatgtttattataagtttcttcttttttgttagtaagagcagaaacaaaatgtgaagtattaatactctcattaccttgttttgtagcgtttctgccaatgtgggagaagcagtctgaggaaaatatgaaaagaagatatttgatttttatgttttagagacaaattaaaaaagtgtttgtagaagagattttgctt

SEQ ID NO: 162152 - DNA, 499 bp, Arabidopsis thaliana landsberg
aagacaaggacacttttttactcgccaattgttttcagtgaaaatgtaaattacaaatacggtaaaaagtaacaaactcttctgaagcatcatcttacaagaacaaagaaaatagaataacccataatgtggaacatcaagcaaaatccatcataaccactttagaaagcatgcataaggattgaagaacaaaagccaaaggttcttctttttattttagcgtaaccaaaaacataatgatgactcatttcctcaatggctggctagtttgagagtgttggccttgtcttgcagtgtaccgagcagactctcgaaactcttcttgaaggaatctactccttcgtcttccaactgttctcctactttgttccagtctattcccagcttctctagtgcactgtaaatcccttctgcttctgacacattcgcatctattgtcctcttcactattccatgatctgcgaatgcttccagggcttgatccggcatggttgatacc

SEQ ID NO: 162153 - DNA, 353 bp, Arabidopsis thaliana landsberg
atcacaatgcctaacttctttgaattccaaaccctttactagacttaacacttttgtatcccccttaagaactctaaactcttacttttttttttttttttttttcattctcattctcattcccattcattccatacacaatcccaatcccaaatacaagtctccccctaatcctagctaacccaaaaagcgtgggctaggtctacatgaaacactgttcttgtcggctcatacctaacacgttgtactaagctcaatcaaaaaagacctcacaatcacacacaaatgatctttgacttgaaataaggctaggctaagggtatgggaaactgccttagatgatgcaaaatttg

SEQ ID NO: 162154 - DNA, 240 bp, Arabidopsis thaliana landsberg
atttaaccttgatagatgaagaaggaggaagagagcacaatcttaagcgggaactgaatccagcagaaggaatccgatatccgccaacagaactcgatttaaccggaaatgtagccggaaaagcaaaatctaaagccgaattcatcgtagactacactgaaattgccaaattgccccgaaactactgaaaattgaaaaatggaaaaaatcgaaatcgaaaagagattggagaaggtaggt

SEQ ID NO: 162155 - DNA, 158 bp, Arabidopsis thaliana landsberg
tgatacaatactgtcacttcgtaggccatcaatcggacagattcatatatcagaatctctggccgaaccttcctctctccacagaatctgaccacattcttccagtcaccaacatcctatgccatcacaacacatataaatcatgtctggcctatcta

SEQ ID NO: 162156 - DNA, 310 bp, Arabidopsis thaliana landsberg
gctaccaaaaaaaaagaaaaaaaaaagagctacttgtgttccttcttttaatggaacttataagcacaatcaatctcttaacaatggttcttctactcatcgttgtttcccccatacgcaaagctagttggatcctccttttgcgtccatcgatgctttcaaaacgattcacgatacatggaatcgcaggaccacagaacctaaactcgaacggcaccctgtgcgcgataccgaagacgacgtttgaacctgccctttgcgtaccggatcccaagtcccatgatattctacctcgcgaggtgactcatta

SEQ ID NO: 162157 - DNA, 409 bp, Arabidopsis thaliana landsberg
tcagatttgtgtatttttttatttaatctgagggaagaccagatccgttgtacgtgtaggttgattataaattaaaaaggagcgtgtctgtaaacgtggacccgtatgagtgtttgtaaaaaagatttttttgaaataattctttttaaaaatctttatgaaaaaagataaatgattatattaactcacagcagttggtcacgcaaatgcaaacaaatgaatccactttgttctataatcaattgacaagagtttcgtatagagaatcccatttcatgtgtcacgtaggcacgagtggctcgatgatgattgatatacgatcaaccaactcatctaaagatcgatatgacgaacctccttgtttaactgaccttcttacttcgtctcgcaagactttgattctacctcg

SEQ ID NO: 162158 - DNA, 163 bp, Arabidopsis thaliana landsberg
gccaagcttttatctgtctaaactcaactagaggagattctacacaggatattcatgaaacagcttaagtatagtagcactttctggattacaatctgtacaacttttactatgcacaatattctttacttatgcacatacttgccttcacacacaagaagtg

SEQ ID NO: 162159 - DNA, 146 bp, Arabidopsis thaliana landsberg
aaaaaatgaataattcagatcggtgaagacaataatgctcaactaatctgtagaccaaaatagatggtgaaaagtctaaataaaatttgaaatccttaaatgataacaattttgtggataagatgtgggattcatgataattttga

SEQ ID NO: 162160 - DNA, 139 bp, Arabidopsis thaliana landsberg
cactcccgtgatagaaatcctcaagcatagctagacactgacctaattcccattagcgatctctaactaagcagccaataagaaccgactgttaaagccaataaccgctctaaacggctaatcccttgggatagagaca

SEQ ID NO: 162161 - DNA, 208 bp, Arabidopsis thaliana landsberg
tccaaaagttgtggtgtggattttatcattacaggacagagtagcatagagatgtaatacaaagaataatctaaaatacagcacaaaattgacaaatcaagtggctacaaaagtacacatccaaaagttcctcttcttcttatccaatcttttgcaaatccttctccctctctctttctatatataataacaaaggtgcacatgataa

SEQ ID NO: 162162 - DNA, 374 bp, Arabidopsis thaliana landsberg
gacatacgaaactctatcaagaccagctaaccctaactgttagtaggtgaaagccggctattatcactaatatcctgcgtactcagttgccctatcggttagtaggtgctaacatggtttcaaaatacaagatcaaagcattaagttcaaattcaattctagtccataagtccctatcactcggcgggtgtgcaacagttatagttctttattcagttgagctagttcaagcattcatacgagattttgccaaaaaatgaaatacctaaggtcaagtactaggtggcgttccagacatacaagcattaagattaaactcaactagaaagaatagtgtaaacgatcaaacaaacccatagaaaccaccaacctag

SEQ ID NO: 162163 - DNA, 179 bp, Arabidopsis thaliana landsberg
gagaatgatgttgagggacacagccgttgactgacaagagacagagacttatcatttacttgcaacccaatcctgtatgaatctacttgatttacttgccaagaaattattgcactgcgacaacttcctaaatatcagcaaactttatagtagatgattttgccatacaccaaactatc

SEQ ID NO: 162164 - DNA, 803 bp, Arabidopsis thaliana landsberg
tgactgcttggagaagttctttgttgacccccaaacagaaggtctcggtttcggacaccataattgattccatacatcttatatcttttcctatttgtctaaattcattgtttcctgttagtcacttacttttaatatgtagttgatatcccaagactactactagttcttaagtatgtagaaaaaggtgattcatttgcagtaatagacacagctttatcgatattacagtctcgctctgttttgtagattagtgaaagaatccagcattgttttgttactaagaaattattgatttattttcaggtatcgttctcattggagaaatcggtgggactgcagaagaagatgccgctgctttgataaaggtaaccgcaatgcttctttctaaagaatcaagagttaccatttttagatgatcaagcgtaaaaacatatcctgttttcaattaaacaggaaaatggtacagacaagcctgtagttgctttcatagccggacttactgcaccaccagggcgtcgtatgggtcatgcgggaggtaaataaactttactcagctctttcattcattcacagtttcccactcgaacccattattaaatcttgtaatgttttttttgggatcgatgaagccattgtttccggtggtaagggcacggctcaagacaagataaagagcctaagagacgcaggagttaaggtggttgagtcaccagctaagattggtgcggcgatgtttgagctttccaagaaagaggtcttttgaagtgaaactgaagtaatatcataatacaatgagttgt

SEQ ID NO: 162165 - DNA, 187 bp, Arabidopsis thaliana landsberg
  unsure (1)..(187): unsure at all n locations
ggaagtgagattacactcgcttttttgtttatgccaacacttgcactcgcttaggttatatatatatatatttttgtatgggtggcatatagtttcttttcatatgtcaggctttttcctttgnttcttttcnctggaaggaagtaggagttctttaaatatacttagaaaatctccaagagatact

SEQ ID NO: 162166 - DNA, 180 bp, Arabidopsis thaliana landsberg
gctagacggactgcgagctaggaaagctacagacgaactgggagctagaaaggctgcagacgagctgttagctaggcgaagtgcatacgagctgggagctaggaaagctacagacgaactgggagctaggaaggtcggttgacttatgtcgaccactcttatctttcagacttttatatt

SEQ ID NO: 162167 - DNA, 1169 bp, Arabidopsis thaliana landsberg
gcgagaattgtcctttcttcaagatggaagaggatcatgagcgtatcgtggaggtcactacccctaatttcaatgggtatgtatttcatcaattctaaacctttactttaggcttctttggtaggaaagtctttgcgttgatgggtactgtttcaaattacttcttttagggtttcataagatttacttagctgtatagtaatggaaagttctcaactttagagtgattttgcgtcaggatgcttcgtggtttctgagatctctttgaacttggattctttgttggattagtgatttagcttttaagagtaatttttagaaagttcagtgttagagcttattagtgggtttgtgttctttttgttagttgatatcttgatattcctagctactgatatcaagattgttttgcagtataatctctgtgatggatccaagtagaagctgggcggctaggtggttaagaatcggtatgttgatcgctttccttaactatcgacttgcttattccatcaatgtgttcttattatcccatcattatactctatttactaaggagattactgttacatttattaacacatctctgtattaaagaacgaccatgagatctccaatgaaagattacattacaagatttgtgtgattctctgtttctagaggcctaaaatctgatataaattggaatgtggctttagatctgaagattttcaagatactttgcctccttgtttggtttattgattgcataatgttgctaaatttgtgcagggaagtttgctcctggttgctacacacttgctgtctcagagccactccctgaggaaatgcaggtaaacgattagcaggacaatattttatcttcgtggtttgaaattgtactcagtaacacattagccttcttcttcaaaattagatcatattttgttcacttgtctgattttgtgtgtttcattcggtggtgatttaatgtagcacttatgccaagaggagcgtgtacaatatgttctgccgaaacgcatgtgaagaacacatatcacgaggaaggctaggagggaagaccaagcattccactatttcattaaaagcttcttgaaacattattaggcgctttatatgaatcttcaatcttgtggaatggtccacgctaatgaaaccagagactgctt

SEQ ID NO: 162168 - DNA, 308 bp, Arabidopsis thaliana landsberg
tttccaatcaagctcctgatatggctgctcgtcttcattccactagagttttggggaccttcggttatcatgcaccagagtaaatatgcttcaacattgatagctcggaattttcttgattcttagtaactgaaagaatgtaactttgggtttgcagatatgcgatgacaggacagttgacacagaagagtgatgtttacagttttggagttgtgcttttggaacttcttacctgggagaaaaccggttgatcatactatgcctcgtggtcaacagagtcttgtcacttgggtacttaacttacttaa

SEQ ID NO: 162169 - DNA, 215 bp, Arabidopsis thaliana landsberg
caccagcaccgatgatggctactctcgaagaagtaagcttatcatagttagaagccatctgagagaggttatgctagagagaagagagattaatggttttgaggagaggaatggttttgatgaagagtgttttgagttgtttgtgagtttgcatgaacatatttataagatgtttttgggtcgggtcgggtattgtgtagtcgggtcatgaatga

SEQ ID NO: 162170 - DNA, 224 bp, Arabidopsis thaliana landsberg
ggaactttggtttctttacaaaacacggttaatcgaatctcctgttattattgacatggtatatagaatggatacggatcagtagaaaggtttctgaatggatatatttaaatggactagttaatatggataccaaaaaattgtttgttgatttttctttcagtttacaagacctccaccttcaagaccttatggacatggaactttggtttctatacaaacca

SEQ ID NO: 162171 - DNA, 266 bp, Arabidopsis thaliana landsberg
gctgtcagatacgtatctccctgataacaactggcttcagtcgccaatatgaggtgaagggaggccgcttcaggtattcacttgtctcccttgacacacgcacgcatcatatccgattcttacatcaaatgttaaaagtcttcggttgtaatctctcttattgccccataaaaatacaggcgacacaagcggatgcatcaatgggagccaaaagacgtccttcatcatcattcactgaaggcagctccatagagatcgcaaagttc

SEQ ID NO: 162172 - DNA, 311 bp, Arabidopsis thaliana landsberg
tcttttatcaagttctttgcaaatccctattttcagagatataagctattcatcccttgttcttgagagattattcagttcttaatacagtgaagagatcccttctttcccctatcttatttgctgtgtttatgctttctatctcaattatgttgtttgtttcattcaatatgtctaagtagtttgcttgtttggaatagggtttctcattagggattcatatggtttagtagatcgccccctgttaagttatctgtagaatttttcatctttgattatacttaatgctagatctagagtaattaactaga

SEQ ID NO: 162173 - DNA, 262 bp, Arabidopsis thaliana landsberg
tgatagcttgtttaatcaggagcactagctagtcagtctccacacaacgaacaaatcccggtttcttttgaagtcatagccccttcaggtactaagatagatccagcgatcaagtgccgttagatcattggagtaaatggaaattgttaagtctgtgtaatatatagaggttcttagtcaatcttgccattgtccacgctctctccttcccaacatataatctctataaatatatatatatattctctctatttcctcttcc

SEQ ID NO: 162174 - DNA, 97 bp, Arabidopsis thaliana landsberg
tagaagctaagaggaagaacttggattctttgtaattggaagttttccatcatatgtgctcttcataacgtctggcttcttcactatccgaggtcct

SEQ ID NO: 162175 - DNA, 262 bp, Arabidopsis thaliana landsberg
tttgttcttgattttgatgctgctctcatcagaggatcagacccaccagcacttgcatttacatctgtgtccatcacaagctcaatttgttcgctagcgttctttctagccgctgatctcatcaccgcgttaccccttgtgtgaaaataagaagaggtgaaaataaaaacttgtgtctgtagtgagaatttaaaggatggttgaggtcgtcttacttttctacaagaggtttatcgctttgacgtttcactggtgtttgatg

SEQ ID NO: 162176 - DNA, 300 bp, Arabidopsis thaliana landsberg
aaatcaacctagcatacaaaatcagcgcgtcatcgtcatcaacgcgaggaccaatcgtaaaaacggcaggaagaacaaaaggaagcttctctgcgctcatagcttggaccttgaaagtatagttcaccggagaaacgtcgaagacggtgcaagattgccatggaaacacccatgacttcttggaaagcttgatgtcttcgataccagcaccggtgatcgccaaatactgtgacgctcttgcaactttgaacatcttttgatttaatttggacttttcgcccaaatgatttagaagacttt

SEQ ID NO: 162177 - DNA, 557 bp, Arabidopsis thaliana landsberg
taatataaagtggctcataatcacagaaggaaacagagctctctgtattagctttaacatcaaatcagatataagagtttttgttttgttttgttgtttatacttgagaacagcgaattacgaaagagggagattttgatgcctggtgctggtttttcttggctttgcttcagaagcaaaagagatgtttcttcttcttcttcttcatcttctggaactgagcttcttcttgacgatcaatgtaagcaagtaactcttcctgtctcatcaaagcttcgtaaagggcctttttagtagctatgagctctgcttcaagtgcgtctactctgcagacggctgcgtttaacagttcttctttctcgtatggcatctcatttggctttgattggagcgttccgattttaccttccagctctgtcagtttcttcgtcacacagtttagtagatcagtttccgtgaggtctggtacaggagaaggaggacgacactcctctttaactccttcaccgttagaaccaagttctattgcgtttccttgggtttctgctggggaagaa

SEQ ID NO: 162178 - DNA, 225 bp, Arabidopsis thaliana landsberg
cattgttgtcgccgtaatgtggtgcttgatgttgaagtttcttgaggtcttgaactatatacatcgtcgaaatggagatcaatcccagcttcgatatcgttatcgtccatgaatgtagttctcgacaaatttcttcttgcattctcttcccaatccaattcttcttcttcttcatcttcttcttatatgcttcttctgctccaagagttgtctaataagtttcct

SEQ ID NO: 162179 - DNA, 417 bp, Arabidopsis thaliana landsberg
ctcaaactctaatatcataataaccgatggcgttcagtgaaattcactatgcttagagctaagattcccagtggcgtgccgtaaaatcctcttcctaagcatgcatgctaaacaagttcgataagttcaccttaataggtaggccgattctttttacacatttataaaccagactcatcaaataatagttctgataacagatacctatggcgggtatatctattatatggaatcaagttctagttagctactctagaactagcattaagaacaactaaagatgaagaatcctacaaataacctagcaaggggaaaatctactaaatcatatataaccctaatgagaaactctaaacctaacaagaagactactcaaacatgatgattgaagcaaacaacatgattgaataagaaatc

SEQ ID NO: 162180 - DNA, 487 bp, Arabidopsis thaliana landsberg
  unsure (1)..(487): unsure at all n locations
tacatacatctgatctcaagtgatttcaagtggttggttctgttccttttctcgtccccgatcaagtttcttctcctaaactccagaatttggtcttgaagatctctaaaggctcttcctttctgttcattggtctacggggatatgtaagttgctagcttcttctgtcataacttcaatatctgaatctttttccgatccaaatagtcaaatattcgcatctaggtcaaatcgattcaaatccctttttgttgattgatgtgctaagtagttctgagttgattaagtctatcagtttaagagaaatggattgtgtaagattatgattcgtacaagttagcttctttcttgattaggtccactgtgaatcatgcacacgtttatgaggaagatattagatcgtgtaagattnnnnnnnnnnnnnnnnnnncaagctaagtttctttgctgatcattgattgctgagtagttctaagctgattatgtc

SEQ ID NO: 162181 - DNA, 468 bp, Arabidopsis thaliana landsberg
taacaaaccattttatgtttgttggtcacaagaaaaccgaaacagagctttatattaacagtaaaaacaaatgtcatagattttcaattaatagtatagatttaaattgaccaaatatatatattacaggcagatttgttaatttgataatctttttattgaaatggtaataaaagtttttattgaaaacaacaaaagaagaggtaaaaggagacacaattcaagtgtcccaaaaagaaccaagaccaacacacaagtttgttcacaatttgaccaattatcttctggtaaccggaattgaccaaacttggttgggcgattatataaaagtagtttcataaaatatatacggcgtcgtctcatctcacttcaccgtcgggtagagatgctccggcaatctaagctcaccgaccataaccaacggtttagccagaaacatatcgtgactagactccatcagctcgacac

SEQ ID NO: 162182 - DNA, 130 bp, Arabidopsis thaliana landsberg
tgttgttttcttattaggggaaattagggaacttggtatacagagaaagacaggatatgcctgtaaaaacagtttaaggcacaataactgtataattgttttctcgtttatttactagtacacatagatt

SEQ ID NO: 162183 - DNA, 526 bp, Arabidopsis thaliana landsberg
  unsure (1)..(526): unsure at all n locations
ttttgagagaaatataggttttacaaaatccaccgttgtgaattcatggaaaatggtaaacgcagaagcaaaacagagtgtccctcttctcaccccttataagatgggaagattcaatctttctcataggtaatctaaattttgatccgttctttatgttttgttgacttttgctgaatccttaaattaagaagcttgattcatctagggttgttctagcaccattgacgagtcagaaatcgttcggaagcgttcctcagcctcacgctatcttgtattactctcagagaacgtcaccgggaggttttctcatcgctgaagccnnnnnnnnnnnnnnnnnnnnnnaagggtaactcaaaaacccttccttttcattaaagtttacgtttttatttgtgggttattgctgatcatcctacatttgtgtgatttgatcttgtaggtatccaaatacaaatgggatatggactaaagagcatgtgaaggcatggaagccaatcgttgatgctgtacataccaaaggtgg

SEQ ID NO: 162184 - DNA, 321 bp, Arabidopsis thaliana landsberg
ttatagactacatatttttgtattacctctttttacgatcgtttttaagttaatgcatttcctaatgatatgtaagcaaggtatttctgatcttttataaataatatagattctaaggttttgcatctatttattacttgatacgatagtattttattgatagaaatatggattattagaaaaataagccatgtatttagatactttctttcaactctataatatttattattgttttgacataaagagttgaagaaaattctatgaaaagattatggattatggaaatgtgtgatttggactattgatgcggaccgtgta

SEQ ID NO: 162185 - DNA, 1023 bp, Arabidopsis thaliana landsberg
atgtctttacttctcagccgcctctcgaggcttcgacttgggaaacctgcgtccgtgagatcctctgttctgattctctctaatggcttctcatcatcctcgctgcaaactcctccgtgttccatcatctgcgccaatccttgtggagcgggtctcggaaaactcgtgattttgaatgctaatgagagtgattacactgatttggaaaagaaggtgccgatggagttggtagatagtgatccaatggtgacgataggggcatctcatggctgggtagctactttgaaggaggacggaatattgcgtctccaagacgatctaaacccttatgcatcagatacaaaccctaaacgcatctctctgcctcctcttgtaactctgcctcgttgccaaactcaaatcgttaccaatgtgtcaatgtccttaccttctcctgaggatgaggactgtgttgtggctgtcaagttcttggggcctcaactcagcttttgcagaccggctaaaagcaactccgagtggaccaacatcaagatcgcaaaccctagcttcttctcctcacgtgtcatgttttctaagaaagatgagatgtttcgtattcctgggtctggaggccacctcatcggatcatgggatctccgcacagaggatcacaatcccaagattcagaggctgcgattccgaaaccttcccgagctgcctagggccaagcgggagcttctagattcgtgctacaggagtgaacatttggtggagtctcaatccactggtgaacttttcttggtaaagcggtacaagaaggccaccaccagagatacggtaaaaatgaaaacacaaggtgtaatggtgttcaagctagacgaaaaaggaaacgctgtgtacactcaagacattggagatctttgcatttttctctcaaagtctgaacctttttgttctagcagctccaggttccctaactacgttgatatatatgatgtcgacgaagtagcatttgcctgtctggagtatgatgaccctatcact

SEQ ID NO: 162186 - DNA, 153 bp, Arabidopsis thaliana landsberg
gctgatgcgtgttatagtagtcttttcaccaggagcaaaactatccattgctttacttagctcacctctgtattccaattctcccttagaaaacataaaattgaaccacgatttttccatagagcttctggcctctatttaaatgaaaataca

SEQ ID NO: 162187 - DNA, 101 bp, Arabidopsis thaliana landsberg
aactcattatctattgctacagtcaccacttttcatcatctgaaggaattccttgtaattgactctaccatctccatcttcatccacttgcataatcatct

SEQ ID NO: 162188 - DNA, 103 bp, Arabidopsis thaliana landsberg
gtctttttgtcgtctcgagctttagcgaatataaccgtaaatccttcggctgatgctggatcgttcacgtcccattctccaaattttggtaatggtcgatctt

SEQ ID NO: 162189 - DNA, 325 bp, Arabidopsis thaliana landsberg
ttttttttttttgaatattatgtaaaattattcgaaaaaaactgttttacattaagtgcggcttgtatttaagcaaaatttgagggcattaacaaatttagaaaaatgagagatatctatgttatcttgagccaaactaaatcgccatagttttcatatcttctatctcctaactcgcgaatagaggagattctgtttcgggtttgcttatcgagacggcgggttaattgggaggagggaatgggtgcttctccatgtcgacgaccattccgttccttccatatcgagtgcactgtgagctgaaaagtatatctcaccaagaaca

SEQ ID NO: 162190 - DNA, 144 bp, Arabidopsis thaliana landsberg
cgaggattgattgtttcaagacagcatttccagatagtttttttccaatctcccatcatgcaacatatcaatcaccatatttattgttgaagcatctccagcaaactcgcgactcctcatttctctgatgagttcagctgatgc

SEQ ID NO: 162191 - DNA, 262 bp, Arabidopsis thaliana landsberg; identical to SEQ ID NO: 20004

SEQ ID NO: 162192 - DNA, 201 bp, Arabidopsis thaliana landsberg
gcgttgaggcataatccagggatctctaccgattggactcttgaggaacaatctctattggaagatttgcttgtcaagtaatcttctcgctctctctctgtatgtttaagatttggatttgctgttttatccaatcgctctttctatctgactagatgtgactaaaaaaagtgaattctgcgatatgttattttccatggc

SEQ ID NO: 162193 - DNA, 263 bp, Arabidopsis thaliana landsberg
ttttaaaatggcataatctgaccgcggttttttacaaaaaaaaaaaataataatcatttcgcaattattaaaggttatagaatattttagaatcctgatttgacagaaaaaattattgagtatagagtccatggctaattctttttttttgcttacatataattaatactagatttttaatgatgatatataacgaatgatgcagattcatctgcccatggtcaaaaaaaaatcccgttatcattaacaaaattgtgtatgaa

SEQ ID NO: 162194 - DNA, 208 bp, Arabidopsis thaliana landsberg
  unsure (1)..(208): unsure at all n locations
gggggagggggggggggaggaggggggggggggggggggggggaggggggggngnggcggcnccggggggccgggcgggcggggcncggcgggcccggcgccggggggggncngggggggggggggggggggggggggggggaggggggggggggggggggggggggggggggggggggggggcgggnggggggggggcgggggcggg

SEQ ID NO: 162195 - DNA, 381 bp, Arabidopsis thaliana landsberg
agccaatatttctaaaagaataagtgccacgaaccatggccttataaattaataacctcaaaaagggaacataaagatgatcatagcaatccaaaacgcttgagagaaactaaaatcgaaacacaccacatataacattaacaccaaccaaagaactagatagaaaatggaggaagccaataagggaggaaaggaactctttctggtccacctttgggggctttgaagtgacgggcggttcgggtggtgagatcataaacagcaaagcaacggcccatcaagtagatggagttgggtttgagaccagggcaagagcttgccacaacacagaaaggatcactctttgaaaggaagatacaaagatctccaatgtcctcggtg

SEQ ID NO: 162196 - DNA, 287 bp, Arabidopsis thaliana landsberg
tctgtctaatatcatagaaaccgaacaagaataataaataaaagggttttatacccaaaccaaacatccaacattatataggggcataaagaaaatacgaaaaagacttagataaggatttagttccacaagctaacaaaaagactcaaaatgcataataagaaataaaaagacaaaccgctcaagattcagctttgaacatcatcgcttcagttttgttcataagcacagacctctggtaaagtagctcaaactgcttatccttaaacttcttccatttttcctcc

SEQ ID NO: 162197 - DNA, 289 bp, Arabidopsis thaliana landsberg
ttttcaattctttcgcataaaagaaaagagcttcgttttgttttacctttatttccacattggcgcgaggaagataaaaaggttgagattattatgcagctttttataatttacaattttgtaaaagcttctgaatcaggctgtgagtaagtttatggtgaaagctcagccgttgatgatggtgattacttgagcagcgaaagagtctccggtactttgttgccggagccattttcccgtgacattcctctgtcaccttctataaccagaaacgtcttcttccccacct

SEQ ID NO: 162198 - DNA, 305 bp, Arabidopsis thaliana landsberg
gggtctctattgcggtggcacttagatttggttaatgaacgtgttgtctagggataatttattgagcatgtcaatcacctgtaaactgaggaaacgaaattactcaattaccccatccttgggaattctttatctttatcttgtcagatgttgcttagttcctgcaattctttactgttactcgacctgatactcgaccacccagttgtttggcaacagactgtgcagtcgagtatccttgctacattttctgtctgttactcgacctgtcactcgaccacacctagtgctctgcaacgagctgt

SEQ ID NO: 162199 - DNA, 249 bp, Arabidopsis thaliana landsberg
tgaagtaaagcttcacggacgacgcgggtcaagaacaagaccccggcacctgtgcaaatcactgcagagcaaattctaagagaagctcgagagaggcaagaagctgagatccgtccacctaagcagaaaatcactgattctactgagctttccgattacagactccgacgtcggaaagagtttgaggaccagatccgtcgagcgagatggaacatccaagtttgggtcaaatatgcgaagtgggaagag

SEQ ID NO: 162200 - DNA, 229 bp, Arabidopsis thaliana landsberg
gtgcactagattttaacccgcggtataccgcgggaacaatttattttttaaagttagtatatataaaagtttacaaattgtatctatctataaaataattttattttatagtttacaaatgttattaagtatcgtcctgtcaaacccgtcctgtaaaaaaaaactatttattttattaatgttgatcttatttatgatatgtttatgaatcattgtctaaatattttgt

SEQ ID NO: 162201 - DNA, 275 bp, Arabidopsis thaliana landsberg
  unsure (1)..(275): unsure at all n locations
cccccccccccccccccnnctccccccccccccctcccccccccccctctctccccccccccccccccccccccttttttccngttgtctcccccccccccccccccgcccccacacaaaacacccccncccccccccccccccnccccccncccnnncnccncccccccccccccccccccccccccccgcccgcccccgccccccccccncccgcccccccccccccccccccccccccccccccccccccccctcccccccccccccccccc

SEQ ID NO: 162202 - DNA, 441 bp, Arabidopsis thaliana landsberg
acagtgtgaaggacaaaacgcgtaccaattctgtcttcaaccacccggtgcaccagcattcatagggaacacggtaggttacttattcttcttacgtggtagataagttgttgccaaactctgttttttagctgctatgataatgttgacatacatcttaatggagcagcctgagagactcttccacagaaaacatctaggtgtctgcagtgaggctttggctgcaacaaggcctagaggtgattcaaaggttcgtgaaatggagattgagcgcgacttactaaccaggtcaactgtttgttttgtgctttgtacacttacaagatgcatgtttagaaacttccagatatgtgtactgatattatttgcaaatactactgtagtcccaaagacgatcttgagttttctattgtccgagagaatataagagaaaaacttaaa

SEQ ID NO: 162203 - DNA, 130 bp, Arabidopsis thaliana landsberg
ggggggggggggggaggggggggggggggaggggggggggggggggggggggggggggggggggggggggggggggggggggggggagagggggggggggggggggggggagggggggggggggggaggg

SEQ ID NO: 162204 - DNA, 693 bp, Arabidopsis thaliana landsberg
tggtgtctaaaaatttaaaatttcatttttattattattattttattttaaaatttaacataaaaattagaaaaaaaacaaaaatatgttaaactggccagtaaacaatattcgtcgtcctcttttaccaatatcaaattcgatataaacttattatttggagtgaaaaactctcttatcgaatttaaatccttcacgaattaaactatttttcaccaaatctcaacctgatcaattcataaaaatggctaattttatatttagtttttttcttagtatcaaaatggctaatctcaactcgaatcccatctattaatcgttacgtaatcaccggtaaacaatctttgttgcctcttttgccaacatcaaattcttcatgaacttcttcttcgtagtgagaaactctctattcgaaattatatctttcacatattaaactatttttgacaaaatctcaacccgaatctcatcgtctttctcaagatttatcaattcataaaaatggctaattttatttttagtagcaaaatagttaatctcaacccgaatctcaacgaattagattaatctttgattctagtttttttcaaagagaaaacgtctctttgatattgcgacgatagaataagattgtagaaatgactatttaaaaatattttgatttttctaattttatgtaaatttaaaataata

SEQ ID NO: 162205 - DNA, 413 bp, Arabidopsis thaliana landsberg
  unsure (1)..(413): unsure at all n locations
ctgattggcagctttactatcaaatcgagcctgaagaagctcaatcaacgagaaacgaaagctgtgctggatctctttcatgaaatcatangaagagccattgttcaatcagttgaggtttagtcaatcacatgtttacctagtttttttaatagatcaaaattgtattcatgtatagtcacacatatatatacatattttggatataggacaaaggagcagcttggttatgttgtccagtggggcccttgcttaacgtatcgtgtgcacggtttctgtttctgtgttcaatcttctaagtacggtccaattcatttgctggggagagttgacaattttcttaaagatatcgaagggcttcttggaagtctgtaatcaaaaagaatatattggttttttttgttaaatcttta

SEQ ID NO: 162206 - DNA, 118 bp, Arabidopsis thaliana landsberg
aacattcacgtctctctcgtttttttggccgacgacgatcgctgaattgactgccggagattcctttaatcgtcagattctcgttgagggataatgaatcctgaatagtaagaaactt

SEQ ID NO: 162207 - DNA, 182 bp, Arabidopsis thaliana landsberg
aggaatcagcggcgtttagaagtatacctgtagttataatgtcatctgagaacgttcctgcaagaatctccaggtaagagctctgtttctttaaagttaatttgagtattattgatttgagaattggcaagtggatactattattcgattctttggtttgaataagtctttgaactatctac

SEQ ID NO: 162208 - DNA, 449 bp, Arabidopsis thaliana landsberg
aaaataaacaattctgagacttaggaaacacacaaacggattataatacaagaatctcctttaccacaagataaaaacgaattaaagtgacgtgcgatcctctttatactgctccaaggagccatagaggcggtgagacacatccaaaacctagagacttaaaaagtgtctcttgaagaaaggaagaagatctagatctacgatggtgaaatttcttcatctgaggtagtgaggaactggttgaagactgcctctgccaagaaggatacagaactggtgctgagaatggcggagacaaaagatccatacattaagaacccaaggatgaagagattaagctttaaaaatctagatctagaaaactagaaatgattccgttgaaagaaaaatcatagatgtgccaaagaaaagagataaaacaaagaaagagaaagagtttcaccggctct

SEQ ID NO: 162209 - DNA, 319 bp, Arabidopsis thaliana landsberg
tacaaaaaacggaactattaagatgatttacataagacatacgttaggaaggtaatgtttttgagattcatccaaataaccgtggattaaggcacggctttgggtgcagagcttgagagccatagactcatcatttgccaaatctgagcaattggtctcattgcagtctgcaaaatactttccacttaaccctttggtttcgttgctcaatgccacgtaacatgtcgtcgctgcgccctattcccatatatagcaaatattcaagaatgttaatattattataaaaattgtttaaaggtgtactaatttatcagcgtaa

SEQ ID NO: 162210 - DNA, 299 bp, Arabidopsis thaliana landsberg
aagtttcttagaagcagtcaatagctttgttagtgtttctaaggtcaaaatgtgccagaattcaatgcatttgactaattacaagagttaaagttggattaattgtgtttagataacacttagacccattgtttcccaaaagaggctaaaaccaataaaaattgcttagaagtagtaaatagctttgttagtgtttctatggcaaaaatgtgtcacaatccaatgcatttgacaaatcatatgagttagagatggagtatgagtgtttagacaacatttatacttattttctcccaaaa

SEQ ID NO: 162211 - DNA, 176 bp, Arabidopsis thaliana landsberg
acaaggagtcttactttgttagcaccacggtgacagctttaacagcaggttcaattgcctttccgcctgaagaaaaggaatgacacctaaaagcggtggttctgcatggaactgaacaaataggcctacgaaggtaatttgagagtaatatgttgctgaaaccatgttgtcccaac

SEQ ID NO: 162212 - DNA, 94 bp, Arabidopsis thaliana landsberg
tgttcagtatgaaattgaatgttccttgtgatgcacgtttgagaagaacttcccttgcttccactgcgatcccttgaggctgtagaacaaaatt

SEQ ID NO: 162213 - DNA, 408 bp, Arabidopsis thaliana landsberg
  unsure (1)..(408): unsure at all n locations
tgagaagcagagtcatctccactgatgccaatgacctctgcaccagctttcttgaatttctcataagagtctctgaaagcacaagcctgttgtacacaagtaaaaccatttacgtttacaaacacaaaatatgcgatcaatgaatgcgggaaggaggagaaagtaaagatttaacaacctgcttgnnnnnnnnnnnnnnnnnnnnnnnnnggtagaagtagagaacaacaggcttccctttatactttttgaggctcaccggctttccattttgatcctttagtgtgaagtctggtgcagcctgacccatgttaacctgctgcccaccaaacatcacaaagagaccaattcaaagaaggataaagaaagttcatatgccgtgtcagcttaaatcatatgaatgaagga

SEQ ID NO: 162214 - DNA, 368 bp, Arabidopsis thaliana landsberg; identical to SEQ ID NO: 21546

SEQ ID NO: 162215 - DNA, 396 bp, Arabidopsis thaliana landsberg
ttttataccaaggaaattatagaatgtacattgtttcttcaaaacatacattgggaaatcgaaattcacaagggaaataaaaaaaaaggaaacaagataactttccatgaaatcatatcaaatatattttcaaattatctggctccaggggcgaattcggaagctgaagatgtgtagctaaagtcagtagcacctcttgtgtacatctcttcactaccttgacgccttgcattttcaaaggccacacattcgcttagctccgtcacaacgtgtgccattgttggtctccggtttgaagaagggttcacacatgaaacagccagctccacaatcttccatgcaccgtaagtgtaatagtcctccatcagtttcgggtcaacgatgctcttggtgttt

SEQ ID NO: 162216 - DNA, 236 bp, Arabidopsis thaliana landsberg
cgtgaatccgataccttaccatatggattagagtacattgaaccttaaagttaagtcatgaagcctacaatcataaaaactctgtagttcacaaccacagtaaggatcctcttaagcagtagtaagaagaaactataattctgcatcgtcataagactcaaaactaactttacgtatggttaactaaaatttagatcctggggtcctcggaaaaacatttccctacctggttcaac

SEQ ID NO: 162217 - DNA, 361 bp, Arabidopsis thaliana landsberg
gggggggggggaaaggggggtgggggggggggaaggagagggaaagggggagaggggggggggggaggggaaggggtagagggaggggggaggaggggggggggagggtggggggggggggggtgagagcggggggaaggggggggggggggggggaggggaggggggagaggggagaagggggggagggaggggggaaggcggggagggggggtggggggggggggggagggaagggggggggaggggaggggggggggggaggggggggagggggggaggaggggggggaatgggggggggagaggggggggggggggggaggaggaggggggaggggaggggggggggggaagggggg

SEQ ID NO: 162218 - DNA, 252 bp, Arabidopsis thaliana landsberg
gttgttttgggtttatcatttatcaatacaacgttatatacttctatccgtcaaatcaaatctgcagtacttgatttgttttcagatggctaaaagagagaaagggattgaacttctacgagatcgatcttaacgagattgaagtatccttatttaataatagtagtaagactagcaaagcctagcggttctttattttacttattcattgttacattatttcttggatcattagccccgcccattacacaa

SEQ ID NO: 162219 - DNA, 306 bp, Arabidopsis thaliana landsberg
ttgttccactcaataaactcttgcaacatgacgtaaatttgaagtctgtttcttgagaggtcagatggtgaagcttttatgaggagagaattttgtaatgtatatatatttgcataacttataagtcaaatttactatccttagttacaagtttcttcatcatatatccctaactataaatatatttatatgctcatgtgagtggattcatttgtactgtaaaacccttagaaagacgtcaaattagtatttgatggtttagtgttgtcttgttaccactatagtataaaatttcaagttccttaa

SEQ ID NO: 162220 - DNA, 114 bp, Arabidopsis thaliana landsberg
gaatatcgaaacatttgtttttctcgaaaatttctccttttttcattacaccaaagttttgcataaaatgtatttgtagatcttttcgaaaataattcatgaaagccaacacta

SEQ ID NO: 162221 - DNA, 234 bp, Arabidopsis thaliana landsberg
taggttagcattgtcatcggttgccgtaattcattattcatgattcttgcttcgactctatttcaagtagatgcaatgtgaccccccatacttttgttttttttgttttctccattatttttccttttgttggtttatgttttgttttcttttctttactgtccctggttttacagttttctcaagtgccatttgttttatcgaagttagtttctctataggttggtgatggtg

SEQ ID NO: 162222 - DNA, 381 bp, Arabidopsis thaliana landsberg
atttggcgctagaaggagggcaatttaagtcttttacttcagaacaacggtcaattcaccatgagcaacaccgacgatcagagttctggcgaccaaacctccaccctcgacgacatcaaatagctgcttcagcagttgtctgagaaaaccgaccggcagcagctcgccgtgacgtcactctccgacaagttcgtttctttccaagaacagtgcaatggccagctcgcagcgctagcagcaaaccattacgagatcaggtcagcccactaacgcgtacgcgaagcgggttgattctctttccgcaggaacgatacggactactggagctcgagcacgactcaattttcagggtaccgtctgtccgagcgtccaacatccaca

SEQ ID NO: 162223 - DNA, 238 bp, Arabidopsis thaliana landsberg
aacgttaattagaacacaaaaagtgggttacaagatttgcactcacggcagtaagattgaagtattccacacaatcaaacattttttactgcatcaaggaaaggaaaaaaaaaaaaaattgaaaagaaacaaaaaaatcaaacaaaccacaaacaactccacatttgatcacaaagtaaattatttctcgtcatggctaacttcagcttcaccagagagttcttcgagggacttgccc

SEQ ID NO: 162224 - DNA, 187 bp, Arabidopsis thaliana landsberg
tttaaaattttatcttttttacacaaataatatcatataacataacgctcattaaaaaatttcaaaataacaattcaatagaaataacaacatcaaaacaaacagtatcacctctatcgtactaaatacataacaattggctaacaagccgtatgcaccatcgtagataccaaacatgcaatagatt

SEQ ID NO: 162225 - DNA, 365 bp, Arabidopsis thaliana landsberg
caaaattttgatatttgggttcgttcgattttatttctttttgtcgaatctcttctctattataggaatatctagggttttcggttcgcaaattcctcgcaagtacctcgcaattttgcgagggatatatttgcaggtttaagtgaaaccaatagttggtgttaattctcatgaatatgactacttagtttcacaaaataatcttaaatacaaggatttgttacatgttattgatcttgtgatcaaagggtatataatgggcaagaaggattggagacatggatggattcaagtggaacaagtacgtgaaggtagaattgattatgtaattaccagccgcaattgaaacaattgtgtatcgcaac

SEQ ID NO: 162226 - DNA, 207 bp, Arabidopsis thaliana landsberg
atctcaaaatacaacattcagcaagaccccaaaaaaggggtaattgcacttcagaattagaagaaaatgacgaatatactaacaagattcacaaaatacatacaataaagttaaaataatattatttaaatatattcaataatatagcataagcttttgcaaacagataacaaaaaatcccaatcacgtgtgtgggaaaacaactta

SEQ ID NO: 162227 - DNA, 127 bp, Arabidopsis thaliana landsberg
  unsure (1)..(127): unsure at all n locations
gaggggggggggggagggggggggggggagagggggggggggggggaggagggggggggggggggggggangaggggggggggggggaggggggggggggggggggggggggggggggggggggggg

SEQ ID NO: 162228 - DNA, 375 bp, Arabidopsis thaliana landsberg
atgtcgggaagaggaaagggaggaaaaggattgggaaagggaggagcgaagcgtcacaggaaggttctgagagacaacatccaaggaatcaccaagcctgccattcgaagattggctcgtagaggtggagtcaagcgtattagtggtctcatctacgaggagacacgtggcgtcctcaagatctttctcgagaacgtaattcgtgatgctgtcacttacaccgagcacgctaggaggaagactgtgaccgccatggatgttgtctacgctctcaagaggcaaggaaggactctctacggattcggcggttaatcagggtttttcagatttgtgtttggagatctgtttctggaaattagatttgagaatttcaat

SEQ ID NO: 162229 - DNA, 252 bp, Arabidopsis thaliana landsberg
ccagcagataaagggtcacttgatccagcatcttctgacacgatttcgacaaatgcgtactgatatttccagggagaaccgggatcagctaaccagttgatgtcaaagctcgtcatgagagatttgtagcgacccttgaagatagcccatgtctctcctattcttgggtatatacagaatttacccgcgctacttcctttattgcaatgaaccaagtgagaaaaccttgtgtgatctttaatagtctcatct

SEQ ID NO: 162230 - DNA, 75 bp, Arabidopsis thaliana landsberg
ttccatttatccgcaaacggagcttgttttcggtgcacctgcttcagccacttcaaacttggtatagtatataaa

SEQ ID NO: 162231 - DNA, 388 bp, Arabidopsis thaliana landsberg
ctctaaatgatcttgcagagatggcatgtatgaagaaggcactaccattcattttaatggtattgttgcaaatagggtatgcaggaatggatattcttacaaaggatgtcctaaacaaaggcatgagcatttacgttctttccgtctaccgtcacggagttgccaccgttgttatggctccgttcgccttctacttcgacaagtattctctacatttccatctttatttcaatttctctcacaaaacataattcaatgtttggtttgcgagtagtttcaagaccatgatagcagattatcattcaggcctaattggtagttgcgtttgcagcattataaacgccaacggaaaagcaaacgtggtttttacgtaaaaacaatcacagct

SEQ ID NO: 162232 - DNA, 101 bp, Arabidopsis thaliana landsberg
cttcttacctgaagcacttgcgcgtttccggtgctttgatttctcaatctctaactgcatctccatcaacatgttcattcgttttaactctacctcctttg

SEQ ID NO: 162233 - DNA, 201 bp, Arabidopsis thaliana landsberg
ggaaaattttaaaaatctaaactaaatgataatttgttattaaattatattgttgtttccaaaaatatctaataaattattaccaaaataaataagtttacatataaacgatttcgaattaaatagcatgatttgttatggaaactttattaaatgatttacaaaaatattgggtagctattcatttgttgatttaatttt

SEQ ID NO: 162234 - DNA, 276 bp, Arabidopsis thaliana landsberg
cttcctatgtagctgcctggatcgagtgaatggtcgagtgaattgccctactgcttccctcctggtttgatagagtatagggtcgagtgatttccatgtatcctccttctacacctaaaaacatacaaaaacatgcaatatgtatgcaatatgatcctaaatgtctaagtgtgcaaaataagctaaatgtggtgcaaaatgatatgaagcaatgagtgaacactaagctaaatgatgataaacatatgagtaacatgagtaaatacagtgttatct

SEQ ID NO: 162235 - DNA, 96 bp, Arabidopsis thaliana landsberg
taatatcgtcgttaagtagtcgtaaacacctagtttgcgaccattttgggaccaatatgggagttgcaaatggcaggttttcttatagttatatac

SEQ ID NO: 162236 - DNA, 301 bp, Arabidopsis thaliana landsberg
ttttgaactttctgcaacattacactaaagcagcaaaactttggaaactgacgaaaattggagatgagtcaccttaatattgtatcatatctagaacaaaaaaaaagttgaaaaatgttcaaaagaagataactccagtgttttgttcagactaggaacaagaagcctattctgatgagaatcatgtcggttgcttctacatgaaaaggctaggttttgatgccttgtatgtagtcttaagcttcctgcttggtggtctgaccttcctgaaaacaagagggaacttgatcttcgagttatg

SEQ ID NO: 162237 - DNA, 831 bp, Arabidopsis thaliana landsberg
gagagatagacaaagagactgtttgtgtcttcttacccattcgaggaatcaaagcatctatttccgagctctcaagacgacgagaagctaaaagataaggctgaagaaatttagggttttttcttccttttgtattcagctcgttaattaaggtatgttcccaaattcttattcttaaagttcggctctttcctttttcttccgacttgtgtcttagttttttttttcaatcgtggtcaaaatttgttcttgagctactctgttataagggtttgtgggtactggaatctttgattcgagagcaatggagactttcaagcacctcagattttatggttagagaagtttttttttttgagctgctctgtagaataatgtgcttaggtctgtacggatttggggtaactagttggatcgcgagtgtttctcaccaggtccttggaaaaggatttgttttatacctgaaatttgggatttttcagactcatcttcaagtactttgctttgaatcggggatttagcagacttgggttcttcagtgagatgctttattcagttttgggggtttgttagatttgagagcttaagagataatttcttgttgcttttgttgaaaaactatgaatggagactagatttaattgggcttcccttggaaaccatcttgagctttattgaatctgtgtataatatgatggaataatgagagtataaactgaactcattctattggtatttgtaaatgcagggctatccatcttccgagttcttcagtagcttcacaagctggacctgaaaatagatcttggcgcatatcaggagtgtgattat

SEQ ID NO: 162238 - DNA, 338 bp, Arabidopsis thaliana landsberg
tcaaaatcaaaaccacacttttcttcgctaaaaaaaatctacacaataatcaactaagagttacccgaacctaatcaaagaacacaaaaaaaaaaaaaaaagactgtgtaagaaaaataaaagttacaaaaataataagttgtctacatcttccaatcttttatttatcttttctttggctcgttgccccatgttttgctcctccttatctgcgtcccattgtctcactcaaataatctcccaatattctatatatataaaatatgggagaagaaagggtttcttggcttgtaatgttggcatcatcattccttaaatcatgctactccctagttgta

SEQ ID NO: 162239 - DNA, 269 bp, Arabidopsis thaliana landsberg; identical to SEQ ID NO: 65045

SEQ ID NO: 162240 - DNA, 303 bp, Arabidopsis thaliana landsberg
gcaatgtccacattaaaagaattgagcaatggttaagagcatattatataaaaaaaaaagactaaaatgattttgaatacgaatgaacaagaaacttgagttatcagatgtccaaaaattaaaagtgtttggtttagtgcgcttctctatttcaaagaatggaaacttttaaaaactttcaaaattttataatatttaacctttattaaagtgaatattataattgtttcaaaaataaaataatttatgaagttttaaatattataaatatttaaattttataatacggcgaaatcctagagt

SEQ ID NO: 162241 - DNA, 2761 bp, Arabidopsis thaliana landsberg
atgataacaataatatggagcttgtgtttaatcttctgcctttcaaactcaatacttgttattgctaaagacttgtgtcttccagaccagagggatgctcttttggagttcaagaacgagttctctatcccaagccccgattctgatttgatgctgattcttcagacgacagcgaagtggaggaacaacactgattgctgttcttggggtggtatctcttgtgatcctaagacgggagtggtggttgagttagacctcggaaacagtgatctcaatggccgtctgagatctaatagcagcctgtttagactacaacatcttcagagcctagatctttcctacaatgatctttcgtgtaccctaccagattccatcggcaacttcaaatacttcagagttttgaacctccttggttgcaatctctttggagagattcctacatcacttagaagtctttcttacctcactgatcttgatctttcttataatgatgatctcaccggtgagatactggattcgatgggcaatctcaaacatttgagggttttgagtcttactagttgcaaattcaccggaaagattccttcttcactcggaaatcttacttatctcactgatcttgatctttcttggaattatttcactggtgagttaccagattcgatgggcaatctcaaatctttgagggttttgaatcttcatcgttgcaatttctttggaaagattcctacttcactcggaagtctttctaatctcactgatcttgatatttctaaaaatgagttcaccagtgaaggaccagattcgatgagcagcctaaaccgactaacagattttcaacttatgctactcaacttgagctcactcaccaatgtcgaccttagttctaaccagttcaaagctatgctcccatctaacatgagtagccctttcaaactggaggcttttgatattagtggaaattcattttctggaaccatcccctcttctcttttcatgatcccttcgttgattaaacttgacctgggaacaaacgacttcagcggtccacttaagattgggaatatctcttcaccatctaaccttcaagaattatacattggagaaaacaatatcaatgggccaattccaagatctatattgaaactagtcgggctctcggctcttagcctctctttctgggacacaggaggcattgttgatttcagcatcttcttgcagctcaagtctcttaggtcacttgatctttcagggattaatttgaatatcagttcatcgcaccatcttccctcacatatgatgcacttgattttatcatcctgcaatatttctcagtttcctaagtttctggaaaaccaaaccagtttgtatcatttagacatctctgccaatcaaattgaaggccaagtaccagagtggttatggagactaccagagttgcggtatgtaaacatttctcataattctttcaatggttttgaaggaccagcagatgttattcaagaacgtggagaactacatatgcttgacataagttcaaacacattccaggatccattccctttgttaccagtagactctatgattttcttgttcagctccaataatcgattttcgggagagattcctagaacaatatgcgaattggataatcttgtgatgcttgttttgtcaaacaacaacttcagcggttctattccaaggtgttttgagaatttaactctttcggtcttgcatcttcggaataacagcctctctggtatttttccagaggaagctatcagtcatcgcttgcaatcatttgatgttggtcacaaccttttctcaggagaacttcccaaatcattgatcaactgcagtgcactcgagtttctgaacgtggaagataaccgaatcaatgacacgtttccatcctggttgagattgttgcccaatctacaaatgcttgtccttcgttctaacgagttccatgggccaatatcttctcctcgagattctgtaagcttccccaagctgcgaatctttgacatttcagaaaatcatttcaatggagttttgtcatcagattactttgatggttggactacaatgttatcagtcgtagtagactttgtagttgaggtgtatatacttgggagaagttatcctaagtcggtggatttaacaaacaaaggattaaagatggagcttgttgggagtggtttcaaaatctacaaaaccatcgatgtctcgggaaacagactcgaaggagacatccccgagtccatcagtcttctcaaggaactgattgtgctcaacatgtcaaacaacgctttcacaggccatattccaccatctctatcaaacttgagcaatctccaatcgttggatctatctcaaaacagattatccggcagtatcccaccagagctcgggaaactcacatttctagcacggatgaacttctcgcacaacaggcttgaaggtccaataccacaaggcactcagattcaaacccaggatagttcttctttcacagagaatcccagtctatgccgtgctcctctcaaaaaaaaatgcgccgagaagaagatgaagaagcaacgaagcaagaacaagatgaagacaaggaagaggaagataaagtatttagctggatagcagctgcaataggctatgtacctggtttgttttgtggactcgccatcgcccacattctcacttcatataaacgtgactggttcatgagaatcttttctgcttttcttctctgctgaaaaaa

SEQ ID NO: 162242 - DNA, 299 bp, Arabidopsis thaliana landsberg
aatctgtttagaagcagtaaatagctttgttagtgtttttatggtcaaaatgtgttacaatccaatgcatttgactcattagaagaattaaagatagattaggagtgtttagaaaatacttatacccattttgtcccaaaagaggctaaaaccaacaaaaattgcttaaaagcagtaaatagcttcgttagtgtttttatggtcaatatgtgtcacaatccaatgcatttgagtaactatacgagttgaagctggttaaggtttgtttagacaacacttatacccattcttacttacaa

SEQ ID NO: 162243 - DNA, 900 bp, Arabidopsis thaliana landsberg
ctgcaaaaatgtatatgtagatatgtgagtataacttggattatactcatatcagtttgaaaatcacgtaggttcaaaattacagaaataaccacttacctaagtataaaaaccatcttatatattaacaaaatcggccagtcacggaggctagatgtcacggccagcactaaaaatggcgcaaatttgggatcaaaccaattgtaactttgactcctcgggatgtggccgatgcataaccggtgactgcgcaatggtggacttcaatgcgctggttggggccagcctccgaacacgttggctaagtatgctttgaaccaatacaataatttagacttctacgacatctcacttgtggatggatttaacattcctatggagtttaggtaagaatatcgtcataatctttcgtaaaattgactttttcccaaaaacaaatggaacataaatgtccaaacctaaattttctccccgaagaaaagaaaacaacaatcgaaagtctatttttaaaatgttctgaactgatgatgatagtgttttgttggtgttaattgtttccagcccgacaagctcgaattgcaaccggataatatgcaatgcagacataaaaggacagcgtccaaacaagttgagagccccggtcggtaacccgtgtacggtttataggtcaaaccattactgttgtatgagcggacaaggttcatgtagcagcactgggttctcaagattcttcaaacagaggtgtcccgacgcctacagctatccggtatccacaagacgacccaacaagcactttcacttgtagttccgctaactacagggtcatgttttgtccttaggcgctaagctcggtgctacgggtctcaccagctcccgattgaccccggtccccggtagtta

SEQ ID NO: 162244 - DNA, 415 bp, Arabidopsis thaliana landsberg
aaataatccgaacgttggctatgtagaatcagataatattatctgaattagaaacaaacagatgttaactttcttcaatcttaagaatagagaaagcgtcatacctttggcatgatgggtatatcctcccgacgccatttgggctggaagccgattcctaagaaaccaattcccatttcctcagcaactgcttttacctgtgacatccgtagatagttggttatttgtcacgttttagggtgagagcattggcaataattatctttgaaattacctgataaagatgtgaattgacttcagcacaagtttgatgcaaagtctcaagaggtgcaccactaagctcgaactgacccccaggttcaagtgaaatgctttgctttccctggtcaacaaaaggacagaacgagttatctac

SEQ ID NO: 162245 - DNA, 429 bp, Arabidopsis thaliana landsberg
actagatattgatccgcggtacaccgcgggtggatatgttcattagaaagttataaatatttttttataagaattattatttctatataaatattatattcttcacacataatttttatttatgtaaattttgaataattcatgttttatgttctcatatttgttagtttaatagtaaaattcagtatttgtttttttggtttgggtttttttagtcgtaataaagatataaaacttgtattatttagagattgacccgcggtacactggggttaataattttgtcagaaaattagatatttttattttaactaatattatctatatatatatataacatattcaagaggtagatcaaaagcatatatttttattaaataaaaaataatatttttgtctttaatatgatctatagatacgtgttgttgg

SEQ ID NO: 162246 - DNA, 304 bp, Arabidopsis thaliana landsberg
ctccttgttagtcttcacagtagattcacctaatatgatttacattatgcaaatggatccgtatatttttttggggcagctttcttggtggtcttaggtggttctccaaaaacattccaaagcctgagagtctcgtcaacggctgcagaagccacggtacaaccatccggactctgtgccataaaaagaactcttgatgtatgaccattgagttcagccattttcaccatagatgggtacttccaaagtgtaagctggttctgtgtaaacccatgtgagctaagcaactctctttcacttttgc

SEQ ID NO: 162247 - DNA, 122 bp, Arabidopsis thaliana landsberg
aactacatatatatatacgcacatacgtacacagttcgaaggttttagctgcgagtatgaggaaggaactgtgtagaaactttcagcgtggcaggtaaatactcttttcatcatcatcatgc

SEQ ID NO: 162248 - DNA, 172 bp, Arabidopsis thaliana landsberg
ccgggtatgatgttgatgtttctgccgccaaaatgtcatctgctgtttgaaatggaagatgttgaagtatcgacattggtgcagcatatataagtaacagatcatggccttgcttagcttatgttatgttgatgtcttgatgattacttaggagctttgcttttgcaatagg

SEQ ID NO: 162249 - DNA, 372 bp, Arabidopsis thaliana landsberg
gacatacgaaactcattcaagaccagatagccctaacagctagtaggtgaaagccggctattctcactaatacctcgcgtactcaggtgccctaacggccagtaggtgctaacatggtttcgagatacagatcaaagcattaagttcaagttttattctagtccataagtccctatcactcggcgggcgtgcaacgattatagttctttatttagttgagttagttcaagcatttatacaagattctgccaagtataaaatacctaagatcatgtactaggtggcgttccggacatacatgcattaagattaaactcaactagaaagaatagtgtaagcgatcaaacaaaatcatagaaactgccaacctaa

SEQ ID NO: 162250 - DNA, 306 bp, Arabidopsis thaliana landsberg
ttcagtttcaagcttttatctttgttttcctctttaagttctgagatctagagtttttctagatttctttgttctcactcttaattctctttgtgtctttctgagattagtcatcggttaagcaatttcaaggtaagggggttctaagtttcttagatttttcttcttctttgggatacaaaatctggggtaatcaagagaagctcaatggatgaatagaagaaaatctctgcttttagtgttaacaatggtggtttctcggaatcgacgtgtgttttagacttttaaaaatcaaattgagatctt

SEQ ID NO: 162251 - DNA, 267 bp, Arabidopsis thaliana landsberg
ttgttttttttttatttttttttattttttattttttttttttttttttattttttttttatattttttttattttttttttttttttatattttatttttttttttttattttttttttttttttttttttttttttttttttttttttatttttattttttttatttttttttatatttatatttttttatttttggggttttggggttttttttttttttttatattttacagctttgcgggtttttttttgtttttgtttttt

SEQ ID NO: 162252 - DNA, 102 bp, Arabidopsis thaliana landsberg
ttgcgtagattaaaaatagttattagtccgagaagtgattttgagatctgtgcgtagttttgtgtttactaacaattgttaatgaaaagtgattaccgttaa

SEQ ID NO: 162253 - DNA, 93 bp, Arabidopsis thaliana landsberg
gtgaagaaagaaagaataataagaggtttcaatcttaataacttccaaacggcatggttggattttgtttagagactaaaaattttttttcgt

SEQ ID NO: 162254 - DNA, 106 bp, Arabidopsis thaliana landsberg
gacacttcgtgcaatgctgaagctaaactctccaccgctttcttactcttctcctcttcctcctagtgctctccagttctgacaagatcttctttttttcttccaa

SEQ ID NO: 162255 - DNA, 271 bp, Arabidopsis thaliana landsberg
  unsure (1)..(271): unsure at all n locations
ccccccccccccccccccccccccgccccccccccccccccccggaatcccctcccccccccccctttttttnngggggccccccccccccccccccccccccttttccccccggggggggggnccccccccccccccccccccnncctnnncccccccccccccccccccccnccccccccccccccccccccccccccccccctcctccccccccccccccccccccccccccccccccccgggccccncccccccccccccccccccc

SEQ ID NO: 162256 - DNA, 447 bp, Arabidopsis thaliana landsberg; identical to SEQ ID NO: 5531

SEQ ID NO: 162257 - DNA, 211 bp, Arabidopsis thaliana landsberg
gacggcgtgctttctccttacttatatctttcctctattccactttcttaattcaaataacaaattgtcttaaaaataatcttaaatcattgaaaactctttaataaatcgtataagaaaataacaatagtagaaaataaacccgaggttcccaaaatacactgtaagcgagacggacttgcgcgactacacacgattttcactgtgacct

SEQ ID NO: 162258 - DNA, 512 bp, Arabidopsis thaliana landsberg
agtgtctactaaggattctgcagcaactcaagactgaaaatgacatcgctcttcaagtcacgaagtccgtaaattccttcggtttgtcgttacaattgattttataattttcatacactccttcaatacacatttaaactatacactaaacttttttttttttctttcgtataattattttgaaaaagccctgcagctatcaactctgacgtcgaggtaattaatctttattccatcaattaattagaacacatagaaatatactataagtaatgaataaatttccatacgtattttaaccgtctcgcttatctaggaacttgagcatgaagtttgtaggttacaacaacaactccaaatggcagaagaagaactaaggttttttactcgagaaataaatgttttatgttatagtttataattttttttaactcaaatcatgattacttactatataatatgagcaggagatacgaaccggatccaataagattcacgaccatggaggaata

SEQ ID NO: 162259 - DNA, 123 bp, Arabidopsis thaliana landsberg
atttacatgcccacaacaaacataaaaatcatacctttaaaatgtctctactttttcttgaaaacccaagatttttttttaaaaatctgttcttgcttctttcgacacctttatcgaaaatta

SEQ ID NO: 162260 - DNA, 391 bp, Arabidopsis thaliana landsberg
ttgcttctccacgttttgcaatgtaggttgtttttggactaagtaaacgctattgcaggttttgtagggtatgtaagtctttgagagaaacgacgtgtaatttgcaatttgcttgtggaagatattgttatttgagagagactaacacaggtctttgaagctcaccaacttaactctaataattgactacacaaaagttgaacaattctctccagagtgtgacactgtcgttttgtttccattgagatactcttaaaaaatttcagatcaaatggcattaactaaactagctaagcagaaaaaccatttttggtctggtttcctctggttttccattttctaatctctgccaaactcttctccatcttactaagacgtgtctccagctcca

SEQ ID NO: 162261 - DNA, 126 bp, Arabidopsis thaliana landsberg
tgtgatgcaaatagatgagatgtgatcagaagtcactcagtcaagccaagcaataacaattttgaggtttctaacagtcccagaaaacataaattctaacagatttacaaaaatcactcgaccaca

SEQ ID NO: 162262 - DNA, 414 bp, Arabidopsis thaliana landsberg
  unsure (1)..(414): unsure at all n locations
ggggggggggggggggggggggcgggcgggtgcgnggggggggggggggaggagagggggagacgggggggggggcgggaggggggggcggggggcgggggggcggcnccgggacgggagggggacagggaggggggggggggggggggggcgcgccgggggggggggcggggcgggggcgggggggggggggcggggccgccgcccnnccggggggngggggggggggnggggggggggggagggggggggggggggggggnnggggggggggtgtgggtgttcgctggttnnnnnnnggngggggnccacccaccaccacaaacaaaaaaaaaaaaaaagggggggggtcgggggggggggccggcgccggggggggggggggggggggggggggggggggggggggggggg

SEQ ID NO: 162263 - DNA, 107 bp, Arabidopsis thaliana landsberg
ttaccaggtgaagaaacctaagtatgtccagcagaactcgggatgttctagaaggtccggttaaagttagctcacttaaacgcccgcctgcgaagcaaagctctttt

SEQ ID NO: 162264 - DNA, 139 bp, Arabidopsis thaliana landsberg
gggggggggggggagggggggggggagggggggggggggggggggcgggggggggggagggggggggagagggggggggggagggggggggggggggggggggggggggaggggggggggggggggggggggggggggg

SEQ ID NO: 162265 - DNA, 117 bp, Arabidopsis thaliana landsberg
taacagtagaatttaatagaattctaaaaccaatcaattgaataacactagatttaaatagaattctaaattctttcatattcaattaaaatcataccttcaataaccccctattag

SEQ ID NO: 162266 - DNA, 174 bp, Arabidopsis thaliana landsberg
  unsure (1)..(174): unsure at all n locations
gggggggggcggggtgggggggggggggggggtggggggcggggggggggggggggggggggggggggggggggggggggggggggggggggnggngggggggaggaaaaaaaaanatttgggggcggggggcgcggggggtatggggggggggggggggggggggggggaggg

SEQ ID NO: 162267 - DNA, 120 bp, Arabidopsis thaliana landsberg
ggaggaaggggggtgggggaggggagtggggggaggaggagcgggggggggggggggaggggtgaggaaggggagagggggggggggggaggggggggggaggggggagggggaggaggg

SEQ ID NO: 162268 - DNA, 130 bp, Arabidopsis thaliana landsberg
aatgataaatggatatacaataaaacctctataaattaataatattgggatcacgaaattttattaatttaaagaggtattaatttatcgataaattaatatttattaatttatagagacattttcctaa

SEQ ID NO: 162269 - DNA, 229 bp, Arabidopsis thaliana landsberg
atacccattttcgcccaaaagaggctaaaacaaccaaaactttgcttatttacagtaaacagttccgttagtatttggatgggcaaaatgtttcacaatccaatgcatttgactaattataagagttagaaatggattaggagagtttagacaacacctatacccattttctcctaaaagaggctaaaaccaacaaaaagttgcttagaagcagtaaacagctttgtta

SEQ ID NO: 162270 - DNA, 286 bp, Arabidopsis thaliana landsberg
ttcatatttgtgttattgttgtttgtcatgattttggttcagatatagtgggtatgttcttctaaatagtagacgactcaagcaatccctttattattaaaagggaagtacaaattgaaattttgtctaatttggcctcaattttgatttcaattttggattttgttctttgctattcaaaatcattaagggtaatttggtcttaacagtctcctaaactttatatgatctgattcaatataaatcgttcaataaaattaattcccttcaatctaaaccgttcaat

SEQ ID NO: 162271 - DNA, 335 bp, Arabidopsis thaliana landsberg
tctgaacaagcttttggcttattcaggggcttttggtagtgaaccattggttctgcaacgtaaaatgatgtttatgcttatattaaaattctcatcaatgtcgttcagcaatcgctaaaatgcctttttggccactttcaatgtttcgaattgatacaaatagtcccgaattaagttatcaagtgaaacagagctgaaaacctctgttgtattcaaactagaacaaggattatacaatcaaatgagtaagaatgtcaattacaaacattgaagcttaaacttcatattgtaatccttaaattgcacgaggaggtttctcgagcagtgcagagagg

SEQ ID NO: 162272 - DNA, 183 bp, Arabidopsis thaliana landsberg
tgaaaagaaaagaaacgcttccaaaatcggtgaacaacaacaagcttttacagttgtgtgcaaaaaaaaaaccaaagttgcaagtgactactttctcacaaaaccaaaaacgcataactttggtagagaatgagccgtccatatatacagaagaaggatctgagttttcttcatctccttaca

SEQ ID NO: 162273 - DNA, 176 bp, Arabidopsis thaliana landsberg
tgctattttagaaaatctatccaccaccacgaaaatggaatctttacctgtcctagtccttggcaaacctactacaaagtccatagaaatatcattccaagggtgcaaaggaataggaagaggagtatacaaaccgtggggttgtgacttagccttagcttgtttacatgtcgtgc

SEQ ID NO: 162274 - DNA, 1004 bp, Arabidopsis thaliana landsberg
agaggcgacgtgttcacggtcgtagcgctcttttcgacgttttgctgtgattattttggccgtgagcttctccatttccatttccatcgccatcggactctctcctcttacaaacttttcatttttgttagctctcatctctacgtcgaattgctttttctcttcttctccgattcgaaaatgaggacaatcgtttcgcgtttgattcgttatcaatcgtctctttcccagatacggtgaatagtctcttccccagctctttaataactctgatcgcaccttaatcgtcttctaagcatcaattagtaggatgttgaaggaaatgtgcatttgttttggtaattactcgtagctaggttggtctcatgatctagattctaacaattaggtgatttgggttgcaattgagtgttttgtgaaatttcagatacttgactttagctttactgttctgtgcttatggattatgttgcattaggtttgtttctgcctctgctggcgggaggtatctctcgacagactctaacaaaattgatgagcccttcaatgtggaagaagctgagactgtacatgtgccgccacctcctactgagaaggtatacgtattggccttttgggggatcttacatagtaattctttgtaaagatattgcaatgatgatcatgatcttggaacttatctttcatttctattgtcagctgcttgtcctgggaggaaatggttttgtgggatcacatgtctgtaaagaagctttagatcgcggcttatctgtctctagccttagcaggtatctaaactttgattgtagggagttaactcatgtcttagatcaaatgtaatttggttgaaatttgtggatcacagttaaagcttctcatttattgaaatctgatctacgttggatgttgatttacgggattgcatttaaccatttgtatgggttttaggtcaggtaggtcgtctttacaagagtcctgggcctccagagtaacatggcatcaag

SEQ ID NO: 162275 - DNA, 213 bp, Arabidopsis thaliana landsberg
ttttttatattttttttttttttatttttatttttttatttattttttttttttttatttttttttgatttactatttcttttttttctttattttttcaattttatttatttttttttcattgtttttttttttatttttttttttttattttttaattatttttttttattttttttttttaattttttttttttaattttttaattattt

SEQ ID NO: 162276 - DNA, 299 bp, Arabidopsis thaliana landsberg
cttagcagcttataaacctcttcgtcacttagtttctcccctctcaaattcggaccatatctcacattatccgcaacagtccctgtaaccaaccacacattatcaagacctatgaaactagaggctaagcaaatcccaaaatttgattattaccttgaaaaagaacaggaagctgaaaaagcattccaactctacgacgaagagcaataacatcaacgttggttatatcttcaccgtccaagaacacagttgactccggtggttcccaaagacgattcagagatctcaaaatcgttatc

SEQ ID NO: 162277 - DNA, 270 bp, Arabidopsis thaliana landsberg
cggcagggataacggccccgccacattttctggttattgcatatagatgcaagaggttgctggtgaacgtggaggctatcttcatggacgaggcggtaccaatctctctctctctctttttttggttttcgttcttcttttgtagttgtgtcatggccataattcttgagtttcttgtagctctagatagcgacgatttactttatctgaaagaacagatggaagcagaggaagatgcagaacgtcttctgagacgaactgagaaacggc

SEQ ID NO: 162278 - DNA, 318 bp, Arabidopsis thaliana landsberg
acagagacctcgtcttaagagctttgttctctcaatgattcagactactttctgtgtcttttgcaacaagatggctaacacgaatctaagattagtaatatgaatacaaacaaaaaaaattgattctgcgtttaattcgtttactggatgagaaaataatcagcatcaaacacatctccagcagtaggagagaggttgtttctccggagttgggcatgagtctctgcttcgtgttgaaatatcttaaccacgttttgtagctccagctttcaagaaactacatgttcttctgtgatgggcttctttggccctaggtat

SEQ ID NO: 162279 - DNA, 193 bp, Arabidopsis thaliana landsberg
atcttcttttctgcgacattgttctgttttgcttgcgtgttattatcaccgcttgtgtgttagtttaggttaaattcagtttgacaatttctgttgagctaacttccataatcattttttttgccgtttgcgggtaatttaatctatcctcgtaaaattcgagcaacggcgtgatcgactttcttggttaatg

SEQ ID NO: 162280 - DNA, 526 bp, Arabidopsis thaliana landsberg
gcaatttatactatttaacctaacagattttttaagaagcaccttgttttatattgcgagtttaaactctatcaaactttattttagcatatacctagcgatgttggctcacatacatttcacacagcataccacaagcgtcgagtagttcgccaatcaaagcttggttcggccacggccacttgctcttcgttgaaccataatcgtcgagctatatgcaaatcaatgcttcttggctcactttcaggcacaaactcagacttaggatgttgaacgcatgcaaggtttggacctttaatgatccgcttaggcccaaagcgacgcatcggctttgccttatgtgtgaggttatttaaccatggacttgggaatttaagcagtttttgctgagtctcatcagctaatttttggccgcttacgggattatgagtaacaaaccagattgacgccaatgccatgaataaaaccagagcaattgatattatgtctaataagctgatccattttgtgaggcctcctcctccca

SEQ ID NO: 162281 - DNA, 156 bp, Arabidopsis thaliana landsberg
cttgaaaagacactaaaaagactcgagaaataacataaagactcaaaatcctatacctaaaacatagataaaatcggtgaaaatcgggatatatcaactcccccagacttagcttttgcttgccctcaagcaaaacacaaaagcaaaacccgtgga

SEQ ID NO: 162282 - DNA, 116 bp, Arabidopsis thaliana landsberg
gtgagttctcaacctttgtagcttaatgttcttaccaaaaaatggaataaggaaagcagaacaaacagaagaagcgacgagtgctgttcttagaagaagaaagcaccatatgttct

SEQ ID NO: 162283 - DNA, 79 bp, Arabidopsis thaliana landsberg
aagaagagtcaagttatcgtcagtcaactgtagaaaccaaatttccggtagagaaatcaaaatgcttcagctgttgtgt

SEQ ID NO: 162284 - DNA, 110 bp, Arabidopsis thaliana landsberg
aggagggggggggggggggggggggggggaaaagggggggaaggggggggggggggggggagagggggggggggggggaaggagggggaggggggggggggggaagaggg

SEQ ID NO: 162285 - DNA, 164 bp, Arabidopsis thaliana landsberg
  unsure (1)..(164): unsure at all n locations
ccccccccccccccccccctctccccccctcccccccccccccccccccccccccctcccccccccccctcccccccccccccccccccccccccccccccccctcccctccncccccccccccccctcccccttttttttnnnnntttttttttttttttttt

SEQ ID NO: 162286 - DNA, 478 bp, Arabidopsis thaliana landsberg
taacagtagaatttagtaaaattctaaaaccaatcaattgaataacactagatttaaatagaattctaaattctttcatattcaattaaaatcctaccttcaataacccccctagtaataacagttttgtttttcagtgtcaaagcataacagatttactcatgtcaatgttctggccgatttgtttatgactagaataacctttttagtaataacagaatctttttggcatatttgtttttaaaatttcaaaattttttgttataagagatttattagctagccctcaattaaattatttccgatttcatattgtattttaaatccggtttgattctttttttttgttttttaaacgttacgacagacttttattagccggcagattttttcaaaatattgccatatttgaatttaatgcattaaatatccaattatgagtcaaggtatatcctccaggggcggacccactcaaggg

SEQ ID NO: 162287 - DNA, 376 bp, Arabidopsis thaliana landsberg
gtgttatgtctttcagtttgtggatttgctctctttggccaattaagtgatcatagatgtataaggcgtgttggtagatttaaggtgcgtagactggtaagatgctaatggaagtccatatgtgttttcccctacctagacgctggacccatatgactcctcatttaatgcgtcttataattaagtagttaatattgtttgtttgtcgaggattataattagagtgtatgttgttaatgacccataatttccacccgctcatttatcattattgttatgaaaaataaattagggatgtcaaatattaatatataggcttatagtttcggttaattggataaaaagagtttgcattaattacagtaagaaaaagtaa

SEQ ID NO: 162288 - DNA, 142 bp, Arabidopsis thaliana landsberg
aacagcatgggaataatgcttgacgatgcaagaaattatgaatgatggcctgaaaagtagactggaaggcactgggaattagttttttaattccacgactgcacgggaacagcgcgaactttactggtggctatgtgtgacg

SEQ ID NO: 162289 - DNA, 311 bp, Arabidopsis thaliana landsberg
tatatgaaaaatctaactttcaaatatatagtatatatatcatcaatattacaccaaagctgctatagaatgattcagatagtatacattgatttatacacaaaaactagatcataacccgtgctatacagtacggacattaatattttgtataaattaaattatatactttgtttgaattacataggaaatattatagtataaaagtgatatcataatatttttcaatatttttactatttggatataatgctgcattggattgactttgtttaaaaatgttatttttatactaaatacaacatacatag

SEQ ID NO: 162290 - DNA, 932 bp, Arabidopsis thaliana landsberg
gggaaattgatgcttggcttgagctgaatctttgtaagagctttcattaatcatggattcaggtctttaggtcttggttgaaggagaaccaagttagagcttaagagcatgcggtcgcagttgagatgataagtttgtctaaatgagtaggaaggagaattgtgttgtcatcttctactaggctaaggtgagggtggtatttgcgaagcatggtatcattttcttttgttatgcttcttgacgcatgatatgtagacttggatctgattgtataggattagattacatgatgatatgactttatgattgttaagtatgatgtttgataatgtgaagttatgtatgatattataagtatgtttatgttaagtataagtatgtatgtatgatgattacgtatgttcgtatgaaagactgggtagaatcgagctatgggccgtggtctccctagtaatgtggacagtgatgggccgacgggttacatgctggtcaagaaaggctgacgagcccgatatgcatgggagtgtctgagccacgagggccaacctccactcatgaggttctagttgtcacgaggatgaatggacctaaagatatatatacgtatatatgtgctattatgaataagatgatcgttatgaatttgttattagaagttaaagcatgtaaagttgattgcttgtgtctaagtttattgttatgaagatggttgtatagctttagaaattgttctatgtttcagtgggcagagttgattcccctcactgagtattctttatttacccccttttccccttttgtctctaattagtaagcgtgaggagttgtgtacaatattttgttcgtgtgtgaagtttaaagaaaacgtttttgacaagatcagatgaataacatgttgtcttagtctatatggcgggacgggtgttacacgt

SEQ ID NO: 162291 - DNA, 378 bp, Arabidopsis thaliana landsberg
tatatattaatccaaaaattagcaaaagcaatagttttatagacatttttaaaactttggaaataaagaaaagtagaagaaaggaaaaaaggaactgataggtctcatctcaatttgaggctcaagaattaacgaacaaactagaccaagaacaaagaagaagaagtagaaaaaaggcgggaagtggggtcgacactattcaagaaattgcaacttgaccccaaccaatattcaaatcaatcaatttagacccccaaaaaatcagtcggatacaggatttggggagccagatgaatgagaaacctcctcaatgagtctggtgacttcagccatcgaaggacgactatctgggaactgagccgtacagctcataccgat

SEQ ID NO: 162292 - DNA, 3533 bp, Arabidopsis thaliana landsberg; identical to SEQ ID NO: 31407

SEQ ID NO: 162293 - DNA, 1095 bp, Arabidopsis thaliana landsberg
atggggtacggtatcctctcttagactctttatgtttcagtctcatctctccgcttataagtgatcgtgtttttgttatgtcgggtttaggatttgttttatgttttttttgtttattccggtttctctttggtgccttgccgttttcgttatctcgggtcgggatggttgaattaagggatttgaatgacattcatacgtcgtgtagtaatactttgttaatcaccctgttgaagctacgaagttgctataattcgtagttttttcttataaacgttggagttatttggtctgaaatgtggaaattatgattatgatttttgatttttttccttactacactctcctcttgtgttaagtatttgtgatttagattataactttatgttctttatcaactccgaatttgttttatatgttctgagtgagttgatttcatctgatgaaatgtcctttggttctcaatttcttttatcttctatttgaatatcttcagtaagacacgtggtatgggagctggtcgcaagcttaagcagcttcggattactcagaggtgggcggacaagcattacaagaagtctaatcgaggcaacgagtggaagaagccttttgcttgttcttctcacgctaaaggaatcgttcttgagaaaatgtaagtttgtataaacatatatatttaccatttcttgattttgttagtagtatagatcttgactttgatgagactctgtgtttgattatgcagtggtattgaggctaagcagcctaactctgctatccgtaagtgtgctagagttcagttgatcaagaatggtaaaaagattgctgcctttgtccccaatgatggttgtttgaactacattgaagaaaatgtaagttagattgacatctacttttgaatgagtaatcaaattatattcttaccaattactcattcattgatactgtgtgtaggacgaggtgttgattgctggatttgggcgtaaaggtcatgccgtcggagatattcccggagttaggttcaaagtggtgaaggtctctggtgtctcactcttggcccttttcaaggaaaagaaggagaagcctaggtcttga

SEQ ID NO: 162294 - DNA, 1276 bp, Arabidopsis thaliana landsberg
agagaaaagcaagattctggtgatcggagggactggtcacatcggaaaactcattatagaagcgagcgtgaaagccggacactccacactgggtctcgttagagaagcctcgctctccgatcccaacaagggcaaaaccgtccagaatttcaaagattttggcgtcacattacttcacgtacgcttgatcctttcgttaataagtttcatacaaattcaataaccataaccttagttatgtatatgataacttggtcagggggatttgaacgatcatgagagcttagtgaaggccattaaacaggccgatgtggttatatcaaccgttgggagcatgcaaatcttggatcaaaccaagatcatttcagctattaaagaagccggtaacgtcaaggtcagatcttgatacaaacccttaacatataaaaaatcgaattgcataagaccaaatttgtacatagtttcatgttttgcagagattcttgccgtctgagtttgggatggacgtggacaagtcaagtgcggttgagcctgcgaaatcggcttttgggaggaaactacagacaaggagagacatagaagcggaaggaataccatacacttaccttgttaccaattactttgctggttactacttgcccacattggttcagctggagccaggtctcacttctcctcctagagataaagtcaaaattttcggagatggaaatgtcaaaggttagtttcatatcattaacattactgtgctttttatgcaattgaatctaacacagtcgaatatttcatagctgtgatcaacaaggaggaagatattgctgcttacactatcaaagcggtggatgatccaaagactctgaataaaaccctctacattaatcctcctaacaacactttatcgatgaacgaaatagtcaccttgtgggagaaaaagattggcaagtctgttgagaagatttacatgtcagaggaacaaatctttaaaagcatccaaggttcagaaaatcaattcaccaagaggtctttcgattctttataactacttttttttcattttctagaatatgaagatctctctctttttgcagagtctccggttcccttcaacgttcttctgtcgataaaccacgcggtgtttgtgaaaggagatcagaccaatttcactatagagccttcattcggttttgaagcctctgagctttaccctgatatcaagtacacgagtattgatgagtatctcagttatttcgctttaggaacttcattaaacacctaa

SEQ ID NO: 162295 - DNA, 552 bp, Arabidopsis thaliana landsberg
gtgtcatgcattagcctgtccgcttccaggttggccagtaaggctcgaacaagggctatctcccactcttaaagccagcagtcgaaagagttggggcgtccaaaagcgctggatagctatccgctggtggttctcctgtagctggatcctctagagccacaagaatgcttagttggaatgggattccagctcggctccgtgtgagattgtgagcagagcggctctttggggagcacagtgctatgctagttgcaacctgtgttcgggggggggttcttgtcgatcgttggcctcgataagaagtaccagtcaggggcctgataggcggtggtttaccctgtggcggatgtcagcggtatgcgagataccggttatctccaactcgaggacttggccgatgcatagttatatgattgcacccaattgatccgattcggcagttcgagctatgattattcactcatggacgaagatctgatctatccattctggagcttcttcggatgggctaagcttttagttgacggcgaggatcaaaccaggaacggctaa

SEQ ID NO: 162296 - DNA, 865 bp, Arabidopsis thaliana landsberg
gcgactttgaccttaagctttctcaaagagtaaaaatgtctgcaaatgagttaccttcttcagctcaagccttccaagaacaattccttggcggttttgtctctagaaagctgcttctgcacaacccatttgaccacaacactcaacgagcctttgcggttgcaccatctcctctcataacccatgagaacaacctcagtgggaatgttatgatgcttctctcaatcctcatttgtggcattatctgctgcctcgggttacattacatcattcgttgtgcactcagacgttctacacgtttcatgatctccgagcctgtaccaagtctttcgtcaacacggggttcatcaaacaaaggaatcaagaagaaagctcttagaatgttcccagttgtgagttactcacctgagatgaacctgccagggcttgacgaagagtgtgtcatttgtttgtctgattttgtttccggtgaacagctcaggctgctccccaagtgtaaccacgggttccatgttcgttgcatagacaagtggcttcaacaacatttgacttgtccaaaatgcagaaactgtctggttgagacgtgccaaaagatattaggtgacttcagtcaagctgattcagttacggcagaaccaacagagatcgtaattgtcacgattgttcctctagaaccaacagagatcgtaattgtcacgattgctcctctagaaccaacagagatcgttattgtcatgattgctccgctagaacctgaaggaagagtaaacactattagagaaatcagctaggtgcaaagaaagacagaaaccatcagcaattcagaatttgtacttctaatttttttatgactttctttttacct

SEQ ID NO: 162297 - DNA, 4349 bp, Arabidopsis thaliana landsberg; identical to SEQ ID NO: 35554

SEQ ID NO: 162298 - DNA, 577 bp, Arabidopsis thaliana landsberg
atttatcttgtctgcgatggaaagttacttgaatctatgggcaaccaaagatcttcttgccttagacgtttatctatctttctaagcctcagttctaaagtcattatgaatctgaacagggtcttttgtgttgttgcagcaaagtggcgaggaagtcgaatgcgtaagggttgactgtaatctacagaaacaaaaatctactctaggagaggcatacagagaaaaacaagaagttgccactcgatctctgtcacaagaagacttgatccatcaggggaggactaaccaagcaccaggatgtgatggatttacttattcaattctaatcagtttagtggaattatactttgtctggtccatacgaaataacttattctctgcattgattatacagaacgagagaagaagaaaacattgtagaaagtaagacatcaaagtttaatattctcttgttgtatgtatacctctgttttgctgtcaaagatctttgatctcctctgatatatttaaactaaaagatttaattcttcaaacatatcattataccggagagggagaggttcatattctaaaacat

SEQ ID NO: 162299 - DNA, 1045 bp, Arabidopsis thaliana landsberg
tttctttgacactttttttctttgagcacttgtgcaagaataagcgtgtttgtgtgtcttggtgatgttaggcaagagcacaactgtcaagacacgctacacagtcatgtcacgggagacgctgcacaaataccctgaactagcaaccgagggttccccaaccatcaaacagaggcttgagattgcaaacgatgcggttgtgcagatggcatatgaagcgagcttggtttgcatcaaggaatggggaagggcagtggaagatatcactcatcttgtctacgtttcctccagtgagttccgtttgcccggaggtgatctttacctctcggcacagctgggccttagcaacgaggttcagagagtgatgctgtattttcttggatgctatggaggtttgagtgggctgcgcgtggccaaagacattgctgagaacaacccagggagccgtgtgttgctcaccacctctgagactaccgttctggggttccgcccacccaacaaagctcgtccttacgacttagtcggggctgcactctttggagatggagcagctgccctgatcatcggagcagaccctacagagtcggaatctcctttcatggagcttcactgtgctatgcagcagttcctgccccaaacacagggggtgatcgacgggcggctgtcagaagagggcataaccttcaagctaggaagagacctccctcagaagatcgaagacaacgtggaggagttctgcaagaagctagtggcaaaggctggctctggtgcgttggagttgaatgaccttttctgggcagttcatcctggtggaccagccatcctgagcgggctggagacaaagctgaagctgaagccggaaaagctggaatgcagcagaagggcgttgatggattatgggaacgtaagcagcaacaccatcttctacataatggacaaagtcagagatgagcttgagaagaaaggcacagagggagaagagtggggtctgggcttagctttcggaccgggaatcactttcgaaggctttctcatgaggaacctc

SEQ ID NO: 162300 - DNA, 2526 bp, Arabidopsis thaliana landsberg
ctaaatgggaacctgctcaagccataaactttgttacaacgattgatctatgggtgcaaataagaggtattcctttgatctatgtctgtaaagaaactgctatggagattgctcaggatctaggggaaatcattcacttggatttccaggaagcaacaacaactcaaatcgcttatataagagtaagagttcgttttggaattaatgatcgcctcatgttctttcagcgagtcatatttgattctggggagacagtaaccattcgattccaatatgagcgactgaagagaatttgcagtagctgttttcgcattactcataacagggattactgtccctatcgtcaaagacatcacagtattgcaagggaaagggctatgtttcgtgacactgttatgagatcaagtatgaactctcagtctcagttgactgagaattcatttccagcccctgtaactcctcttccaagagtagcaactccaccggtgaatcatgatgaactaagagcagctatgtcttgttttgtttctacaagaaggctacataggcatcatcactactcagattcaaacagatatctagtggccaatgatagaaccaatcaagaaggcagatcatcgtttgaagttggagaatcttcaacaagacatgaggattgcgaattgagacaaagagaggaaactgcaaggcagtttaatcaacaagaaagggctcaaagaatgagaggtattatgaaaccttccaaaaaaagataatcactcaacaagattctgtcattactttttgatttacaggtgctacgtttgaagaattgcagctcaactgggtttgaataagacagtggacagggtatggtttttggttaggacatacccctagtttatgaaatgctgttttttgtaccttttcgtttcacaaattggatcatggatagaatcgttttcctttttgtgttttatgtttcaaaaatgtaagtggaaagtccactgctgcaatcacaatgtaagacctgtatctttgaagttttaatgaaagacactttcagagaaaaaaaaaaaaaaaactatactcgtccatgttattattttatggcatgaagtgccttagttttgtcggaaagcacgcagctcatagcataagttgtttaatcctttttactagtgatatttagatgtagttacctagaaattagttccacatgagaaacatgagatagtaagctagaattaagtaattaacagtgtaactaattctaatataaatatacctaatgctctttaatagaaagacagctgtatatacgtcctacgttaggtcttttttattagtttagtgtttgtgttcccatctgtgttgacgctttactttcattattattaggtgatcatccgcgctacggtgcgggttttttggattttttatattgtttaatttaaatataacttttatttatctaatcattcactaatgcaataagtaattatttttaatattaaaaatattttttcttaataacattctcaacaatgcatcatacatataattcataaatcatgtttgtattaaaccaatttaagagagggtagtgttggattctagaaacctaaaaatttgatgatggaactctttacgtatttttcaccctcaaagatttattatataaatattcatttaagagaataattaactcaaatcattaagtaatccacgactattatacactcatactttgagtttggattacaaaaaaatcattaacctataaattagaagttgaagagcttacattaattatttaatagacacatgacaaatgctaaagtgatgatgtgtcaatcttatgaagagagttggccaactttcatatatatgattagtaatgtttatttactaaaattttctgttttggaacacaattttcctgttttcgtatttagttgtagtctttttttttgtcgtttagttatagtttattacattcgaagatagttaattatattcacatatatagaattaaaatctaatgaacaagtatacgcaaattcgaaaaaattattgttcccgaggaaataaaacacgtggaagtacaatccaactttaatagaagaagcaaaaaaaaacgattatcagcaaaatcttgtagaatttgattggaaatacaataacacacaatcaaaagaaagtataaatgagagtatatacaactgtcaacatattttcgtgtattcgttctcttagattccagtttgatgaattcaaaatctcctataatgtgttattgaacaagttatccaaaccacagatggtgacaccgacatcaccaaccaagctctgaaatcagttagggaaaaaggtaaaagagactgaaaaaccatctcccatattacgaccctaatttatctgttagacatattactaaatcactagtatattttctctatcaatggttgctacactacttaatcttggtcgctagaaaaattggcgtgtataaacatgtaaatggtcaattatttgagacatagc

SEQ ID NO: 162301 - DNA, 2322 bp, Arabidopsis thaliana landsberg
ggagggtggtaaaaacgaacctaaggcatttatcttgatttttaatctccactatttattttctaccaaaccaagataaagcctttaccatcacaagctgcaacattcatacacatgtttagtctacttaaaacatatgcgacgaccacatagcagaaaagtcacctcacaggagcacgaatattatagaacaggtgacgcatgacatacctggtacaactttaggagggtgctgtttagcatcaggtgcacaaatatatctttgccactttataaaacacataatgaggaggctttggagcaaaagattcaccatcaggaagatttatgtagaatccaataacatcaccttccttatacccttcctcagcatatgtctcccttaaagccttatgtatcttacacccatcaatatccctaaacccaaaactattcccatcatacccaactggagcctgcaaatcccctttatcagtcgaccacccgagtcgtgtatgaccagtctcacctaaactcaaaactttaatctcaaagtaccaagctccttcaacaactcctcttgtagctctcaccatcctataccctttactacttcctgcagtaagtctatcttcacttatctcaactttctcagctttgtatactttagaaaggcaaatttccaagtcaggtgtatcgtctcccttatcgggaaatctaggcaccggagttatcaataccttatcttctacagctgctggattcggcgtgttggctttactcttcttctttcccttacgtgtgctcttagtcacccatacattattgttcttcttcttcgatttagatttcttagccgcactcgcaaccagagtcgccgcttcctccacaaccatagcttccgatggaagcacttgctctggctcctcctcttccttaacagcgactgaagtaagacaatctagctgcttaagcttcttatgcggtggatcatcttgctcttcatctccttcgtcttcttccattgcgctaccgttctgattagccacagaatccagtttcggagatttagggttatcggaggaagaagcagtcggagcttcttcagagaatgaatcggattcaattttcaaatcggatccgggttgatcaacatccatagctactacatctaatttctctaaatcagtatcgattggttcttcaattataccggacgattccaatggcgctaaatcattctcttcagaaggaagaagagcggttccggtggtagttccttcgggaagagaaattgagacttctgcttctgaagcagtttcgattgaattcttcgacagcatcggatgattccggcggcgctgaatcgtccaccagttcggagggaagaagaactccggtaggttcttcgggaagcgatattgagacttgtgcttcttcaattttgggattttgttcagcttcttcaattttggaatttgattgaagagactccattgaaacagaagttttttttgatgcagccagtttgtggcactcgccgacttgcaaatttttgagagactggcggatggcagagaaacagtgaattattttttttaaatgttagagacttatgtgggctttatgaggcccagtaagaaactagggtttggataaggggtgtccatgttttcttagtagtttagtccatttaaaaataaaaacggtttatgcatctaacaatagattatttggctttctcatatatttttttctaaaattttatactattatttggaaattactattatttagaacatttgaaaatagttttacttgatatttttaaagaatgtcatcaatacttaatagatcaaaaagttaaaaaattataagtactctaatttgatttttttataatagatatatttataattggtggtggttaaatataatgtataatacgatggaatgagttattatccttattctttactaaaatttgtttatcctatcgcttgcataaaaatatacatactaataaaaacttccgattacttataaattgagccaaaaaccaaatgcatgtattaaaacaaccagaaaatttcaaagaagtaggcatacgtcgtacaaaaagttcacagctttctttatttctaaagacgaggtatcctagccatccaacatctattcaatcccaattttccattgaacctgttcggagtaactcttcttttgctggattattaccaatataatcataaaaacaaaattttcaggaattttagctcaagcttctgataaaattttaataaaattgatttttttattgtaataaacttaaaaattaatttcata

SEQ ID NO: 162302 - DNA, 928 bp, Arabidopsis thaliana landsberg
cctcgctttctctgaaaaagcattttagtcacatgtctctgcttctcaaccagccctcgaagctactatgcttccggaggaaatctgttctggtaagatcctctcctcttctctctaatggtttatcatcttcattgcggcaaactccgccttgtaccatcatcgacgctgttccatgtggagaggatctcggaaaactcgtcatttacaatgctaacgcagttcacttcacttacttggaaaagaaggtgcctctagagttggtgcgcagtgatcccatggtaacgatcgggtcatcccatggttgggtagctactttgagtcaggacgacggaatactgcgtctccaagatgattttaacccggctgcatcggatacgaaccctaaacgcattcccttgcctcctcttgtaactctgccccattgccaaactcaaatcgtcaccaatgtgtcaatgtcttcatcttctcccgaggatgaggactgtgtcgtggctgtcaagttcttaggacctcagctcagcttttgcagaccagctcaacgtaaacccgagtggatcaacgtcagaatcgcaaacccctgtttctactcctctcgtgtcatgtattcggagaaagatgacatgtttcgcattcccggatctggaggccatctcattggatcatgggatctcggtacacacatgcacacacccaagattcagaagctgcgatttaaaaagtttcccaatcttgcaaagaccacacggaagcttctggattcttgctgtacaagcgagcacttggtggaatcacgatccactggtggtgaaatgttcttggttaagtggtacaagagaaccgctgagatcgtcaatggtgttgcgaaaatgggaaccgaagcttaatggtgttcaagcttgacgaacaaggaaacgcggtttacacc

SEQ ID NO: 162303 - DNA, 1063 bp, Arabidopsis thaliana landsberg
gttcttagttgaattccttaatactcattgtgtgttgcttatctcgtccgcaggttttcgagtctaaaagcatggcttctaagaggatttcaagggaactgagggatatgcagagacatcctccagcaaactgtagcgcaggtaatctcccttttcttggctgattttgactgatagattcacactaaaaacacttttagggtttgatatatgtcacacttttatttcatcaatccacattatatgtttctgagtttttttttggtaacgctatgatttgttagactctctttggttctgttatatatatgtactctgcatgaacctttttttttttttttttgtattcgagaaaactcgttaaacctttgcctggtacgattaagaatatccagaggtttagcttgcttttatttcaagtgtctccttttgtacttcttatttattctgccaatttgtctctgttctataaaaagtatcacttgatcatgcaggttttattgtctttttcgatgaataaatgggtctgatagcaacgtctttcttataggtcctgtggctgaggaggacatattccattggcaagcaactatcatgggaccgcatgacagtccgtattccggaggcgtatttacggtttctattgatttctcttcggattatcctttcaagccaccaaaagtgttgtgttttttcaacactaatttaatcatctgatgtgtaatgaaaatctatgatcatcaggcttattagcgagtgtacgattttgcaggtgaatttcaagactaaggtgtaccaccccaaacatcgacagcaaaggaagcatttgccttgacatattgaaagagcaatggagtcctgctcttaccacatccaaggtttgagttttgtctctctactactattttttaccaaagtcatgttctataaaaaaaaacctagtatattggtgaactttgtgcgagtgatattgatggtgtggaattatataggttttgttgtcgatttgctcgctgctgactgacccgaacccaaatgatcctcttgggccgaagaaacgtag

SEQ ID NO: 162304 - DNA, 956 bp, Arabidopsis thaliana landsberg
gtatgaaccactttgtccttcttgtcagaatttcatcgtccatcatctaggcaaaatctttaacactgatctccacacaattaccgatctcaagctcattccattcggtaacgcccatgtctccgatgatcttaccgtcacttgccaggttcttttcatttctccctatttttagttggtcctatatatatatatatatatttatctcataatcttattctaaatgattatgtttgataaatttgtgaattaagcatggtgaagaagaatgcaaattaaacgcccttgaagcttgcgccataagaacttggcctaatcaggtacataacataacttaatgatcaatgtattccttactctctatctttgtgacaaaatgagtatgaaacatgtgatggtttttggaaggcagagattgcactacaagttcattcggtgcgttgaaactaacacgaatgcttgggaatcttgtgttaagaagtatggaggtgaaaaagcgataaatgattgttacaatggtgatctctctaaagaggtaggtgtacacataaataaaacactcataatcatcatatacatttacaatttttctatatgaatgtctaactgtttgttgtttttattgcacagctgatacttgggtatgcaaaccagacattgagtttgaaaccggagcataaatacgtaccatggatgacactcaacggcgaaccactctacgaagtatacataacagtctttatatattaatctgactgaattgtgtttctaatttggtgaaaaatcacttactgattgtgttttatttttggcagaatattggtgattttgtggacttagtctgcaaagcgtataaaggaaaggctgctctccctaaactctgttattcctctgtcttgtctcagaggacaatgatgcttgaattttcctatgttgatgaagctatcaatcactaa

SEQ ID NO: 162305 - DNA, 1724 bp, Arabidopsis thaliana landsberg
atggcaaaaaaaaaggaaggaattcgagcagtaaactcgatgtgctcgatatccaaactgacggatgaagacctactgtctcggctgcttgaccgtccaagactcaaacttgaacggaaaatatcatacgaggaaatgtctttaagcctttacgacagtgcacattcactagacggtaagtctggttgggatactccggttttctccatgaaagactcaatggatcgtaacccgatggtcacagaagcttgggaggctctctgccagtctcaggtctacttccggggaaaaccggtaggaaccatcgccgcctacgaccatgcttcagaagaggtcttgaactatgatcaggtatggttgtgttttgtttctttctagtttgtttttgctgttttggttttggtgaatttgatgaactcttaagacataaaagagaagaacaaaattagagtgaatcgcacgtcaactagaacatttaagcaaattacaaactatgattgttctgcctcattacaatttttcttgtctattgtaacttttaaggtgttcgtacgtgattttgtaccgagtgctctagcatttctgatgaatggagagcctgaaattgtgaagaactttctcctgaagacacttcatattcagggacaagacaaaatgatcgacaagttcaagcttggtgacggcgcaatgccagcaagctttaaagttctacataatcctatcaagaagacggatacgattatcgctgactttggagaaagcgccatcgggagagtggctccagtcgactctggcttctggtggatcattctcctccgagcttacactaagtctacaggagatcattctctagcagagagaccagagtgccaaaagggaatgagactcatactttctttgtgtctctcagagggttttgatacttttccgactttgctttgcgcagatggttgctcgatggtcgatcgtagaatggtaagcttgctctcatcctcttgactataaaattccataaatcaagaaaccaatacttttttttggcatcgaacttttgacttttgaatatgaccgtctcaaagaacatataggcctcaattcatatacatatatatcctaagtgaaaatgaacctcttgaacgttctctttttgaaatgtactgtgcagggcatttacggctatccgattgagatccaagccctctttttcatggctcttcgatccgcactctcaatgctgaaacatgattctgagggtaaagagttcatggaaaagatagtgaagcggctgcacgcattaagcttccatatgagaagctacttttggctcgatttccagcagctcaatgacatttaccgttacaagacggaggagtactctcacaccgcggtaaacaagttcaacgtaatccctgactccatccctgattggatctttgacttcatgcctctccgaggtggctacttcgttggaaatgtcagtcccgcccgcatggacttcaggtggtttgcgttaggaaattgtatcgcaattctttcctcattggccacaccagagcagtccatggcgatcatggacctgattgaggcccggtgggaagaacttgtgggagagatgccgttgaagatatgttatccggcgatggagagtcacgagtgggggattgtcactggctgtgaccctaagaacacaaggtggagctaccacaacggaggctcttggccag

SEQ ID NO: 162306 - DNA, 3191 bp, Arabidopsis thaliana landsberg
  unsure (1)..(3191): unsure at all n locations
gggagaggagaagtacgttttatctttaaagattgtgtgcatagaagcattgttcgccagaaagatatcttcatcctcaatctcatatttgacatttttctggaaacaaaatatctattcattaaaagtttgcaatagactattcatatgtcataatatattacaataaaaacattatcccagaaaacaaaagcatctgcaatgtttgtcatacatagcatgatcatacatatagctataatatattacattgatttctcgttgtcatgatcaatagagaaaatctgccatatcaagatgattatcatcatcttggcatttaaaagaaggtcccggctcatcacagaagagattagtttcaacatccctttctttcgccttttacgaagattggtacatatcggctaaattttttggtatacgacacgtctagtactagtgtcctttcatgctgcatctccgacaagtgctttcaacatgccttttcttaacatggccagatctgtcaacgacttcgaaggattcggaaagtgaggacggcgtggaccatgggcttccagagagagtccttgcaagaggtttttttcccaaggacgcaaggctgaacatttattcttcacctgagctcttagaagaaattgctgagttccttggcggttcatcagattttgagcgtctgttaaaatctcaatttgggaaattgttcaagtatccggtttgccaaacagctcactccgccaaactgatccatggtttgttgtctagacagctagtgacgaagaagagacacgaattctggttcgtttttggaggtaagcctcttagattttctttgagagaattccacattacaactgggttggaatgtcgacctattccaagaaaagaggaaatcttatcccatcagaaaaatgatacgaagcctgtttggaactctttgtttggttctaaagaagatgtcacggttaccgatgttctggatatgctaaggaaagatgtcaagatgccggatcatcagaagatgtcttgctggaagcgcttttgtctagttctgattttgctagtggatggtgtgatagtctgtagtaacaagtacctcaacataaccccagaatatgttaagatgcttgatgatgttaggttcttcttatcatacccgtgggggagagtagccttcaagacaacgatggagaggtttggacctcctacacttagcgacactgatcccatcacagagcttaaagcccgtataagacaacgaagtagttgttgttatggatttccattggcactccaaatgctggcgtttgaggcaatcccacttattgtctctaagctaccggatccagatgacaagcgtgattatactcagatgacatatgacgatctgggcacaaaaactgatcctacatcaaaaagacatcatccaggttgaatccgatgaacatgtacaatagtcttaaacatatggtgtacaactttgttagtgaaaactttaatgttgtacaccaatttattacaattttgtacattgttttaagacctgtatttttcagttgaaggttgcttacacgcttgagggtgatgagggcgtggaatgcatggattttgggtgggatgacgatgttgtagatgagaaggtggattatatggagaaactgctaattgaaggacatgagtttactgagtcagaatggccaggtggagacacatagactagtggactgatgcctcttaccccatggtgtgttaagaaagcgcctacaaggcgaggtggagtaaaaaaagaaccaactaggagagggggagtcaagaaagagccagctaggcgaggaggacatgcggagaagaaccaagaagatgttgctgtaattaaagatgacggagacactatagagatgttgaagaaattcattgtagagcaacacaaagaaacatcaagcacgttgaagagagagatagttcagttattcgagggtctgatcaaatgtgactgtggtggactgcgatctacaaaagatagcacaatggaaaagtagcaggaagacggggaagacaaccccacaatggaaccgaatgaagatggaaaagctaacaccacaatggagcagaatcaggaagacgacaagtctaatgatgaggtcattagtttagagacgggtacaacgtcgaggggcaagaagaagaggaaaaggactgaagaggaaggagaggactttgctctctatgagagaaacagatgggacgaggcttacaaaggtgtggaagacatcattgagagagttgataatgttgatctgccacctaaccaagatactgcaaaagacaattatttccaggtaaaaaactgtattttttggtttgtggtgtagagttattgtttggtgtactatattacttattttagtaattggtgtacaaacctcttgaatacttagtatgaacaccatacatgatagtatctcacatggtgcaattggtaaacaacatgtgtaggtaataatggctatgctgtggcgcagaaggcatggtttgtacaacacggtaagagctgttttcgttgatacatggtttctgacccttctaaatgagaagtacacagatttcaaagcctgcaagaataagagtaagttcaattggggagtgaacatcagagcgtttgttgtagacagggcaaaaggacgggcaccaacaactnttctgcaacatgctcacctggtgtacatccctatgaaatggtacacctgacattgggtaggtctggtaattaacttgaggttgcatacagttcaggtctttgaccctttaattgaagcaacatcgtttgttttagtacaaggtttgatggcgcctgtgttaggtttgattccatggttggttaaagaggctgtaggtaggaagtatacaaagaacttctcaacaaacccactaacattggagagggttataagagtataccagaaccagagaggaggtgatagtggaccccttgcaacaaaataccttgagatgcactcgtttgggcttgacatagatgatatgggtgagattacggaggaggtggtcaatgagttaaggaaaggatacgcactggatgcatacgctgagttcattaagagtgttgaagctacaaaagcttgactggatttgcagatgaatctaaagttcttttgtttaccttctttaaaaac

SEQ ID NO: 162307 - DNA, 529 bp, Arabidopsis thaliana landsberg
atcttaagaaatgattcaaatatatgatcctataatgtcttctcttcttgctcatgtggttagattattttgtttgaacctgtgatcttttctaacatataaaacaatgtttttgtttatgccagtcggtgtcaacgagcattgaaggaggaacaaaatggttggtcaacaaaatcaaaggtttgcttttttttattcttcttcttgactgcatctttcaattttttgtttttttgaaattccccatttgtcatcatgttgacagggaaaatgcagaagccgttgcctgagttactaaaagaatatgatttgccgattggaatcttcccgggagatgctaccaactacgagttcgatgaagagacaaagaaactaaccgttttgatcccatcgatatgcgaagttggatacaaggattcatcagtgttgaagttcacaacaccagtaacaggacatcttgagaaaggaaagctaacagatgtggaaggaatcaagacaaaagtaatgatatgggtaaaagtggcaagca

SEQ ID NO: 162308 - DNA, 2617 bp, Arabidopsis thaliana landsberg
tcggacaaaggggaaatcatgcaggctatgctaggatcataaagaaatcagctgggtcagctcgcccaaagctcaagctcagctggaaggagtgacggttactcaggtcgagtgacagtccagctcgggcagctggacgagtgacggttcagctcgaggtagctggacgagtgacggactagctcaaggtagctggacgagtgacggactaactgggcggttatgggcgaagagatacaactcttcggaaaggtgcaactcttcggaagggcgcaactcttcggaaaggtgcaactcttcggaaaggtgcaaggaatgtgttgatttgggaagcatccattcgccccctatataaggaagggcgcccaggaccattccactcaccacaacacaccgaaaacacaagaaactcaccattaaaactctctccctcttgggagaataaatagtcttaggattcggtcgccgggctgtggccggcaataaagaaggagggtcggatcgacctaacctcgagaaggaaggtaagggatcctagactttgagtctaagggttctaggatgtgagttagtagtcggatccttgaaaggatcgactagagggctgggtagtatccgggtcatgtgcatcctacacaagactcggtccgggtagggatcggctgaggcggggacgcggctcggcggaggaccggcgggtcttaactgacctgccgagaatcggccggactgatgcgcgatcttcccctctctgaattctctccacggatccgagtagtgtatggcatatagagcattgcatggacttgcatatgattaagtaaatgagattacttatggctctatgactttcagaaacaaatggtgatcgtgggaaggacttggcttaggcgcgagagactcaaggccgggatgatgggtggtgatagttcggatagtctagggatcgattatatgacttgtaatagcttatatgcaaactcataggttgtatcgaatcctttgcttaatcaataaagccctgattcttgtttattctactcttttgtgcatatgactctagtaatgaatctcagaatatgatagaaaagtaatgtgaaaggaatggaccctaaaatcggattaaggctcggaccacttaagtgatcccttcatgggaaacctcaccggattagaaatccgggaatgggaccgtacaagttggtatcagagtgattacggtcctaagatctttagtatgggttggggttcaccactcgccggcttaatgagatctcgcggtagacgttttcttataccctaacgattacttttaagtttatgtggctaatttttgagttttcgcagatgggtaagagggaaaaggctgggaggagtaagaaagacaagggtgttgtcaaagagacattggtttccgacgagacacaagtcattgaggaaacaagggtcgagacaacaaaggatggaactaatccggcaggaactgtggctgggcaggactctccggttcatcaagatccagagaatagcgatgcatcggatgggaaggagaatccggatgcaataccatcgtcccaagagcagtgggacatgatgaaagcgatgatggcacaaatggccacattggctaaatctcttgtgtcggatcctgtgccacaagcgattgaaaatccgagggatggtgattcgggagttgtggaagtcattccaccatctcattcttcgaggaagaagggagactacttgaacttactcgagcatgtctcaaagttgggaacaaggcatttttatggaagttctgattcgatcgttgtcgatgaatggaggagtcgactcaacaggaactttaactcatctcgttgtccggaggattaccggaaatacactgcgatccacttcctggaaggagaagcgcataattggtggctaaccgtagaaaaacggaaaggtgatcagatccaaacttcatcggactttgaggaggaattcaacaagaagttctttccaccggaagcatggacagacttgagtgtgcctacttggacttggtacaaggtaaccaaacggtgcatgaatatgacgaagaattgaatcgtcttaggcggtttgtgggaagggaactcgaggatgagcaatcccaagtgcgtcgtttcattcgagggttaagggtagaaatatgaaaccattgtttgattcgcacctttaattaagactctgagttagtggaaagggcggccatgattaaaatagggatcgaggaggagaaactcatgaatcaggaaaagattccgaactgctcaaaccaatccgattctaagcgcgaggaatgtccgacttggggaaagaatcatagcggaacttgatggaaggccataggtgcatgtggccgatgtggaagcaaggaccatgcgatccaaagttgccaaggatggatcacgggcaatcaaaggctcccggcgatgaaccaatgacttgttatcattgcgggcaaacatggcactttaaaagagagtgtcaaagttggacgccgagaaacaatctcggcaaggtgggaacgcggaggtaatggactaccgttgtaatcccctgatcaggactaggactaggccaaggaatt

SEQ ID NO: 162309 - DNA, 1829 bp, Arabidopsis thaliana landsberg
aggctaagtttctctttttaaaataagggaactcgagccggagccggagctcatatcactcctccaccttttttactacctcgtcaaatctaaggatccagagtgggagaagcttatttccttatgcccacaagtacaagtaagctttcacgacggaaaatttcaggtgactggaaatgtccagcggtgcagcaataaaaagcgggactgccaatttgaacgctacaagttttcaggagaagactacacccattttcgctgctcggcttgcaatggcgacgaccatgatgaagaatatgacaaggctccacttgagatcattcaccctcttcatccaaaacattctctccagcttgtcttgattgaagcttcttatagaacgagggaatgttattgctgtgatgaagatctcgaacagatgttttattactgtccggcttgtgattatgctatcaatatagcttgtgtggagaaaccacgacgcttatctgtagaccatcccaagtggcatgagcatactctttctctgtttccaagaaagactcccttgacttgcagcgtttgtgcattgacacatacaagatgtcctttctatatatgtcccccttgtgactttgtggcccatcaaagctgtttcagcttaccacgtgtcattcgcatatctcgtcatcaccatcgtatctctttcactcattcttttgagaaaggagattggttttgcggtgtctgccgtaaaaagatcgacaatgattatggaggttattcttgcatcaaggacggttgtttatatggggcacattcaagatgtgccacacgaagaagtgtgtgggatggtaaagaactcgagggagagccagaagaaaatgaagaagaacttaagccgtttgtcaggataagcgacggaatcatacaacatttcagtcataagcatcatcatttgagacttgatgagagcactgacagagattacgatgagaatatggagtgtcaagcatgcgtcagaccaatctatttcggtaacttctactcttgtatgcaatgtgatttcattcttcatgaagcatgtgcgaatcttcctcgtagacaccatcatccaatacatgcacatttgctaactctagtaacagagtattacaatgttatggtccatcgtagccaagtttgttcagcttgtccttcgttgttgagggcttgtttcttctataagtgcgatgaacaagactgtgatttccagctacacgttcagtgcgccgcagtttctgagccattagtccatgaaagtcatatgcatcctttattcctgacatccgaaccaggagagtggaaagattgtagtgtctgcaaagagtcaaattattctttgacaaatgaaaaatttaattgcattgaggagtgtgactttgctttgtgttttggatgtgccacattacctcaaaaggtgaggtataagtatgataagcatatgctcactctttcttatgggaaggagacaagtaccatgacctattggtgtgaagcttgcgagggagaaatagatccaaagaaaaggttttatatgtgtgatgagtattgttgtgtcaccctacacattaactgtatgcttggggcggacaaatacatggatcccggttcatggtggttatacaaaggtaagttcggtacatcgtcgtatttgaaaggtaaaatgctatataatctgccgaataaccatcatatgtctcgacctagttgctccctttgtaagaggcgttgtccatacaaaatagttttcaagtgctctggatcaatatattgttccactgtttgtatagatagtagtattaatggat

SEQ ID NO: 162310 - DNA, 760 bp, Arabidopsis thaliana landsberg
tggttgattttcactgaaccagtccagaaagttttagaaagaataagtctccatatatgtagtccatgaaaggaggaaacatttgatttaagaaatcagtgtctctggagttccatagtttgtacattagtaagagttttaagagtcctcggaattgttgttagtcagattgatttcatagtgagatccttgtcatatctctcaagtcaaggctgtgtgttcctactctatcctgattgtttctcacatgtttcttaaattgcagcagacaccaattgttcttatcccagccataaaaggcagtcgagagaagtatggcttgtcactgaggaagctcagtgtgtcatggggggctgatgtgtatgatcctcctccctccattgtctctcacacaagaagcaagaaacagcaaccgcagaaatcaaagagcaaagacaacctgaagaagaatggaaagaaaggacaaaagggaagcagcaattcccgcagcagcaaagacaagaagcagatttcttcacgcagcagcaaatacagtcgtgataagtttgattggacaacacaaatgtctgttctagctgcatcttcttgaatctgtgtggtatgaccaaggcttttgcgtcttccttgctcttgtctctctctctctctttcttgtttataaataaaagatttgaagtgaaaacttttccccagtttcagccccactattgttgttggtacaaaattgattttgtaattactcaatttaccacttttatcc

SEQ ID NO: 162311 - DNA, 1898 bp, Arabidopsis thaliana landsberg
ggtttctataccttgtatgaggggttcttttatggttgcttcttgtggctgccaatcccgaggctggttctggagtatgtgacatcatatcagattgtcctttcccatatcacgatgtgatccttgagacatttgctggggattttgattcggagttatgaatccgaaactgaaattacgctcgctcatctcgagatcaggcgggttccaaaattcgaagtggatcggtattatatatctcctgctaagggtaagaagattattgacgggttcccgagcaaggacgattcgtataccgaacacttcttctacgtggctctcggagacgttgttcacgatgatcttctcggacggttctgacgagatggggaactttgggtggttgtagttagcgatatgtttacgtctgacgcgatttatatattttgtttctttttctaactagttttcctttgttggagaacgcactctcaagtttctcgagccgattcctgacgatttcctctcggcttatcacgcgttatcagctcggaagtgtgattggtcgaaacatttctctcgggatcgagtcgaacgagccctccgtcttattcacggcgtttcctgtcctaccagttaagaatctttggaccaccgaactcaattcttcgtcgatatgcagtcaactaagctcactttgagggaggtgtacgcgaagaaaaaagaagataaagagagacgcttggcggaagagaaacgcctcgcgaatgcaggattgattttgccgcgggtagcctctcccgatgcgactcaagaccggaatgttgctcccgaagttgcggccccggttgacccgacgccttctgaagctcaagaggtcgatcctactgctgttgcgcctttgcccgaggcagttgttgtgctgcctgcgagcgacaaggccgcgggtaaacgtgttcggacggatgattcatcgtccaagaagaaaagcaagaagaagaaagcctcgagtgccgaggcgggaaaagaactcccaatctttgaggaccgggtagcctctgcaaacctcctcagggggtgcgtcggtcctttgcttcctcctccggatactcttctagagtcgcggaagtatgctgaaacggcttcccacttcctgcgggtaagtgcctattcaactttttcattcatcgcgtctggatctccgatctgtaattttctttatgttttctaggttgttgcttcgatgaatcgaatggtgcactcgtacgatttggccgtgaggaacaacatggaggcggccaacaggtaggccgaagcggatgctcggatccaagctgccgagcgagaaagagatgaggcgctctcccaagctgctgcagcgaaagtagcaaaggaggaagccgaatgccattaagatggccgagctgaacctaagggcggactccgaggttgttcgcctcaaacgcatgctggccgaggcgagggggcttcgtgatagcgaagtggctcgggcttctcaaacggcaaagcgtgagacctccgaggttttcatcgccagacttaaggccgccgagcagaaggtgtcgcttctcgatgggatcaacgatcagtttatatacttatccaaggcgcgggctaatgcgcaactgatcaaggcacttgaggaaggtggagagttggcgaccgagaaagaccaggttgaggaatggctgaaagacttcgccaatgccgaggtcgatttcaccaattttatcgccgagctgaaagaggaactcaaggctcctactctcgaccccactcctttaagtccgggtggccacaggtcggtcgagactcttgccgacgaggcgggggttaccgaccagtctgggtcacttctgcctgccgaggatattcacccgtctgaagagctcgactaa

SEQ ID NO: 162312 - DNA, 2738 bp, Arabidopsis thaliana landsberg
ttttcttttcccctttcatgggttttttgtgtacctgatcagtgtataatcaagtagatgatttttaactccggttgtagcaagaagatgaaaccaaggctaagagagcacttgttaccctttgtgagcttcacaagaaaaaagtctggtttggtgataaacatgacagagtagcaattgccatttgtgaagcctgctttcatacttcacctaggtatatcttcctaactgtgcaagatttcgatatgatttggttggtcgaattactaacttctctttttttttacatgttcaggatcaggatatcttcccttcggtttcttcttgactacgacaacattaacgatgaggatgatagtgatctcaggttgtgtttaacatagaggctgtttacaaggtaaacaacatatttatacatgaattttgttagagactatgacgaagacgcttactactggttgtgaatagaattttccaccttcatatagttgtcactatcatttttatcattatgaattaagtataatactaggtcctgtttccgatgtttaggccaacaacaaaggtacatcttctagcaagaagaaaaagcaagcaaaactgcaacgcgccatgcgaagtattaaacgaaagcagcgtgcgtcgtctgagaacactacttcaacttattcacctcttaatcatctaaatgatgcacaggttcatttcctagcttttttgtagtggtcatttcctagctttttctatgtggctatgtacttgaatgtttttcttcttttacagaattttgcagagaggttgcttccccttattaggcctaagcctgacgagagcactggggaaactaatgacaagagcagtggggaaactgatgacaagagcactggggaaacttatgaacggcgcgaggtaattgtattttaactcgcttcatccattctatagaaacatatgagctaactaaccatgtattcaataaattttgcagaccaggttgatgattataaaagttattgcacgaacaattggtcttcacaagttgcttttattcaaattttatacttatcttcaagcctatgctaaggtaagatttgctaactgccctttttacaatttctttgctgaaaatttattgaaacagggatgctcttaaatgcaggatggtgtaaaggacattacacaaatacttgcagcagcagttcaggcttgccatgatggggtatacaaacatcttacactttaaagcatcatcccttttctcatcctgcaatccttccaatcatttttatatcgagcaggtaccttcggatgccgtggagccactgttcaagcaaatagtgaataagtttttacacgatcgctcaagtccggaggtgtgatttcaaacacctagggagggacttaactagaaagcttattctatcatttatatttttcctttttaattcattgttttcatatatgtaaccaggctattcctgtcgcactcaatgtggtacgagaaatgtgccttaggattcccgaggtaactagttcttaactctggtttaacattctcatataaatgtagttttacagcaccaatcctttttttttttttttttttctgagttgtctttttgcttcttctatatttttttttgtctgctatacttcagttgatgacagaagacttgctgcatgatcttgctcagtataaaacggataaaaagtaccgtacccatagaaaagccatctcagcagcatctgcttccctcatagcattgttcagagaggtagcagaagtatttgatttgttaattggaacaaaataatcagtgtatgtggttaaccagtaattacattattgtaatttcagatcaaccctttgctactagtgaaaaaagaccgtggccgtcctggaggtcccattgccagacctaaaaagtatggagaagtcaatgtcttcagcaatgttcccaatgttgatttattgcaagaaagtgatgatgatgaagtggcgttgcctgggagtgatgatatcgaacaggagctgataactgaggacgaggctgaagaagattctaatgatggtgatgatatgaataacactgaagatgatactttggttagtggagatgaagaggaagagaagaatgacagtgatgaagccgagactgattgggaaaacgaagaagatgaaggagaagcttctgtggagggtagtggaaacagagagaaagcaaaggggaagaaaaggaagttagtagattttgatgcgagtctcctcgctgctgatacaagcctacgagcactaaagagatgcgcagaggcagagagggaacagacatcttttgcagaaagagatggcatactttccaatgaggacttccgaaaaataaagaagttaaggtatacatacatatatgcgaaagagagaagctcttttcctctgtttggtaaagaagtccaactttgttgatgatgtcttgtgtcacatgcagggaaagaaggatgcgaaacttgcattggctcgaaaaggattgaaagttccggattctgataagctaagtaagaagctggtcaatccagccaaacttgaagtaagctgttactagtatgagaagctccatttgagtggcaaaatgttttggcgatgttaactgaattatcttactctttccacaggctcacataaggcagaaactaataaaagaagaaaggctggagttagttaaagcgggtagggaggaccgagg

SEQ ID NO: 162313 - DNA, 1271 bp, Arabidopsis thaliana landsberg
actctccctgaaggccaattttccggagtggttcaaggagatgggtaaagatcaacttgttgcggattcgaggacgaatccaattcaagggggggagacttgtaacgcccgcgatcctcaataggatcgttggctaggacttggtccgagagaagaaggtggagtctcggacaagtgagaaggagctggccataagctcggacaaaggggaaatcatgcaggctaagctaggatcgtaaagaaatcacttgggtcagctcgcccaaagctcaagctcagctggaaggagtgacggttactcaggtcgagtgacagtccagctcgggcagctggacgagtgacggttgagctcgaggtagctggacgagtgacggacgagctcgaggtagctggacgagtgacggacgagctcgaggtaactggacgtgtgacggactagctgggcggttatgggcgaagagatacaactcttcggaaaggtgcaactcttcggaagggcgcaactcttcggaaaggtgcaactcttcggaaaggtgcaaggaacggatgtgttgattcgggaagcatccattcgccccctatataaggaagggcgcccaggaccattccacacaccacaacacaacgaaaacacaagaaactcaccattaaaactctctccctcttgggagaataaatagtcttaggattcggtcgccgggctgtggccggcaataaagaaggagggtcggatcgacctaacctcgagaaggaaggtaagggatcctagactttgagtctaagggttctaggatgtgagttagtagtcggatccttgaaaggatcgactagagggctgggtagtatccgggtcatgtgcatcctacacaagactcggtccgggtagggatcggttgaggcggggacgcggctcggtggaggaccggcgggtcttaactgacctgccaagaatcggccggactgatgcgcgatcttcccctctctgaattctctccacggatcggagtagtgtatggcatatagagcattgtatggacttgcatacatatgattaagtaaataagattacttatggctctatgactttcaggaacgaatggtgatcgtgggaaggacttggcttaggcgcgagagactcaaggccgggatgatgggtggtgatagttcagatagtctagggatcgattatatgacttgtaatagcttatatgcaaactcataggttgtatcgaatcctttgcttaattaataaagtgtccgattgtttgttt

SEQ ID NO: 162314 - DNA, 1359 bp, Arabidopsis thaliana landsberg
  unsure (1)..(1359): unsure at all n locations
cttgttataacaatgccagcttcaatgagtatagagagaagaatcattctcttagcttttggagctgagttgattcttactgatccggctaaaggtatgaaaggtgctgttgcaaaggcggtggagattttggcgaaaacacctaatggttatatgctacaacagtttgagaatcctgctaatccaaaggtaattactatttagtttaagtgccttagtgtatttgaagtcagatacttataacatagtattgtgttcattgcagatccattatgagactactggacctgagatatcgaaaggttctggtggaaaagtggatggctttgtttctggtattggtactggtggtacctgaacaggtgctgggaagtatctcaaggaacagaacacaaacataaaggtgaatttcatttacttatacaatcagactctttcttagtaaactcanaacttgtctcatttgttttctcatcttatagctgtatggngtcgagcctgttgaaagccctattctgtccggtggaaaagccagtttgttctcaataaggaactctttggcacacttttcttcttttactttgctcacatgttagtcttgagtgttcattatgaggtccttctaacttttggtgttcatatcaagattcattgaatttcagcttaacacattggtaaaaatgctcaggtccccacaaaattcaaggtataggtgctggttttattccaggcattttggatgttgatcttatagatgaagttgttcaggtaaggtttcataccaatatcatcttgctgactccaaaacacaccttacatttcttagttgcctcttatagttttgtaacgcttacgcaggtttcaagtgaagaatccattgacatggcaaggcttcttgctagggaagagggtctgttagtaagtgcttcacattttgcctcatcagatttttctgttaagccaaaaatgtcttgattcagctttatcctcaccattatgattcaaacctcaccatgaaaataaaaacaggtccttgatcgttatcacatttgtctcctcctatgtactgtaggtgggaatctcatctggagcagcagctactgcagcaatcaaacttgcaaagaggccagaaaatgctgggaagcttatagtggtacgttttttccaaagctaaagaacaaacagtgaactcatggaagcttaagagtcgatcttataataagagatgtgaaactgaatgtttcaggcagtgtttccgagtttcggggaaagatatctatcgactgtactgtttgatgcagcaaggaaagaggcagagactatgacctttgagccctgaatctgttcccctttcttctt

SEQ ID NO: 162315 - DNA, 2874 bp, Arabidopsis thaliana landsberg; identical to SEQ ID NO: 37154

SEQ ID NO: 162316 - DNA, 741 bp, Arabidopsis thaliana landsberg
ggactagtgcgtctccagacgatctaaacctggttgcatctgatacagatccgaaacgcattcccctgtctcctgttgtgactctgcctcattgccaaaccaaagttgtcaccaacgtcgccatgtcttcttcttctcctgaggatgaagactgtgttgtcgctctcaagttcttaggacctcatctcatcttatgtagaccagctcacagaaactgagtggaccaacatgagaatcgaaaacccatgtttctactcatcccctgttatgttttgcaagacagacggcacgcttcgaattcttggatctggaggtcacctcattggatcatgggatctgcacaaacacaagaacaaacccaagattgagaggttgcgattcaaaaaccttgccgagctcaccaagaccaaaagggagctcttgcattcgtgttgcacgagcgaacacttggtggagtcaagaaccacaaatgaaactttcttggttaagtggtacaggaaggccgtctggagaggtatgtcgaaattgagcacaaaagctttaatggtgtttaggctagacgacgaaggaaatgctgtttacactaaagacattggagatctatgcattttcctctcaaaatctgaacctttttgtgtctctcttagctccttaccacgcatgtttttccctaacaatgttgaatacatggatgcggacgaagacggatattatgatctggaagattcttcaatcgttggt

SEQ ID NO: 162317 - DNA, 2684 bp, Arabidopsis thaliana landsberg
cttgtactaaagcaagatgaaacggttagggttgggagccgcagatcagtcagacctgcttagtaggatccggctggctcaggaacgggacaaggagataaaaagatgggcactaaacaacaagaccgagtaccaaacctcgaacaatggtacaatcgtggtgaacgatcgagtatgtgtgccgaacaaaagggcattaaaggaggagatcctaagagaggcacatcaatcgaagttctcaatccatcctgggttcaaccagatgtactgcgaccttaaaaggtactaccattgggtaggaatgaagaaagacgtggccagatgggtggccaagtgcccgacttgtcaactggtcaaggcggagcatcaagtaccaggtgggttgttacaaaacctacctataccggaatggaagtgggaccacataacgatggacttcgtcactggactgtcaacggggatcaagtccaaacacaatgcggtatgggtttgtggtagaccgattgactaagtctgcgcacttcatggcgatctcggataaggatggagcagaaatcattgccgagaagtatatagacaagatcgtgcggttacatgggattccggttagtatagtgtcggaccgagacacaagattcacgtcaaagttttggaaggcttttcaaaaggccttaggaactcgagtgaacctaagtactgcctatcacccacagtcggacggacagtccgaacgaacgattcaaaccctcgaggacatgagggcatgcttcttgaattggggaggaaactgggagaaatatctaaggttagtagagtttgcatacaataacagttttcaagctagtataggtatgtctccctatgaggcgttgtttggcagagcttgtagaacaccgttgtgttggacgccaatgggcgaacatcggttgttcggacctacaatcgtggaagaaaccacggagagaatgaagttcttaaaaatcaagttaatggaagccacagatcgacagaaaagctacgccaacaagcgtcgaaaggaattggcattccaagtaggagatttggtgtacttaaaggcgatgacctacaaaggggcgattcacctcaaggaaaaagttaagcccaaggtatgttggctcgtacaaggtgatccaacgagtaggggcggtggcatacaaacttgaccttcctccaaaactaaacgcgtttcacaacgtctttcatgtatcacaactacggaagtgtttaagtgatcaggaagatgtacctctcgggtaaaggagaacatgacggtggaagcatggccggtacggatcattgaccgaatgaagaaagggactcagggaaaatcaagggatttgttaaaatcttgtggaattatggaggccgtgaaaaatacacttgggaaaccaagaataagatgaaggccaattttctggagtggttcaaggagatgggtaaagatcaacttgatgcggattcggggacaaatccaattcaagggggggagacttgtaacgcccgcgatcctcaataggatcgttgtctaggacttggtcaaagagaagaaggtggagtctcggacaagtgagaaggagctgaccataagctcggacaaaggggaaatcatgcaggctaagctaggatcgtaaagaaatcacttgggtcagctcgcccaaagctcaagctcagctggaaggagtgacggttactcaggtcgagtgacagtccagctcgggcaactggacgagtgacggttgagctcgaggtagctggacgagtgacggttgagctcgaggtagctggtcgagtgacggactagctgggcggttatgggcgaacggttgcttgcccaactgggtggataagggcgaagagatacaaatcttcggaaaggtgcaactcttcggaagggcgcaactcttcggaaaggtgcaactcttcggaaaggtgcaaggaacggatgtgttgattcgggaagcatccattcgccccctataaggaagggcgcccaggaccattccactcaccacaacacaccgaaaacacaagaaaactcaccattaaaactctctccctcttgggagaataaatagtcttaggattcggtagccgggctgtggccggcaataaagaaggagggtcggattgacctaacctcgagaaggaaggtaagggatcctagactttgagtctaagggttctaggatgtgagttagtagtcggatccttgaacggatcgactagagggctgggtagtatccgggtcatgtagcatcctacacaagactcggtccgggtagggatcggctgaagtggggacgcggctcggcggaggaccggtgggtcttaactgacctgccgagaatcggccggactgatgcatgagcttcccctctctgaatcctctccatggatccgagtagtgtatggcatatagagcattgcatggacttgcatatgactaagtaaatgagattacttatggctctatgactttcaggaacgaatggtgatcgtgggaaggacttggcttaggcgcgagagactcaaggccgggatgatgggtggtgataattcggataatctagggatcgattatatgacttgtaatagcttatatgcaaactcataggttgtatcgaatcctttgcttaatcaataaagtatccgattgtttgttt

SEQ ID NO: 162318 - DNA, 1256 bp, Arabidopsis thaliana landsberg
atgagttttaactacagtagttcatcttcttcttcatcttcttcttcgtcttcttcatcttcttcttcttcatcttcttcttcttcatcttcttcttattttgtcgtgccattattgaggtgtttgcatgtcgttatcttcgatcacctgacgctaatgatgttgcacgcctactccacattggcgaatcccgaggatttccaggtatgttggatagtttagattgtatgcattggaaatggaaaaactgcccaacaacttggagaggacaatatgctagtcgtagtacatctcctactattattctagaggatgtagctcattattatgatctgtggatttgacatgcatattttgggttactaggatctagtaatgatattaatgtactagaggcatctcatctttttgctaatctagctgaaggtactgctccacccgctagttatgttatcaatggaaaaccctataatatgggttattacctagttgatggtatatatccaaaatggtccactcttgttcaaacaattcatgatccatgtggtcctaaaaagaaattatttgccataaaacaagaaactttagaaaagatgtggaacctgcattcgaagttttgcagtccaggtttgcaatcatggcgagaccatcacgcttatgaaataaaacagtattacgtggtataatgacatcttctatcataatgcataatatgatcatggaagatgagcgtgatattgatgcaccaattgaagaacgggttgaagttccaattgaagaagttgagatgacgggtgatgatgatgctcaatttcaaaacattttagctcgacatagacaaattaagatcgagaagctcatattgaattttgaaatgttaattgaacatttgttgtcgttagaattagtatgatgtaatttatttttagtatgtaaatttttggattataattttacattaattaataattttaaaatattaactaagaaaatgttcaatttaacaatataatagtgagaatagtatttttagtgtgatattttgtgttgtggttgaagaagaataaagctttagtgctaaatttacattacacatattgttatttcaacaccaaaatggtgttatagttggaaatgctcttatacatttcaccatcttctaggtgaagttttacaaatcttatcatttctcgtagaaaaaaaataaaaataaatgaataacactatttgacatttgtatatttcttttggaactc

SEQ ID NO: 162319 - DNA, 1195 bp, Arabidopsis thaliana landsberg
cctggagtgttcgtgcagatgtactcaacaatgtccactggctgagccttctctttcttgaccttaggcagcttgatggcactgatgtcccgtgtcaacagcttagcttcatcggagctaataccattgtcaacaagtcgcttggcatacctgttgagtggagaagaacatgtctcagatgcatctttagggagagaagtgaggatcttctccatatagtatctccaatcaactcctctaaaaaaggtaccaagaagttgtacctcactgaaaccatgatgttggtaatcccgttgatactccttgaaacgaacccaagcagccttgaaagcttcagctggaccttgtgtgaaggtagacagcttgtttcttaactcctcagacttagcatcatcgtagaaattgttcaagaaggctatcttgatgcttctccaagtcttgagggaacctgctttaagttattttagccaagaagcgccttccccgacaagtgaataaggtaagagcttgcacagtaggtagtcctctgagactccattagctttgatgctcagaacaaggtcctcaaaacgctcgatatggtccattggctgctaatgagataagccatggaaaggatgatggccaactaaagcaaagtagccaggcttcagctcatagtcgctcctctggaatggtggggtacaatcgctgatcgattagcataaaacaagtctggccttttgaaatccccaagtgtacgacgcggttccgcaactgcaggaatctggtgttggtgtcgatcgacacctctgttgtgtcgttcgacaccgattgcattcacgtgttgctcctgatagtgtcgagcgactcccagttggtgtcgctcgacaccgagtcatgctgcatctcgagcagctaattcgcatttgaggcgcgcctgatcctcattggcgtcctcaggtaggatgagtccatgatcatccaatctctgacccgcttcattgttggtttgcccatcctcatctctcaaaactccttctacatcagctctgatgactttgtcagccattgctaatctctgagtttttcagttggtgcattcaaattttcccaagtccagaacagacaagtcgatcagcttcttctattgtgtgctccttgtttacctaggcatacacctgagacacagaaaagaagaaaacaagaaacgcgt

SEQ ID NO: 162320 - DNA, 1475 bp, Arabidopsis thaliana landsberg; identical to SEQ ID NO: 4965

SEQ ID NO: 162321 - DNA, 1064 bp, Arabidopsis thaliana landsberg
tgtgttttattgttaagtcaatgaatcctcattttggttttatgttttcattttgttgtagtagacataaaggaaaccgaaaaaccggtggataaacttataggagggcttttaactgcggattttgatgaaggttcttgcttgagtaggtatcataaatatttcttgtaccgcaagccatccccgtacaagccttctgaatatctagtctctaagcttagaagctatgagatgcttcacaaacgttgcggtccagatacaaaatcttacaaagaagcaatagagaaacttagtcgtgatgatgcaagcgaatcaaatggtgaatgcagatacattgtatgggtggcaggttacgggcttggaaacagattacttactcttgcttctgttttcctctacgctctcttgaccgagagaatcattcttgtcgacaaccgcaaggatgttagtgatctcttatgcgagccatttccaggtacttcatggttgcttccgcttgactttccaatgctgaattatacttatgcttggggctacaataaggaatatcctcgttgttacggaacaatgtctgaaaaacattccatcaactcgacttcaatcccgccgcatctatacatgcataaccttcatgattcaagggatagtgataagctgtttgtctgccaaaaggatcaaagtttgattgacaaagtcccatggttgattgttcaagccaatgtttactttgttccatcgttatggtttaatccaactttccaaaccgaactagttaagctgttcccgcagaaagaaaccgtctttcaccacttggctcggtatctttttcaccctacaaatgaagtttgggatatggtcactgactactaccacgctcatttgtcgaaagccgacgagagactcgggattcaaataagggttttcggcaaacctgatggacgtttcaaacatgtcattgaccaggtcatatcatgtacacaaagagagaaactgttacctgaatttgctacaccagaggaatcaaaagtcaatatatcaaaaaacccgaaactcaaatctgttct

SEQ ID NO: 162322 - DNA, 2353 bp, Arabidopsis thaliana landsberg
aagacgctgctaatcgacaagttaagttgtttgggtaacacgccataatctaggctaaaacttgttttaaattgtctctttttcaaccaaaggatgaaaacgtggagtcagaagatgatgatgatgatgatgatgatgatgatgataggcactcacgaatgttgaaaaatgtcactgaattgccaatttcagcctttcaaggtattgagacaagtaaaatttgagacagagttttgctttttttatcttctcttcagtgcatttttaagctcgatcttatactcttcttttttttttcaggagagagtaagaacaaacgtgtagtctttactgaaccatatccagagtctgaattcaatcctacccgtgatgttctggagggtaaatccctcaccacaattgatgactttatggagcctcttcaaggattacatggaaatagccaactaagcaatatgatctcccggatgcgaaaagatacgcagtctcttgttcatgctcctctgccaaagccagaacaagaaagcctggaacggaatgtagcgaatgaactggtttacaaggggtttgatatttgggtgcctctggtaaaaaggaacagagaggcaccaactatttactttaaccaagatgtcaatgttggatactctaccgttggtgctatagcatcacaatttcatcccaggactgaatttgagatgaaaatggcttctctactcgatgatcatgagattttggaggctcacaaagaagatggagctaggcttcttgaattcaacgaggtaagttttgtgatctagttcataattccctgcacgcagagcttacttgacttgtatgaatatctgatgtaactgtttttttatgttgcaggtatctatggaagatcacatcaagagacgtaaccatgttgctaagatgcggagcatgctcttccgagttgacctgaaacataaacgaatcaagcagattaagtctaaaacatatcatcgccttaaaaacaaagacctgaatcaatcgggtgttggagcattcatggagccagcaatggctaaagaagaggctaagaagcaggaggcgaggcgagtaaaggtgagtctataatttcttcactgattttttcatcaagacagtgtaaacaaagtgataattgtcttatttgttcctatgttatgtgcttatatgtgcaggaacgtatgactttaaagcacaaaaacacaggacaatgggccaaacgcatgctaagccgtggactgaataggaaatacgatgtgactcaggcagctctatctaaacaacttcaaattcatgctactttgtccagaaagatgaactccacaaaagatgaaagtagtagtgatgaggaagatttgaatgatggttcagatcaggatacttctaaactgatagcggaagcaaaggagaagatactgaaaactgtggacgatgatgaagtccccatttctcgtcttatgtcattacctttcatggtaattcttgctttgttttctcaaaacacttttgaatgtttttattctggttttcttttcccgctcattcatgtttttggtttggttaggctcgtgctgtgaaaaagaaaaacgaggaagctaaagaagaaggtaaacgtgatattgaggagttggagaaatttggtggagcagaaacctctaaaaagtccactaatgttgttggtagaagagtatttggtgcagaagctccaaaagagtctgaaaaggaatcagacaacctttttgataacagtgatagtagtgacaatgatatggaagataatgagttagaggctgtaaaagataatgcttcacctgctagaaacactgaaaccattatggaagccgaggtacgttctccggttagtcattatggttctttcttctctccctttgaaaatctctgattaaaacatttgttgtttgatttcctgcagaagttggatgatattgctggaaacccagcatctaagacaacatttgatgtcgccttatatgcatcaggctcctggaagaaggttttgtgtggagaaaaatattaatcagaagacttgggtctctctttgttaactcttttttgtatgttatgcagatgacaggctgcaaaaacgcagaatccaaaaaagcttcaaagacgcatgtgcccatttcgcagtcccaagataaaaaggtttcttttcttcaaatcacaatggaatgatactactaatttcttccttaatttatccccgttccagttttagcctactcatgtgtttttctttgctcgctttgtgtatttacactttaaaatcatttaaggaatcgagtgattcagacagtgatgattcagaaagtgatga

SEQ ID NO: 162323 - DNA, 1966 bp, Arabidopsis thaliana landsberg
cgggcacatattcgaacatagagcatttggagatggattcgaactcggtcgcatatgtgtacataaagctttcggagctagattcagacctggacatagagttcgacctgaaggcagatcccgacctctttatccgcttatttaaaagagtgagtctcgattcctacctcttttccctcgttggtgaaacattgagtctcgagccacagccggagctcatatctctcatctatcaaatattctcactcgtcgtctctatgtattcagagtggaaaaggcttattttcctttaccctcaagtacatttttaattgaaaaaaggaaaatttcaagtgattgacgaagaagtctcgtggagcagcaatggcaagtggaagtgtctcccttttaactggaagaaaatctggatatctgaagaaggcgttagtcatattcgctgccaaacttgcaatggcgagaaccatggagaatatgaaaaggctccagttgtgatcaaacatactcttcatccaaaacattccctccaacttgtcttgttgaatggggacacaaccagggaatgttattgttgcgataaagatctcgaagaggtattttattattgctcggcttgcgattatgctatgaatattgcttgcataaagagaccaagagtattgtctttggaccaaccgaagtggcatgagcatacacttgctcaatttccaagaaagacttctttaacttgcaacgtttgtgccttgacacattcaagctgtccatttatatgtgtcccccttgtgactgtgtggtccatctaagatgtatcgacttaccacgtgtcataaggatctcacggcatcaccatcgtatctcttttaccccttcttttgaccaagaaagattgtcttgtggtgtttgtcaaaaaaacatcgacaatgattatgggggatattcttgcatcaaggagggttgtttgtatgcagcacattcaaaatgtgctacacaaagaaatgtgtgggatggtaaagaacttgagggagagcaagaagaagaaattaaagaagttgagccatttgtcaagataagcgatggaatcatacaacattttagtcatcaacatcatcatttgagacttgatgacaacataaatagagactacgatgagaacaaggagtgtcaagcatgcataaggccaatctattttggtaacttctactcatgcatgcagtgtgagtttattctccacgaagaatgtgcaaatcttcctcgtagacaccatcatccaatacatgcacatttgctaactctagtaacagagtattacaatgttatggtccatcgtagccaagtttgttcagcttgtccttcgttgttgagggcttgtttcttctataagtgcgatgaacaagactgtgatttccagctacacgttcagtgcgccgcagtttctgagccgctagtccatgaaagtcatatgcatcctttattccttacatccgaaccatatgaggcaagactttgttcggtatgcaaaaaagaatcatggcttcttctttccacaaaagaaacattcaattgcattgaagagtgtgattttgctttgtgttttggatgtgctactttacctcaaaagttaggtataagcatgataagcatatgctcactctttcttatgatgaagacttcagtggttcacaagaaagtggtccgcatttgtgtgaagtttgtgaaaaacaagcaaatccgaagaatggagtttatatgtgcaatgattgtaacgtcacactgcatgttgaatgtcttcttggaaaggagatgtatatgatgcctattggagggctcatttcccgtaacgtaaatgttgatattcttcccaataatcgtctcactcgcaacatatgccaacgttgccataatcgttgtcaaggaaaaataatcttcaaagcacgtgacagatcaacatttttatgttctttgttttgtt

SEQ ID NO: 162324 - DNA, 8436 bp, Arabidopsis thaliana landsberg
caacgaacttaaggacatccattcccaacataatccacaaaggcatgagctaatctcactgctcttccttttacctcatcaaaatggttattgtgcataggacttgactccttgttcatacctgataagtcgactaatgtgataaaaagaaagtgttcctctccccaaaaaataaaataacattataataataataatgagagattgagaagacgttcagatattgtatagggtagcaatgtttcctatgaccccattattatatattattcggaatgatcaattacaaaggttagaaaactgacgagggtggcgatccagtatgcgagttcccctttgtttactctctaaaaaaataagtctggggagagaaagaacaccaaatatatatatatatatataaagaatggtctatttatcatggtatagtacatgaatgagtctaaaaggttcttaagcatttacttgattgatgagacccagcgatgatagcctagtggatatagttgagtgctttggtatggaatctagaatgttgtgtggggtagcggagaattacatggtggtcaggaattgattagaactgtttagtgcatggatttggtttgtatgatcaagctaataagctagagagattgggattttctatgtttttcaaacctctttcacagattcaaccttttgttttgcttgagggcaagcaaaagctaagtctggggggagttgattttatacccttttttcaccgattttaactatgtgttaggtataggattttgagtttttatgttatttctcgagtgtttttagtgtcttttcaggtactctatgcaatgggacaacaatagagataaggagacattttggagcaaacactaagaaaaaggaagctaaggacgattttggttcaggaatcagcgaggagtgtcgatcgacaccaagagtttcgtcccagcagagtgcaagacgctttcaagtttacagaagaggaaatttaccccaaaagactttcctatttgcattattagtccctggacgttttataaggtttatatacattgttttagaccctagttttgattatcaagttcttattatcaagatttttgcaaaaccttgttactgagagtcataagatattcatcgattgttttcagagattcatccagttcttaatacaatgaagagatcgcttctttcccttatcttatttgctgtgtttatgctttcttattcaatcatgttgtttgttacaatcaatatgtctgagtaatctacttgttaggaatagggtttctcattagggatttatatggtttagtagattgccccctttgctaggttatctatagaattcttcatctttaaatatgcttaatgctagatctagagtaattaactagatcttgaatccagacaaaagatatacccaccataggtatctattaccagaactactatagatcagtttggtttataagaatcggtctatctactaagatgaacttatcaaactcgtttagcatgcatctttaagtataggattcgacggcacatcaccgagaatcataactctaggcatagtgagttttacggaacatcaccggttattctgatattagagtttaagtttaagaacggttcggtaacaacctaggtatatctggatctactaataattatttcctgagattattctagacctgacgttttaatatcttgtttctcaaccaaccaacctgctttttgcttactttacattcttttcatttttcttacacacttctaccttaatcttgacacttagctcattgtgtgaacaaaggaactttgtggactccgacccttaaatactgcaatcgatatcttatttcagagagagagtttaaggcaagttgaaccatatcaattatgttgtgttcttggttttgagtttctcataggtggctccaaagaagaaagggaggatttatgggcccggttcaatgcagctagaagcctccttagctaacactactccagatattcctcgagaagatccagttgtactctctcaaaagctcttattgcaaaccaagctaagaagatcactagctttgatgtgtactttgactatcttaccgagaaggatccagagtttgatgccctctttcgagccggatcgttttcaaggactgcactagtcatctccaacccgacacctgaggtgcccaatgccatagctgctacatctgctagaataggagctgacgcagtccgagctcaaggcaaccactcgatcctctccatctcaagctttctaagtctataataaagtttactttgggttttgggtttataaggtcacaaacatagacaatttaatgttcgtgaatggataactatgggattcttagattattatatgaatatgcttgtaatttcaattttcaatctcagtttaaggattcaaatccatttttacatagaaatttaagtttaagatcaaattaagaaagtaattatagataaactaaccttactaacgcaaatgaaaaacacacagtgacgtaaataaatcgcaaatccatctcaaaatttgctagagatttgccactacaagaaaagagcacgcaaatccattgcaaaatttcctaggcaattgcagtaaacaaagagctacgcaagtccatcgaaaactttgaaagaaacaagcgagacctaccagttgcaactaattgacctaccagttgtaactaaattagttgcgactggtaggtctcgcttgatggctagtgatatacctcaatttttactgattttagagatgatttagacattggttctgagtctttttgttatttctagagtcgtttctagtccttttcaagtttttatatgtttgggatgcatttggtgatcatggaaaattctggaagaaaacatagaacttatgttgcagaagaaatctcgagaccaaaattcgcataggtgtcgatcaacaccaggggtggtgttgcctgatgatatatcccgatttttaccgtttttaactatgttttaggtataggttttagagtttaattgttatttctagagtcttttctagtcgttttcaggtctttacatgtttgggattcatttggagataatggagcattctagagaaaaacaaagaatttatgctgctgaagcaaagccagaaactaaaatgcgtgtaggtgtcgaacgacaccacccctggtgtcgagcgacaccaatacctgacggcaattcgaagacgcaacttatcgaatacccagaactttctcctttggttaatgaaggccaatcacgtgttttagacttgtatatatagtttttaggtcattgtttagacctaagctttgggaggctattccatatctcttttgtacttttgggagcaaaaccgtgtgaagattcccttacagaagattcttcttaactctattcttctcttgttttattcattgatttcttattcaatcatgttttgttcttctatgatcatgcttgagtagttttcttgttaggtttatagtttctcattaggaatttagattatttagtagattgccctgttgctaggttatctgttaggattcttcatctttaattgttcttaatgctaattcttgagtagctaactagaatttgaatcctgacaataggtatgcccaccataggtatttgtagttagatctattatttgatgaccctagtttataggtgtgtaataagaatcggcctatctactaagatgaacaattgaactcgtttagaatgcatgtttaggttaaagatctctcggcttctccggttaatcttagctatagatatagggaatttcgcggaacaccaccggttattccataattagagtttgagtttaagaatagttcgataacaacctagctattattagatctactaaccaatagtttcctgaggataccctaagcctgacgtttttactttcttgtcttacaacttcacaatttgctatcactttcattagtatcttacttagcttaattcaaaaccttggtctattgtgtgatccgagagctttgtagaattcgacccttaagtgctacaatcgatctcttatttgagagagtggtcttaaggcaatttgacctatatcaacagttacccccaaaacgtaggcaaatcgtaaccatcttgctaaagaagtctgatatagctttagcaatggctattgtcagcgaggctaataaacaaaaggatggtgctatagtgagatgtctataatttgcatgttttacacatccttttaccaccattttgagtctagtttcatccatctttcatagcattcaccatgatttttgtacattttgcatctttagtcgaatctaggactagtcttgcatacattctgcattctcgagttgtttcaggtgttttggagctattggtgctcagaaagaggaaaaacataaccgaaagtcacatttccaccaacatactcgatcaccagtagcagagagggaagcagtcagctcagcagtccatcaagatacttatactcgatcgcagaggagaggaggcagtccattctgcagttctactcgatcgtagaggtgagcaggcagtccactttgccagtccattagttctactcgatcgcagaggagaagaactagtccatcctgacagctgacacagatactcgatcatagaggccaagaagcagcccagaccattctgtcaaccaacctacttcgatcacacctcgaccctctgatcaatccgcactcaaccagacaacctaagcatcggaaagagaagagaagagaaggctcattcgaagcccattcgaagcccattcaaagcccatcaggaagcccactttgagccgacactcttgatcacgccgtccatgggccgttaagtgggctcgaagcccgctttcttatcttagtataaataagtctctaagggtttcgccctgagacatgcactttaaagacacgaatttcgcactattattcagcagccgcttttcattcctgcaattttgtatttcgatttttcttctaagttattcagattttgctttcatttgcttgttcatctttcgttttcatgttattgtctttaagcatgttgtctgagtagtgattaggatttctgaggatgggatagagtagttgtggaaccctggtcgaatctgttggttaagtgtggatttattgaatcccttctagattagttgtgtttactgcttattcctttctgatcaactggaattcgatcccagacgttccagcgcccagaaggcgtttaatggaacgttggatctactaattccagtgataatcgtctctatcccaagggattgtccgtttagagcggttattggctttaacagtcggttcttattgcctgcttagttagagatcgttaatgggaattaggtctgtgtctagctatgcttgaggatttctatcacgggagtgaattaatctgttgttgaacatgttgtctagggatagcttaattgagatttgttaaccaactgaattgatcagggagaccacgctattcgattaccccatccttaggaatcgtttgtccatttaattgcctattatcatttgtgctttattactcatctgcctgttattaccatttttgattttagtttcatttcatttctgttattgcatattaggtcttttggaatcatccaactctctgcttggcttgacttagagctttctaatcatatctcatatgtttgcatcacaccagattgaattgacacctaaaatactacaacgacaggatagttgttggagctggattcccctccaggaatccacctgcgaaaataccaagccagccaacaaaagcccaccaagcccactaagtagaggacctacgtagctaacgagcccacatacgcgaatgggtatttgggccagataagcccagtcagctgatgaagggagataagcgaataatgacctaggaactgacgaggagatattcgcgaagaggacctgatatctcggaactgacctgccgaatatccaggaggatctccgcagatcccggacggagcaaccacgtgcgtagacctatataagggagcaaggacgacttggaagggacattcaatctagttcacattggcacacacacacttttacacttgtaatctcttttctcattgtaaaagctttgtcaaaattaatacaaaagtccattcgttcttagcaatataactctcacggcttcagtgaagatctagccctcctttctcataatcttaagtacaaatctcttatgtggatttcagaacccacgatcatggatcatttcctcctttctcataatcttgaagatctagatcattccaacaccgaaactaacacatcaattgtgaccaacgatcatggatcccaattcatccaattagacaagatctggcttaccagttcagatcccaaacgatgacgttacggacgggcacctcccaatggatctccctcccggagcccaggttgatgctatccataacactgacacggagaacatctcccaaaaatcgaattcttctggatctgaccaaatcactccccctccgcaaacaaggggcagagaacgaaacgtcacgatacaacgtccaaacggagataactcggccaacctatctaatcaggtccccccgcgacctgccagcgaattggccgagctccgcgcaatgatcatgaacttgatcaacttaaccaaaaactaagaaattgcgcatcgcgggtaaggagattccccccccccccctgcgaaactgggattcctgcctaggtccccatagatctgacaggtaccatctccccggccgatcctacttcgagaactcgtctggatttcggcttgatagacgtctcacctcctatcaaccggcaggtcgcctttttacaggcacctatgaacgctctcgtaaaaaaactggcaacagtaaacgaaacaagcacaacgcctgccttcccaaggctaccggccctacctctattaccgatgggctgttcaccccctaggtacacgtggactagaaaccaaacaaccgcatccagttcccgcattcccgggaactcaacgcaacaacgaacctctatcgctaatctgccatccgttccccggatactaggaagcgacctccttaacagtccccaaacaccggtcgatccgcgtaacgtcgtggatatggaaacattccgcaattacgcagctcaaacaaacgcgaacatggctcaaatgcattctcgaatgcacttagcagtgagcgatgctcccgacatagatcgcgtgattaaagaaaccaggcgcaccccgttcacggataggatcgcttgttttcgcctccgagacgtcgagagactccgtttcccagagtacgtcggaatgagcgactcaaaggctcatctgagatccttccgttttgctataacacgagcgtacctaacagacgaagaaaacgaagcaggtcattgctgtttcttcgcagagaacctcgtaggtcacaccctcgaatggtttgctagtctattgataccttcgaccagcttgccgccgctttcttaaaatagtactcggtactcatcgtaaacaggacgtctgaagccgacctctggggtctcacccaacttcagaacgaatccctgcgatcttacgtcgaaaaattcaaagcaatcaaatcaaagattgcgaacctaaacgaggaggtagccatagccgcccttcgcaacggcttgtggatttcctctagattccgtgaggacctcactgttaggcaaccggtatctttagacgatgcgctttacaaagctctccacttcgcaaaagccgaagaggaactcgttgtgctggccttaagattcaaagaatctaaaacacaaaacgctccccttgcaaccaaaaaacccttcaaaaaggaaaaccaaacgcaagggcagcataccctattcgcaatagaagaggcagccgaggacgagagtccagaacttgacctcgaaaaatattgcaagtaccacaaaaaaatattgtaagtaccacaaaaaatattgcagaaacgttgcaagctaggtcctgaaagggctaaagctgtgaacgatgaggtcgacccgttgctcaagatcggatcgataagggaagtaaaataccatgattggctcaccaacccagtcgtcgttaaaaagaaaaatgggaagtagagagtatgcatcgactttacggacctgaataaggcatgtcctaaagacagtttcccactcccgcatatcgacagagtggtcgaggccactacaggacacgaaatattgtcaatcatggatgcattatccgggtccaaccaaatacttatgcgcccagatgaccaagaaaaaacagccttaattaccgaccgag

SEQ ID NO: 162325 - DNA, 1928 bp, Arabidopsis thaliana landsberg
ggctacgaatgctctggaatttgattcgcccacgttctccttctcccaacccacattgaaccgtccctggagacttgcgctcttcttcggcaagtgtgccatttcttcaatcacctctacacgcaccgcatctggcaacgctctccgatttccccatttccgtattttcacagcttgattttttcccagaactttagattcgaattggctttcgattcaaattttatgtatatatatgattttttcagattacttgtaggctcttgattcgtgccttaatcatcgttttggttattgtttcttttagtttggatgagctgaaaatgtgtgtgaatgttgaaatgtgattcaaacaagagtaaagaggggagttaatgtgtgttaagacacatttgtcagttttggttttacaataaatttgggggtttttatttttatgtttgtaggacataatgagtccatgggtttaatgggtgcagatacatttcttttctatataagcatgtagtctcatttgtgagaaattatcagagatatcagagacatctgaaagtcattcacagaattaagtatcattcagctaaacagttcttaacctctgttctatcatctctgtttctaacagtgaattccttgttttaccggttttgtaggttttttaggaaaccatggagctcatacaatgctaggctagtgttagaagatggctctgtttggtcagctaagtcttttggtgcttctggaacccgtgttgctgaattggtatttaacacctctttgacagggtcagattctttttttttttttttttggttaaaatttgtttgtcatcagttatgtcttaacatggcttgatgtctttgctggatctttaatggagtctgattgatttctatctttcttaaaggtatcaagagattctgactgatcctagttatgctggacaatttgtgctaatgacaaatcctcagatcggtaacactggtgtgaatcctggtgagtggtgatgccattttgatgttttgaaactttcttacacgctgtatatcatgttctgaggttgagatttgttctcttttgcttttcccccagatgatgaagaatcaaggcaatgttttctggctggtatggtgataagaagtcttagcatcaggtaaaggagcaagtctgatacctacattgaaaatagtttcatccattggaatcactttccttacttcggacattgaattggtaaagataaacttttgcaaattgcaatcttggcagtacctcaaactggcgatgcacaaaaacatttggtgactatctagctgagaggaacattatgggaatctgtaagtgtgtttggttattgactcttaatttagatttctagatattataactgggtttagaacattactcattttaatcctaccagatgatcttgacacacgggcaataacccgtcgattaagagaaagcggcagtcttaacggtgtgcttagcactgatggatccaaaaccgacgaggaacttttgcatatgtcccgctcttgggatatagtaggtctgaattctttcactgccctccttaaaatatgatcagcgtggaatatgtgattgagctctgtctatctgcttggttgaatattttaggccttgatctaataagcgatgtttcctgtaaatctccctacgaatgggttgaaaaaacaaatcctgaatgggagtttaagacaacctcctcacgtcacagggaatcctacagagtgagttgtactttctcttctctaatttacattctcatcgatttcctcactagcttctaactctggtttcatacttccacttcaaaaggttattgcatatgatttcgggatcaagcaaaacattctaagacgggatttcctcactagcttctaactctgttttcatacttccac

SEQ ID NO: 162326 - DNA, 417 bp, Arabidopsis thaliana landsberg
aggaatcaacaagaaagctcttagaatgttcccagttgtgagttactcacctgagatgaacttgccggggcttggcgaagagtgtgtcatttgtttgtcagattttgtttccggtgaacagattaggatgctacctaagtgccaccatgggttccatgttcgttgcatagacaagtggcttcaacaacatttgacttgtccaaaatgcagacactgtctggttgagacatgccaaaagatcttaggtgacttcagtcaagctgatcaagtggcagcaacaccaacagcgagcgtaattgtcaggattgctcctctggaacctgaaggaagagtaaacattttaagagaaagcagctagatgccaagagaggcagaaaccatcaaaaatcaaaattcgtgatttagttagataggaga

SEQ ID NO: 162327 - DNA, 776 bp, Arabidopsis thaliana landsberg
tgtttaggtactgtgttggattcaggagatggtgtgagctacatagttccaatctacgaaggttcaccactcccacatgcaatcttgcggctagatttagcaggccgtcacctaaccaactacctcatgaaaatcatgatggaacgtggctacacatccgccgagcgtgaggtagtccgagacatcaaagaacaatttggttacatagctcttgactaccagcaagaaatggagaaggctacaaagagttcggcaatcgatagaacctacgaactttcagatggacaggtgatcaccattggaggagagagattccgctgcccggaggttctgttccaaccgtctttggtgggaatggaagctgctggtattcacgagaccacttacaattccatcatgaagtgtgatgtggatatcagaaaggatctgtatggtaacattgtgctcagtggtggaacaactatggttccctggaattgctgataggatgagcaaagagatcactgctttggctccaagcagcatgaagattaaggtggttgctccaccagagaggaagtacagtgtctggattggaggctccattctagcatcactcagtaccttccaacaggtaaaatcatcattcggttttatatggaattttgtgtcctttttttttgttgcccattgttaatgtgatacacaaaatgttgttggtgtgcagatgtggatagcaaaggctgagtatgatgagtcagggccatcaatagtccacaggaagtgcttctaagatt

SEQ ID NO: 162328 - DNA, 1367 bp, Arabidopsis thaliana landsberg
agttttgattaatttttcatcccatatttcaaaagaacctccaatgtttttaaacccgacacggacagtgaatcggactactttttgggtcactggatcatcagatcaaccaggttggaccacggatcaattgattaaaatttatttattaaatgtaatattaatagagattttagagttttcagagttcttataaatttaaaaagaaaaataatcatatcatgtttataaaatataaaatcagattatgtttaataaaatataaaattatttagaccaaaaaaactgaaaacaaaatatatatatatatatatatatatatatatatgattaaattttttaaatccaactaaatatctaataccgtaacaaatatagtaggagatcaccaattacggaaataaattaataaaacattgtaaattcacgcaactaatatcgggtgtctcagtcaccattcgattcattttttaaggcagcattgtgaagtcttcacaaaaatctaaaacatcaaatgagtttaagaactgaaattttttctaaaaatgattgaataaagtataaaatctcatattttattctaaaatcaagagaattttgtaaaaccgatccctgatcggttcaaccggttcaccgagtcacgagttaatggtgagttttttggatttttttggttttgaacttgtcgggttttagcactaaacccaaaccgaaaaagtatttgagtcacggttcaaggtcggaccgggcggtccgggtcgggcgtgaaaacacaagtaaaattttcatgaacaaaaaatacaaaccgatggggctccgagaagatccgaccgactttgccccacccgccaagaaatccttctaaaaatactatagagatttgtcgtcttatttactagcgatcattgtcgaatattctaaagtctttttttttgtgtgtggaagatatgttggttatagaataaatgaaacaaaagggaacaagcaaagttttatggaacccaaaaacaagtaaaaaggcccatatcacatgaaaagaataggtcaattggttatagtagtgtacagtgtatatatatataaaattagacacttaggtagtacatttgactaagaaagagttcattttgtatatgtgtgtgtttgtttaggttttcgtttaaaatatctatttttgtagactaccactagagatgaagtgagggctatgatcagatgcctcagcaaatgcatcttggcgttaaactcaagtctgatggaagagggcctagccgttgatgatacagtggttcaacctaaagccgacgactccgagcaaagaaccaccgacgagcatagagacaatgcgaaaaaacttcttaagtttt

SEQ ID NO: 162329 - DNA, 1375 bp, Arabidopsis thaliana landsberg
tgtgagcctgtaattttaacatgtatattttgaaatggtttttatataaagggtcgtcgaaaagattgttgtaccgttccaaagccggatacacgattccgtgctatgtcaaagagaagcatcaatcatcaggaagttggtgtgagatacctccatcaaacttgaagttacgtggcgaaacttatttcaagtatattccttaacttctatgtttatatatacatatatgtatgcatttaaccggctctaagtggatgtaaactgttaatacaatgataaatttgtagagataaacgaaaacacccggctccaaaccaatgtccatacactccaattggtgttgacttgtttgtgtgtccaaggaagattgatcatatagcccaacacattgagctccccaaaatcaaagctgaggcaaacctccctgctcttctaattgtcaacatccaggtaaaaaacactaaagaaagtttcttagatcaaaagagatgtgttttcaagactctaatgaatctggcttttgtagttgccaacttatccagccgcaatgtttctcggtgatagtaacggagaaggcatgagcattgtactttactttaaactacgagaaaatttcaaaaatgaaatctctcaacaataccaagacagcatcaaggttaaccatgaaagacctaaagaccgtttcatttttttaaaaccattttttgtgaatgcgcgcattgatctttatagatggtttgttacagaaactagtggaggatgagatggaaaaagtgaaagggtttgcaaaagaaaacatcgttccgtttcgtgaacggcttaaaatagtagccggattagttaacccagaggaactcagtctgagttctactgaaaagaagcttatacaagcttacaatgaaaaacccgtgctttctcgccctcaacacaacttcttcaaggtttttataaaatcaccatatatactctttctaaccaacaaaacaccatttggtcacccaattatcatatgatcggttcggtctctctctgtccagggtcctaactactttgagattgatttggacgtgcatcggtttagctacctttcaagaaaagggcttgaagcattcagagatcgacttaaaaatggaactcttgatctcggcttaactatccaagtaatgtttttgttatcatattttatacgacactattcttgttgaacgatgtagagaattaaaaacttgtttttttttgcaaataggctcaaaaacaagaggagttaccagaaaaggtcttatgttgtctaagattgagcaagattgactttgttgacaacggtcaaattccttcacttttaattcgtgaagaaggagaatcattccctttgtga

SEQ ID NO: 162330 - DNA, 974 bp, Arabidopsis thaliana landsberg
cctgcaccagcacctacacctcctaaacctaagcccgcaccagcacctacacctcctaaacctaagcccaaaccagcacctacacctcctaatcctaagcccacaccagcacctacacctcctaaacctaagcctgcaccagcaccagcaccaacaccagcaccgaaacctaaacctgcacctaaaccagcaccaggtggagaagttggtaagcaagctaaattattgtttttagtcatcttttaagtatttatgattatatcagagtatatactagctagtttctgttgaatagttggaatatttagtcttaaagactaaagatccaatgaaccataatatgttatgttctccttgaacgacttatataaacttagttttagggtcacagaaacgtttttgttttatttattcgaatagaggacgaaaccgagtttagctacgagacgaaaggaatcaaggggccagcgaaatggggaacactagatgcagagtggaaaatgtgtggaataggcaaaatgcaatctcctattgatcttcgggacaaaaatgtggtagttagtaataaatttggattgcttcgtagccagtatctgccttctaataccaccattaagaacagaggtcatgatatcatggtaaatatcctaccaccttttccaatatatttcatttttttctttaatcaaacctgcgtactattggatcaccactttgtttaaaatatttttcttatggttaatgtggcaagttgaaattcaaaggaggaaataaaggtattggtgtcactatccgtggtactagatatcaacttcaacaacttcattggcactctccttccgaacatacaatcaatggcaaaaggtacgatctattctaccatatatcttaaacctataacgtaaaaattactatctcgctgttaaaattaatctcttctatccaccgcgttgaaccattagtaggaatatttt

SEQ ID NO: 162331 - DNA, 1018 bp, Arabidopsis thaliana landsberg; identical to SEQ ID NO: 25080

SEQ ID NO: 162332 - DNA, 3213 bp, Arabidopsis thaliana landsberg
acttatgaagcttttagcatgtgtagatctacaacacgggatactatacaaactgctgacatagttacctattatggagtgatcaaagaaataatatttctagagtatcacatgttcatagtaccatttttcagatgcaattgggccactagaggatatggtatcaagcaggaggatggattcacgcttgtgaaccttcatatgaatcaagcgtcatatatgcaagatccctatattctcccttcacaagctaaacaagttttttactctagagagaatgacacattaccgtggtatgttgttatgagagcacctccgagaggctatcacgagttggagacagaggaagagtttgttggtgcacctttatcagaccaactagttgatgatttggggaatcaatcttctgatgatgagagtttctttgttagggatgattggaagggatcatagtggcagagtagtatatatggaattattttgaatgtcaaaatttgactaactgttaattcatggtttttcaggatcttaattatttaggacaagaggagagttagtacgtcccagtgaacgccagcgaggcgtggagacaagacagaccacaaagcggccaaaaactatgaaagcaaagaaggaaaaaattgcagaactgatgattgatgcttatgaagatgttcttgagatattggaaggtgaaagagatgcttaggaggttgttggtgaggtgcagggtggtgaggaaaatgtccagaaagatggtatagaggcttctgttggtgatcaagaggatgtagctgttgagaaagaagttgtagaggaagatgttgctgaaaaagaagatgtacacacaagtcactaacctgatgagcaagtacagtctgaagctgaatatgtagatatggaagctgaacaaactgataaggaagcagaacctactaaggatatggcagtaggaactaatgtaagggaagaagactcgcagcgtactaatgctggtatagagatgaatagtagttcaggattacaaacaccatagtcagctcctcctgtaaagaagagaagaggaccaacaaggatgcgtaaagtggctaaatgatatgactattgccggacaagacttggaacttgaaccaatggagcagcttgtagctgataacactgtattttactcattttaggcatgtgtttatcatcatttaccttagtgatcactcattttctcatattattttgcatcacatctagcttattttgcacacttaggcattaaggatcatcttgcatacatattgcatgttttggtgtgttttaagctgcagaaggagcttacaaggaatctactcgaccctctactctatcaaaccagcagcagcagagcattctgctcgaccagtttactcgatccagacagctacagaggaggcattagattctactcgaccagtttactcgatccaggcagctatagaggaggcagcagatctactcgaccagtttactcgatccaggcagttacagagaaggcagcagactctactcgaccagtttactcgatcaagggcaacccactctacaagacttgttgatcattcaaagcgtcttctgatcctcctcattccctactcaaccagacatctgagcataataataggagaggaagaagcaactactcgaccaattgatcactcagagaatggaggcagaggcgcagactttgcagcaccctctttactcgatccccaagatcgagcactcctccaaaccgcctcaagtctcttatcttctagttaatatagggttttcaatattttagtataaatagatcactttgggatttgtccaagggatctagcttttatatcttagtttttctttgtgttcttgaatcttcaaacttaatcactcttaatctatttcgtttttgcattttgttcaaactttcacttatgatttctccttttccgagttttcttggagcttgttccaaggctataagatgaaggttccacctttccatgggtagaatgattcggatgcctatttggattgggaaaagaaaatggaacttgtgttcaattgtcaaaacaacactgaccttaaccgcgtgaaggtcgctgcaaccaaattttacgactatgctcttagttggtgggattagatcgtcactacaaggcggcgtaatggagcatatcctattgagacatgggaagggttgaagcttctcatgaggcgtaggtttgtgccaagccactatcatcgtgaacctcattccaagcttcgaaagctcatccaaggaactccattttagctttacttgaaactgtaataatgttgcgttggatgtgatcttcatcaagaagattataaatctctacaaggtctggaattgttttcttcataatgatttgactgtgaatcgttgagtatgattcattcaagcctgcaagaaacttcacaatctttgcacaatctttgcagcattcatagttcagacaagttttaacacaagtagcgtgataacatcgtatttttgcccacttttactatatttttattaggttttccatggagatatcaaaagttaaaggacacttcaaggcatatttcaagtatttgagcttcaaggaagaataatgagttttcatgcaaaaaggagtagaagtcgaccaaaatccgttttaagacagtttttgtgcctcagatgtttcacatccggccaaggtcttcctgatctcggcctgagggtatcttggttaaattggaaagctagaagagtcaagattaacgtcgaagtcgaatcgaagcaatccatgaagccggtcaaaagatatgacccgaagagtgaagacatgtcaagaatttgctgtttggaaataataaatccaaaacacatccggccgatgagacttgaacccgggcagctcctagtagctcaccaccgaccattaggtcacgcccaagtcctttcctctatgcgctgccgtcattaggctctttccctgaagcccacttctcggcccgatcacttagttacccgacggaatgacgttcttacccctaaatctaattcttggccctcaagtataaatacttgttttaagtcctaaccctacgtgtgccttcatcaccagcgaaccctagccgtcgccgagagctgcccactcgccgccgcactttttgaagcttgaagaacaccatctctctctttctctt

SEQ ID NO: 162333 - DNA, 669 bp, Arabidopsis thaliana landsberg
gtcacttctatatatgcatctcccccatgattcaagggatagtgataagatgttttccgaccaaaaggatcaaaatttaatcggcagcgtcccatggttgattgttgactccaatgttaactttgttccatctttatggtttaatccaactttccaaaccgaactaacgaagctgtttccgcaaaaagaaaccgtctttcaccacttggctcggtatctttcatatcgtcacttggtactaccatgatcacttatccaaagcagatatgagagactcgggattcaaattcgagtttttttgcgatcaaggtggatactaccaacgcgtcatggaccatctcatcctgcacacaaagacaggaaactcctgtcaatatatcgaacatcccaaaatgtaaagctgttcttgtcacttctttgacaggagaaattataaaagctcaaggtcgacatttggatatgtttcttatagtcttcgaggattaaagccatggttactttatctgccaaatgatctcacagctcttatttcgccgtgtgttcagtccacgtcgatgaagccttgtttccttactcgtccgtctcatggatgtgaacctgactagggagcccgctcgggtaaagttggtccaattgaaaagacaggatgaacgggtgatgctactgcat

SEQ ID NO: 162334 - DNA, 296 bp, Arabidopsis thaliana landsberg
atcgtcgtcgtcgtcatcttcataagttgaaacaaggaacaatcaccaccagatccaacattgactacaatcaccttgaggttatcaagtaaaagagcaaatgcccttgacctaacaccaacacccttggctttgacgttaagctcaagtcccaaaagttgtatgtattctccagacccatctgctacaaacttaacatgcttggtctcagggtatgacttttctcatgcctttgtcacagatggggcattccctgcaaccaatcaatgcaaacgattgcgtcaatacactaaacg

SEQ ID NO: 162335 - DNA, 1008 bp, Arabidopsis thaliana landsberg
ttgataaaccgcttaagaagcttgggatctcattgttccaaaaggatataaaaagtgtttcccgcaagttcgactagctgttggagaagattcttgttgaacacgaagagagaatggggaagcattataaagctaatgacatgatggatttgttgttggaagcttatggagatgaaaatgcagagtataaaatcacaagaaaccatatcaagtccttgttcgtggtaaatgttcttcccttttaggtgtgattcgtatgtcatggaataaacatatgcgctgtgaaatgatggaataaacctaggccactcttagatatagaaaatatggaaatactctaataacagtttgctactacaggatcttgtcattgccggcactgacacctcggcgcaaacaatagagtggacaatggcggagcttattaacaaccctaacattcttgagagattgagagaagaaatagaatcggttgtagggaacacaaggttagttcaagaaaccgatctaccaaacctcccttacttgcaagcggtagtcaaagaagggctaaggttgcatccgccaggggctgtgttcttaagaacgttccaagaaaggtgtgaactcaaagggtactacataccggagaagaccatagttattgttaattcttatgctgtaatgagagatccttatgtttgggaagatcctgaggagtttaagccagagaggtttttagatatttcaagctcagtgcaagaggaggagataagtgacaaaatattaaaatttattccttttgccagtggaaggagaggttgtcctggaacaaacctagcttatatcaatgtagaaacggcgattggagtgatggtgcagtgctttgattggataatcaaaggaaaggaagtgaacatgagtgaggctgctggaacaatggtgttgaccctagcagaacctcttatgtgtactcctgttgctcgaacattgaaccctttacctgcaagtctgcgcgcatattcttag

SEQ ID NO: 162336 - DNA, 4297 bp, Arabidopsis thaliana landsberg; identical to SEQ ID NO: 21369

SEQ ID NO: 162337 - DNA, 1489 bp, Arabidopsis thaliana landsberg
ttattttgcacacttaggcatttaggatcatcttgcatacatattgcatgttttggtgtgttttcaggtgcaaaaggagcttacaaggaatctactcgaccctcaactctatcaaaccaggacggaagcagcagagcaatctactcgaccagtttactcgatcaaggcagctacaggggaggcaacagaatctactcgatcccctactcgatcctctacccaaccagttactcgatcaagggcaatctactctacaagacttgttgatcgttcaaagcgtcttcggatcctcctcattccccactccaccagacagctgagcataagaataggagaggaagaagcatctactcgaccaattgatcactcggagcatggaggcaaaggtgcagactttgcagcaccctttttactcgatccccaagatcgagcattcctctaaaccgcctaaagtctcttgtcttctagtgaatctagggttttcggaattttactataaataggtcttttggggtttgtccaaaagacgaagcttttattctgtagtttttctttgtgtttaagaatcttgaaaccttaattactcttaatctatttcgtttttgcatttagttctttgagtaaagttgtttatattgtttagatctacattttgatatgtttagagtaatttttgggtttatgtttttgattttgttgtttgagtagttattagggttcttgaggatggattagattaggataatgtaacgcccctgaatcgccctattggcggacaagccatgggcgaccctagttacactagagtgaagatgatcgaccataactcagcctaggtttccgatgaatacggatcctcatccagattttaatctaccatcttcccactaggaacaccacttacacttgccaaccctcttgatattctagtgttgagaaacccagactaggtcttatatcattaaacactcggttgcttgtatgaaaacactttatacatagtatttagcttatactttgcaaagagttacccaaaaatatatcattatatcgaatccttgttaaaatttacataataacaagtaatttttcagaagcaacgcaaaacatcttattttcggcatttcctagtgttcgtcttcccgccatggtcatcccactatggtttcctgtaagacaagtagaatcatgagtaatctaacattactcctgagctgggtctatgcacaaataaatctctaaggttgaatcaactcattaagtaaacctaaccatcagagatcacggaacatgcagcaaacgtattatcatatacttataataataccagaagatgcagccgaactagatacatgaatgaaccttgggcccaacatactgattccagctgtaccaaaaacatgcaccacaacatcagcacaaactcccgcatacatgtatacatgttctccacacgtatgctaccacacacacgtacgtgcacacccac

SEQ ID NO: 162338 - DNA, 2495 bp, Arabidopsis thaliana landsberg
  unsure (1)..(2495): unsure at all n locations
gagttgcacaaacgagaggtcacccctttgacatataatcttttgggcagagagaagctggataaggagatgttatacagatctagagttggtatcatgattctttcaaattgttatgtttcttctagacagtccctggatcacctggttgcagttatggagcattggaaaaaaacagaccttgtaattattcctatatattttaaggtgacactttcagacatttgtggattgaaaggcaggtttgaagcagcatttctgcagcttcagaggtcnnnnnnnnnnnnnnnnnnnnnnnnnnggaaggcagctgtgactgaaatagtgtccatcggtggacttgaatggacaaaggggtacattgacttctcttagttgtcccttatacttttaaacaatgtggcaactggtcccctggaattattttaggaattcttggaaaggacaattccaaagctttaagattatcaacgatttcaattatttggagtagtgtttcttataagtacgtccattttctgtgtccttttgcaggagccagtttatgcttgccgaggaagttgtaagaaatgcatccttaagactaagtttgaaaaacagcacgaatgtggctgaaatcttagcattattaaatcattcccagtctttagacgcggaaattgtgggactctggggtatggcaggaataggtaagacatccattgcaagagaaatttttgaaatactcgctccacattatgatttgtgttacttcctacaagactttcatctaatgagtcagatgaaagggctgacgcaattgcgtgatgatttcctgtctaaagtatgtggggaagaaaaactaagtataggcgcttgtgatacaaaattgagtttcatgaagtcccggttccataatataaaggttctggttgttctcgatgacgtgagtaatgctagagatgcagaagctgttgttggagggtttggctggttttctcatggacacagaatcatcgtaacttctaggagaaaacaagttcttgtacagtgtaaggttaaagagccataccagatccagagattacgccagttagaatcttttcgtctctgcaaacaatatttaaatggggaaggtgatgtcatttcagagcttataagctgcagtagtggtattccattggctctcaaagttttgggttcttctgtatcaaagcagcatataaactacaagatggaacatctccaaagcttgcgaaaaaatcctccaactcagattcaggaagcgtttcgaagaagttttgatggactagatgaaaacgaaaagaacatatttttggaccttgcatgtttttttagaggggagaacaaagatcatgtggtgcaaatacttgatgcttgtggtttttttacgtatttgggaatctgtgatcttatagatgagtctctcattagccttttggacaacaggatagagatgcctattccttttcaagatataggtcgatttgttgttcgtgaagaagatgaggatccatgcgagcgtagcagattgtgggactttagtgacatcactgatgtattgattaacaattcagtaagttgatatatgtttgtttcttttaatactccagataacttcataatcatcttttctttctttagctgtaatatgctgatgttaccatacttatgtgattgtcttcgccagggaacagatgcaattgaaggcatcttcctggatgcgtctaacttgacttgtgagttgagtcctactgtgtttggtaagatgtataatcttagattgctgaagttctattgttccgcctctgagaatgagtgtaaactaaatctacctcaaggcctcgacactttgcctgatgagctaaggctacttcactgggagaattaccctctgaagattttgcctgggaaatttaatcctgagaaccttgtagagataaacatgccttatagcgacatggagaagttatgggaagggaagaaagtaagtattgtattatcctgcttacatttattcgttaccctgattgatgactcatttggtgatttatgctgtaaacagaatctcgagaagctaaagatattgaaacttagccactccaaaaaattaactgatatcctggtgttatctgaagccgtaaaccttgaacatattgatctcgaaggatgtactagtctggttgacgttagcacatctattcctcgttgtgggaagcttgtttccttgaatatgaaagactgttctcatttgcgaagtttgcctgccatggttgattttacatctctcaagcttaatttgtctggctgctcagagctcaaggagattcaggaattgcaccaaacttgaatgaagtatatatctagctgggactgccataagtgaacttcgattgtcaatctagaatctcactgaacttgttccgctagatctggaaagtgcagagggagggcttcagcaactgcgattcggaataagcaactcgagatctgtt

SEQ ID NO: 162339 - DNA, 582 bp, Arabidopsis thaliana landsberg
gcggctgtcaagtttttgggacctcagctcagcttttttagaccgtttcaaagtaactccgagtggatcagcatcagagtcgaaaacccttgtttctactcatctcgtgtcatgtactccaagaaagataacatgttttgcattcccggatctggaggacacctcattggaacatgggatctccgcacacacaagcataatttgcagagcttgcagtttcaaaaccttcccaagctgacaaagaccaaacagaagctactggattcatgttgcaagagcgagcacttggttgagtcaccagctggtgaaactttcttggttaagtggtacaagaagtcttcaagcaagatcatcaagggtattgcgcaaatgaaaacacaagctttaatggtgttcaagcttgacgaacaaggaaacgcggtttacacccaagacattggagatctctgcatgtacctctcaaaatctgaaccattttgtgtccctgctagttcctttccaggtctcccctctaaccaggttataatctatgatttcgacgaagcaggatttttctttctggataatttacgcttcattggt

SEQ ID NO: 162340 - DNA, 1962 bp, Arabidopsis thaliana landsberg
  unsure (1)..(1962): unsure at all n locations
gaaagaccagacatctcaacnagtagtagaatatgaagatgaacttgatgaactgttagatgatcctggtcctaggttcatggactggccgggagataatccattacctgtagaatgctgatttgcttccaggcgccattcctgattatgaaccgcctttcagggtacttccttatggagtaagatcatctctgggaccaaaggaggcaacagctttgagaagacttgccagatctattcctccacactttgctttaggtatgagatttctaacttttttttgtaactctttgggagtctgaaagagtctttgaagagcagaagtttcttttgatttccaggtcgaagtaggcagctccaaggcttggcgacagcaatggtcaggttatgggaaaagagtatgcttgcaaagattgctattaaacgtggcgtgcaatcaactaccagtgagagaatggctgaagatctcaaggtaataaggactcttgattggttaatgttgaaataccttttgtgtatccttgtaatccttataggcaattttatgttgtcttcctgattggagagaaaattctattatcctcgatttctgttaatttgatcatgtcatggaacggttatagaatgtctatctatactattttctcaacttttagtctttaagcatctcttgttctgtcctgtgtatacatttatgctccttttgtcttttatctggggttgtagctgtatatttgatatcatgtttttggtaagtaattgcagaaattgacaggaggtataatgctctctaggaataaagacttcttggttttctacagaggaaagaattttttatcaagagaagtagctgacgcattggtggagcaggagaggtttgtaaggactttgcaagacgaagaagagcaggcacgtttaagaggttcatcggctctgattgtcccaagtactgaacctgctaataaacttgtttctgctggtactcttggtgaaactcttgatgcgactggtaagtggggaaagaatctggacgatgatgatcattcagacgaagtgaaacaagaggttgagatattgagacatgagaatcttgtcaggaaactggaaaggaaacttgcttttgtgagttctggactttcctcttgtttcttttcttctacctgtgagttagattcacatatcatgtgttaatgagttgttctttaaattaatgggattagttcttctgctttaggctgagagaaagctgttgaaagccgaacgtggtttggctaaggtggaagtgtgtcttaagcccgcagagcagagagaagatccagaaagcataactgatgaagagagatttatgttccgcaagcttggcttgaaaatgaaagctttcttacttctaggtaaaattatcaataacagatgagtgtagtggagtgtgttctataaatgctcagactcttaaaacaaacctgaaaatgttgcttcaggtaggcgaggagtgtttgatggtacagtggagaacatgcacttgcattggaaatacagagagttggtcaaaattattgtgaaggctaaaacttttgacggtgtaaagaaagtggcattagcccttgaagccgagagtggtggtatcctggtttctattgacaaggttaccaaaggatatgccattatcgtgtacagaggacaagactataagcgtcctaccatgttgagaccgaaaaatcttttgacaaagaggaaggctttagcgcgttccattgagctccaaagacgcgaggttcattgatataaaatcatcatttgctatcttatttgaaactcattagctgatctgtattccgtttgcatcaaacagggtcttctgaagcacatttctacgatgcaggcgaaagcaaaacagctgagagctgaaattgtaatggacctaactcatttttacattggcttttgtctaattatactgtatca

SEQ ID NO: 162341 - DNA, 754 bp, Arabidopsis thaliana landsberg; identical to SEQ ID NO: 810

SEQ ID NO: 162342 - DNA, 1111 bp, Arabidopsis thaliana landsberg
gtaagtgttttttttcaatcaataatggattagataagagttaagcatgtagaattgataattgagacccgaactccgtgtgtgttgttgcagttagacttcagtatgtttgggagtctccacaaggttgtcttatgtattcgtttacattagaaatggtagatggtcgagtagtgcctttgatacagtatgtggtgtctcttgctgttactgaggcagtgaaagatgtttgtgacaagaaggtatgttcttgaaaataacctttttgttgtgtgttttgatcccttgtatcagaaatttgaagttcatttgttttcagggtttgtcgtatattgatgttaaaataaagtggccaaatgatctatacttgaatggccttaagattggaggcattttgtgtacctctacatatagatcaaggaagttccttgtcagtgttggtaataagcattactctttagaagtttgtaataagtatcttttagaagtagcactgctcttagtcttattgaagctggtgtttcttaatgcccgtgtcccattgaatgtggacaacgagcaaccaaaaacgtaaataaatgcggtactaaaagacgtttgtcctccgtcaaacctactaaaagagaagaaattcttggtgccttctttaataaatttgaaaatttctttgatctattcatggaacaaggtaatgtactcttcatctttatcacttttgaagtatattccaaacagtattatttgattatttatttaaatgagatgagagtaagggaaataatcatctaattatctagttttaagactatataacgtttgacatcatcactctgcactttacaggttttaaatctcttgaggagctttactataggacatggcttcacaggtaatggttttctcttcgattgcaatttctgtgtgcttgtaattgaagggtttctctacaaatctgaactggttttgattttatgcttatcctattagtcactagctgaactaaatggcaaaacttcatccattgggaactatgtactaaaataattgctaggataaaatgaccattttattctcatttatatgatttaatgtacactgtggtatttgcttg

SEQ ID NO: 162343 - DNA, 1230 bp, Arabidopsis thaliana landsberg
actggcgtggagtttagtggtgaattgagtgatttcatcatgatagatgttcgtcagagatattctcatgtgaaagacgacattcgtgttactctgattgaggttttcttagcttataacttcattgataaaaactactatatatatgatctgtttcataaatatgaaattttgtccattgtttctttccaggcaagggatatactttcttcttttgacgatcggctaaggcactatgcaatcaagcagttaaacaaggttattatagttaatccatatgcaaacttcatatgctttaaattgagagaatttggattttgaaaatctgctagttttgacttcagtctggagtgaagcttgtgcgtgggattgtgaaagaagtgaagcctcagaagctaatccttgatgatggcactgaagttccttacggtctcttagtctggtcaactggtgttggtccatcttcatttgtgaggtctcttgattttcctaaagatccaggtggaaggtatgttagttccaatgtcacaacagaaagcttgttctgtttttttccctccaaaaaaacattttctgatcttggatcactctgtttcgataggattggtattgatgagtggatgcgtgtaccttctgtacaagacgtgtttgcaattggtgactgtagcggttatctcgagagcacagggaaatcaacacttcctgcacttgcacaggtctctaatgttgtaaaagaatctatttactttttttctatactcggagtcttaacatacaagtctctttgatcaatgaaggtggctgagagagaaggcaaatacttggcgaatctgtttaacgtgatgggaaaagctggaggaggacgggccaatagcgcaaaggaaatggagcttggggaaccatttgtgtataaacatctcggaagtatggctactattgggagatacaaagctctcgttgatctccgtgagagcaaggtatgtttaaaagaaaaggctctcattctctttcacttaaaaatccctcaaaacacaataatagtagatagctaaactcgaggagggagttttcttgtgcaggaagggaaaggaatatcaatggcaggttttctgagctggttcatatggaggtctgcttatctgactcgagtcgtcagctggagaaaccgtttctacgttgctatcaattggctcactacctttgtctttggtcgggacattagccgaatct

SEQ ID NO: 162344 - DNA, 1883 bp, Arabidopsis thaliana landsberg
  unsure (1)..(1883): unsure at all n locations
ttctgactctttttctactccaacagaaacttaagtggtaataatctcagtggctcagttcctccctcacttctttagaataaaggaatgaagttaaagttattatggcgattgatgcaatcgagtatctttaataattacattttgcagtctcgaaggaaatcctcatattgtttgcacaacgggttattgtgtcaacaaaagagaggatggacataagaaaaagagtgtcatagtgccagttgttgcatcaattgcttcaatagctgttcttataggtgcattggttctgttttttattcttagaaagaaaaagtcaccaaaagttgaaggtatattatcaataagctcaaacttcattcctttgttaacatcacatacataaatatcaaatttaagtactaagtcttactacatttttcgcttgaaaccttagggccaccaccatcttatatgcaagcatcagatggtagattgcctagatcatctgaaccggcaatcgtaacgaaaaatagaaggttttcttattcacaagttgtgataatgacaaataacttccaaagaatccttgggaaaagagggtttggaatcgtttatcatggtttcgtgaacggtacagggcaagtagctgttaagatactctctcattcatcatctcaagggtataaacaattcaaagctgaggtaaattctaactttcatcactgtctcgaatgaaaacatcaatgattcaactatctttaaaagcttaaacatatgcattttggcatggtatttaggtagaacttcttcttagagttcatcacaagaatttggttggtcttgttgggtattgcgacgaaggagagaacatggctcttatctatgaatacatggccaatggagatttaaaagaacatatgtcaggtaagcaaacaaacatgacctaaccatatattgctgtagatttatcgtgatagcatcagacattgatatctttctctccttttaaaacataggaacaagaaaccgatttattttaaattgggaaactagactaaaaatagtcattgactctgcgcaaggttggtttacctagtatccctattatttctcttatatatgtttttttgcttttcatttgattgaattttatggattttgttgcatagggcttgagtatttgcataatggatgcaaaccactanatggtacacagggacgtcaaaactacaaatatattgttaaatgaacactttgaagccaaacttgctgattttgggctttcaaggtcttttccgattggaggtgaaactcatgtgtcaacagttgttgctggaactcctggatatctcgatcctgagtaagtattattattattatttttttattatatattgtattattttggtaaaagagagtaagtaatataatttaaaagaattttgttttattggaaaggtaaattgataaaattctatgctcctaaattcaacagatattacaaaacaaatcggttgacagagaagagtgacgtctatagttttgggattgtaatattggagataattacaaacaaaccagtgattgaccaaaaccgtgaaaagcgacacatagcagaatgggtaggacaaatgcttacgaaaggagacatcaaaagcattacggatccaagtctccatggagattacgactctgtttcagtttggaaagctgtcgaattagcaatgtcgtgtctgaatccttcttcaacaaatagaccgacaatgactcaagttgtttttgaactaaacnnnnnnnnnnnnnnnnnnnnnnnnnngggagtgcaaaatcagcagatgcattcacagagttccgtagaagtgagtatgacatttgatcctgaatcaaatcctgcggctcgg

SEQ ID NO: 162345 - DNA, 897 bp, Arabidopsis thaliana landsberg; identical to SEQ ID NO: 16210

SEQ ID NO: 162346 - DNA, 4012 bp, Arabidopsis thaliana landsberg; identical to SEQ ID NO: 1888
  unsure (1)..(4012): unsure at all n locations

SEQ ID NO: 162347 - DNA, 1378 bp, Arabidopsis thaliana landsberg
ccaatgtcgacagccatggggaatatgaaaaggctccagtaatgatcaaacacgctcttcatccaaaccattctctccaacttgtcttgttgaatggggacacaaccagggaatgttactgttgcgataatgatctggaagaggtattttattattgctcaacttgcgattatgctatgaatattgcttgtgtagagaaaccaagagtcttgtctttggaccaaccaaagtggcatgagcatacacttactcaatttccaagaaagacttctgtaacttgcaacgtttgttccttggcatattcaagctgtcctttttatatatgtcccccttgcgactttgtggttcaccaaaagtgtctcagcttaccacgtgtcataaggatatctcgccatttccatcgtatctattttactctttcttttgaccaaggagttcgatgttgtggtgtttgtcgtagaaagatcgacaatgattatgggggttattcttgcaaaaaggatggttgttcgtatgtagcacattcaaaatgtgccacacagagcaatgtgtgggatggtaagaacttgagggtgagccagaagaagacatcaatgaaattgagccgtttgtgacgctaagcgaaggaatcatacatcatttcagtcatcaacatcatcatttgaaattggatgagaacagtggtatagactacgacgagaataagatgtgccaagcatgcaagataccaatctatttcggcaacttctactcgtgtatggaatgtgagttcattctccacaaagtatgtgcggaatttcctcgcacaatacatcacaagttccatccacattggctcaatctggtggtagaaaatggcggtgtaaggactgaagagaataaatgttcagtttgtccttggatgtgcacagctggtctcttctataagtgcttcaaagaacaatgtcgttttaagctacacgtccagtgtgccacaattcaagagccattagtccatgaaagccatgcacatcctttattcctaacatccaatcgaaaggagcaaagaacatgtcatgtttgcaaagagtcaggacattgttccacaaatgaaacattcaattgcattcagtgtgacttcgctatgtgtttcaggtgtgttactttacctcaaaaggtgaggtatatcgatgatgagcatgagctcactctttcttatggggagaagataagtaccaagacacattggtgtgaagaatgtgagagaaaaatagatcagagcatcttgtatccgtgattcagctgatagaggtgccaaagtagcttgatggtcattgctatggttgtaagttgtaaaaaatattattgaatttgtgtgtttgttgtattgactagtcaa

SEQ ID NO: 162348 - DNA, 2102 bp, Arabidopsis thaliana landsberg
aaagagaattacatggtaagagaaagcttttccgaggcaatgatttcgctttttccatagcgagaatggcagtggctcatatatgcgagagtgttgaggttaacccgtatcaggaatcacacacacgtgagggtgtgaggtttagttcttttcaagaatctgctcttgatacactaactgatgttgcggttcagtatattcactagcattgggaagactgctcatttgtatgctaacttagccggtcgagtagatggtaattctctggacattcttcaagcattagaggatttgggatctggtttgggttttgctggtgtttctgatactgaccattgtcttgctgattccggtgtagccaaggatatcattcgttatactggagaagcagaggagataccgtttgtttactctcttcctcgtttcccatttagtaaagagaaaaaacctgctcctagtttctctgaggttggagcagaacctccagatgaacacattcctgtttggcttcctgcatttcccgaaaccgaattgtgtgatcgatcagaggaaactaatgcagccacaatcgaaggagaaattcctagtaaagaaaatggttcatctttaccgagtatgcaactttctttcgatggtggtggtaggttagaaatacataaatcttcaaaggatgttggagaatcaacagaagcagtagtcgaaggtaacctgtttctaactgcgcctcttcgatttgtggagaaaaatgtgtcacctgtggtccgccctttggagctttcaaatgaagttgttaggaccaaccacgttcctgataagcatgtgaggaacaaccatcacatcccaattcttgaggcatctgctccatcggataaaatcaacaacaagaactggttagctatatcaaaggatgtagagaaggtagatgttgcaagaaaagaactaactttggtacgtttcaagatagggactacaaaaagatctatgtgtttggcaaaaagtcggagcttccaggaagagggttggtttcaagaaggtgaagacaagagggagaagacgtcagaaatcaaagaaaagcgtgaaagaattgactcgcaattgtcaactcagatgtaaaataggtattatgtcattttagaatttgcagacaaaatagctttgcatcctgagtttagtgatcgtttgcaactggaatacgttactttttagggtaagaaatgtttactaattcaaaacgatggagaaatagatggttgtttggcatttaacttgatttgcagtgaaatattagtttgacagaccaataaatatgctctttgcactttttggtattatctatgaacttaaatactgttatttattaattagacctgtatatatatgctggttacaacaaacaagtgggaagagaacagaacaggcaagagggctgaaaacccagagactaaaggttctcttcctctctaagataacttcatttacaaatctaagtgataactgataaccttaaaaaaattagcagaagcaaacttcattaaccaagtctctgaaaatcattctctcaatatctaacacaattcctggagtctctccttcaaactccttcaagttcatgctttgactttgcaggtcctcccatatgatgtcttcctcgtcgtcctccaagatacagtttgagttgttttgttgtaacctatcaatctctgaacacagagtctgcagaagttgctcctcttttgatattttctccaattttttaagtggatttgcgattaaacgtggtttgatgcagccttctgcagtgaacttccgagctaaaatctcgttaacggtgtcgaagacgagttttctcctgattgtctctgttgggtttgtctgctgttgtctgaatcctctatctctgtgtttgttgtccggtagagtcacattactggccttgttctgttccaggataaagaacagtccagggttgatcgggaggcgcgtttggtgcagctgaaagcttatcatgctgtattcaagatctcttagaatccctgaggccaacaatatctctaagatgtacttgtggttgccgcttttgaagtctgcaccttcttcaggtg

SEQ ID NO: 162349 - DNA, 1249 bp, Arabidopsis thaliana landsberg
atgtttcggcttcgccgatgtcttttcttcgaatcttcgctagtagctccctacgaacaaggtaggtgtcgaactttactaaattctcctttatttgagatttcttagttcagaagtttcctcttggctatttacgttgttaacttagggattctctcttgcttaccaactcatcttcgcgtcaatttaataatcaaaactttctctaaaaggatttcagagtctaaagagattcgtgttattcatcacaatgagcaacatacaacatatctagagtagatgtacaaccgaaagcgtaaatctagggaaatctatctagttcagaagatctagttacacagaatatatgaatctgttagagtatattcgtagatgattatgccaagaataactgaagataaccgagccaaaacaaacccctaatattctctgtttgtatcgctgatttctcacaagagcttgtcttctttcgtgtagagaagatggatctcttaagaaatataccagacgagcttatttgccatatattgtccttccttacaacaaaggaggctgctttgacatcggttctctttaagaggtggcgcaatctgttagcttttgtcccttacctcgagtttgatgactctgtctttcttcatccagaagagcgtaagcgggaaaaagaaggaattttgcagagcttcatggattttgtggatagagtcttggatttgcagggtgattctctcataaagacgttctccctcaagtgtaaaactggtgttgactcagatcatgtggatcgttggatatgcaatgtgttggctcgtggtgtttccgatcttgatcttttcattgatttttcctatgaggatacccaagaggatgaggatatgctacctcaagagatgttcgtcagtaagacattggtcaagctgaaaataagaaatgatcgttgtgtggattggtggtgtgaaaagggaggcacttccttaccaatgcttaagagtctttatattgactcggacttgattctttggggtaagatgaaaaggtttctttcttctttccctgtgcttgaggaattacgaatggctagtatggagtggaaggaatcacacgaaaccgtgtcaagtgcaagcctcaggaagctaagtatccttggcaccggttgtgaagactatgtgaatccaaagagcatttcttttgatactccaagtcttctttacttaaactactctgatttagttgccgaggagtatccatc

SEQ ID NO: 162350 - DNA, 490 bp, Arabidopsis thaliana landsberg
ctttttctctccatttttttttaaactgaaactttattcactctcgaaaaatggtgaatccggtgggtttcagattccgtccgaccaaagaggagatcgtcgaccattacctccggccaacaaatttcgatggtgacacgagccatgtcgatgtaagtcattagcatagtcgagaatgctataccaagttggtttagtgggtttcttgatgtgcgtcaagatgctcaaatcgagaggatgctataccaagagaggaatgggaaacatggttgaatgatgatgataaacagaggaatatcatgtttatgcaagataatcgcaatgattacagacctccaaactcattaactggtgtcttcagtgattgtagcagtgatgataatgattctgatttactatctccaaaaacagtaagctaaattctactatgttcacctttataatcctctgtttcagatttcacctcacaaagctataatttcggttgata

SEQ ID NO: 162351 - DNA, 2234 bp, Arabidopsis thaliana landsberg; identical to SEQ ID NO: 15827

SEQ ID NO: 162352 - DNA, 3025 bp, Arabidopsis thaliana landsberg
atggcggagacttccgaagaacaaaaacctgcttcttcttcttcttcgagagcggtcacgtttcctgatttgcctggttagtttctttgcttcgtttccctaccctcatgtttaaaaatgtcctgcaattttcttacgaaatcatataacctccgtttaactgtatctttcgttatctgtatgattatagtctagacattgaattgattgataagctgatttgtgttttctccgttgacttttaccaatatattttttttttttgtcattcatcgttgagagtgatgatgttatgtagaaggaacatgaatattgcaaaattagtgtttgattttgaatttgaatttctgagtgaatggatttacaaaaaaaagggaagtttttcaggacatgatagataaaacgttttttttttttaaattcccttcaaggaagaagctctaatgcagttttatttttcagttacggagaatgtagaatcgcgtcaagaagggaagatggaatatgcttcattgcgtcaaaaagagaaggatctggaattgtgtgaaaagattgtgcaagttctgggagcagaaggccctcagagagttttgctaactggtaaagctgggatcgggaagacgaggcttgcaaagaaagtgggcgagcgtgccactgaaaggggcttgtgctttctgaccctctgcttgcatcttaacaagatgttcaaggaggatgatgaatggtctctttatgagaacatagcctcccagttatctgtatactccgattttgaagagactgaagtggatgatagagatgaggatgaggaggagcagaagctgcaaccagtcttgttggacgagttgaagaccaagatagttgaagagatagcaacgagggagaagaatgccaaggctgccaaagaggcgaagcgggttgctgcggaaaaagcaaagctggtggctgcggaaaatgctaagcagcaggctgcggaaaatgctaagaagcaggctgcggaaaaaccaaagaagccggtcgagaaaaaagatgagaaaaatgacaagcaatcgggtgatggaccggctgacggaaagggaaaatcaactgtaacagaaaagacgccgccagctgcaggggatacaacatctgcaggagatccatatcttcttttgattcttgatgatgaagatatcaacaaaaccagtgaagacgtggtgatgaataaactacaacttgggaagtttcttgtagataagattcttggtaaagatgacacacgtctcaaaattcttgtaacaaaaagaaaacgagacgaggagcttacaaaggctggtggggaaactgagtcacaggacgcaaagagtgagaacggaagtgaagggaaagagggagcagagagtgagaatggaagtgaaggtcaagagggagcaaagaaggtcagcgaaattgagtcactggagaaagatgataagggaggcactgatacggagaacgcacatgctacaaagggtgatgggggcagtggctcgtctaatgaaaatttgccgccggttgctccaatccctttccaaaccacggatatgtcagatattttaattaaatcaatcaataaggattacctgctggatttatttataactcttatagcaaaagaagactggaaaacatacgagaatttcaaacatgaaattgtggaacagagcaagaactcgccagctgcaatcgtcgtgctagccaaatctctaacatggattaagcagagcaaaaagatttctggttcgagcgatcccgatctagtaaaaaagatgacggaattacaagaagagataaagaaaaagatagacgaggttctctcagctgttcggtctggttcatccgattcaggttcttcttctgagagtgccgtcaatccaatcctgcatcttgcatatgtgctgttggaaacctatgactcatcaaagggtgccatcatcttggattgtttttggcatagcttggacttctttgagcaatgtggctgtgtttactaccgtgacctgatcacacaatggattcttgaaggctactttgatcctgttaggtctgtcgaaaaggcgtaccaggacggtcattctatcttgatggatcttataaaccgtggaatgcttaagatacaagaaaacaatgtggtggtaccagagatggcgatgatcagtttaattgatcctcggcgtggagggcatttcgggagatctcgacttggattttctagagtctatggtggtgacaaggaaaaaggtattgggaaaatcacccagatagatgatatgattaaaacagtgcaagcaaagaaagcagaccagattaccacgattctggttggtggcgatcgtctgcgtcgcgaaactcctgcaaagttcttcgagaagctgaaaatgcttgaagtacttggtctttttgaacccacactggaaccttttgtccagtcttttacagatcatctccaactgctccgggttcttataatcagggactgcgatctactagaaagtattaaagagcttaaggctcttacaaagctaaatgctcttgaagtttctggtgctagctccctgagcgaaatctctgaagacttctttaagccatttcttgaactccgaagtcttcacctctctgggcttaagatcaagtcttcccctcccagcatttctgacctgaaggaacttcgctgtctcatcatcaaggactgccctttattgcaagatctgccaaacatacaggaactaaaaaatcttgaggttgtggatgtttctggtgctagtgggcttcgaacttgtttcgacaacgcagatggtcccaagaaaaacaagagcaaaaacaaaaacttttatcttcttacaaaacttcagcatcttgacttctcggggagccaaatagagcgactgccaatattccaggactctgcggtggcagccaagcttcactctttgaagaggctcatgttgcgcaactgtagcaaattgagaaggttgcctagtttgaagccctgtcagaactccaaatt

SEQ ID NO: 162353 - DNA, 1079 bp, Arabidopsis thaliana landsberg; identical to SEQ ID NO: 4496

SEQ ID NO: 162354 - DNA, 1162 bp, Arabidopsis thaliana landsberg
  unsure (1)..(1162): unsure at all n locations
gtacttcttgaagatcatcttactcntaaactccaagctaaagttgctgaggtgtgtagactcttttgcatttctgtgacaactttttggctttagtaattgatggtagagatgttgtgtgtttagatggttacagatatatttggagaaatgttgtttactcctccttcaggggaatgtttgaaggagtttccatcgccggcgtttttgaaaaagcgtattatgatctcaactaaacctcctaaagaatataaggcagcaacagatgatgatttggtgaaaaaaggaagggatttgggtgataaagaagtttggggaagagaagttccaagctttattcgaagggacagaagtgttgacaaggtttgtgtaataacacatcatcttcatttagtctcattggttttcatgtgttttttctttcgtccttgttttagaatgattcaaacggagatgatgatggtgatgatgatgatgatgacgatgacgatgatgatgatgatgatggtgatgataagattaagaagaatgcaccaccggaatataagcatctgattgcaatccaggctgggaaaccgaaaggcggaataactgaatgtttgaaggtggatcctgataaagtaagacggcttagcttaagtgaagaacaacttgaaaaggcctcagaaaaatatgctaaacagattgtgaggtatgtttcgaaaagaacaatttctgtttccaagtgtctttagaaactctgttgatcatggagtactaaataatgtaggttcactcagaggaatttgctacgggtttatccgaaaggaactagaattacttcatcaaactataaccctctgatcgcttggagccatggagctcaaatggtggctttcaatatgcaggtttccttttaatatccacagctacatatagttgtaagacaaactgaattcaatggagggacttgggagatatgaacttttccttgtgcagggacttggacgatcattgtgggtaatgcaaggaatgtttagaggcaatggaggatgtggctacattaagaaacctgatcttttgctgaaatccaacgctgtatttgaccaggaagctacattacctgtaaaaacaacactaagggtcagttatctattctctgttttggtcatatgaaaagcct

SEQ ID NO: 162355 - DNA, 916 bp, Arabidopsis thaliana landsberg
gaaacttcagcggttatgggtaagcgaatgtttcctaaagtgtatatatgaaccgagcagatagatttatacgtaatggcttcaatgttttcttgtagattttggatagtataggtgacaaagggcttgaagttgtagcttctacatgtaaagagttacaagagcttagggtttttccatctgatttactcggtggaggcaacacagctgtgaccgaagaaggtctagttgccatctcggcaggctgccctaagctccactctatactctacttctgccaacaaatgacaaacgcagctctcgtaaccgttgccaagaactgtccaaatttcatccgtttccgactctgcatcctcgagccaaacaaacccgatcacgtcacatctcaacctctagacgaaggctttggagcaatcgtcaaagcctgcaagagcctgagaaggctttctctctcaggtctccttacagaccaagtcttcctctacatcggaatgtacgcgaatcagctcgagatgctctccatagcctttgcaggagatacagacaaaggcatgctatatgtgttgaatggttgcaaaaagatgaagaaactagagataagggatagtccgtttggggacacggcgcttcttgctgatgtgagcaagtatgaaacaatgcgatccctttggatgtcttcatgtgaagtcacactcagtggatgcaaaaggctcgcagagaaagcgccatggctcaatgtagagatcataaacgagaatgataataaccggatggaagaaaacggacacgaggggaggcagaaagtggataagttgtatctgtaccggactgtggttgggacaagaatggatgcgccgccatttgtgtggattctctaagtccttttcagaccaaactggttctgattggtcgtctt

SEQ ID NO: 162356 - DNA, 949 bp, Arabidopsis thaliana landsberg
agctctcttgcacacaaagaagaccctcctgcttcccctgctttcctattgaccccaaggatatcttatgatgagcaacgtcgaacaagattcttcctcaaggatcaaataccgtcttggtttgctgttggaggctatgtggttatatctgcagtgtctacagctatacttcctcacatgttctctcagctgagatggtactacattatagtcatctatatctttgctcctatcttagctttctgcaatgcttacggagccgggctcactgattggtcgctagcatcaacctatggaaagcttgccatatttacaattggagcatgggctggttcggatcatggaggtcttctggcaggcttagcggcttgtggagtcatgatgaatatagtatcgacagcttcagacctgacgcaggatttcaaaactggttacctaacattgtcatctccaagagccatgtttgtgagccaggtaattggaacagctatgggctgcttggtttcaccctgcgtattctggcttttctacaaggcgtttgatgatcttggtctaccaaacagtgaataccctgctccgtttgctactgtgtaccgaagtatggctaaactcggggttgaaggcgtctcgtctctaccaagagactgtcttatgctgtgctacgtgtttttcggtgtggccatactcattaacttaataaaagattgtcttggtaacaggtggggaaggtttgttcctcttcccatggcaatggctataccgtttttcttggggccttactttgcaattgacatgtgcgtggggagttttattttgtttgtctgggagaggttagatgcgccaaaggctgaagcatttgcaacagcagtggcttctggtttgatatgtggagatggaatctggactttgccaagttcagtgcttgctatagctggagttaaacctccta

SEQ ID NO: 162357 - DNA, 1342 bp, Arabidopsis thaliana landsberg
attaattaagaataagcaaaaagataaatcctaaacaaaaaatattcttaatccgaatcttcggtaaatctggagaaaaggaaatacccaaaacaaaatcaaaagggattagggttcacaaagcattatataaacaatgataggttaggtcatctcttcacaactcattatatcgttcaacaacaacacaactctctctctctctttgattcagcctcttcaatatctcataacctttttcttcttcgcctctcagcttttgttcatctttcttccttccttttgttttgtgtataccaacgaatcatggccacagcaagaatgaagaagatcttcagcttcgtgtttgtgatatttacacttctcttcggttgttgttcggccaccgtctacaaagtgggagactccgatggatggactgccaaggaccacctctattaccattggaccgaggataaagagatccacgtgggagattctttgatcttcgaatacgatcacaacctcaatgacgtcacacaagtctccggtggtttggaatacgaattctgcgactcttcttttcctaaagccgtctacaacacaggacatgatgtcgtaaccttcacggaaccagggtcttactacttcatcacctcaaaccatactcaatgtacatcgggacagaggcttggcgtttttgtcgtccatgacccgtcgagtccgagtcctctaccactaccgagcaagattattccttctagacatgtctacaaggttggtgactccaaaagttggggcgtttacgacagtgatttctattacaactggagtaaagagaaacagttcaatgtcggagacggtctccttttcgaatacaacaatgaagtcaacggtgtctacgagatcagcggtgaccttgaattcttaaactgcgacccgacttctccaatagccgtgcataagacaggccacgatatcatcgagctcaccaaaccaggaatccattatttcattagctcagaaccgggtcactgtggggctggtcttaagctccaagtcgtcgtcggaacaacactcaatgttccaaagttgtcacctttagagcgtctcacaaggtggttagacattttaagacaccactaagcgtctgtgtcatctactcaaccatatgctactttcgttgtcgattggtttaagacttgctaactaattactagttaaaagtctcttctttcttatttttttcatagttttgttgatttgttagttcttatttttcaccgatgtaaactatgaagtttcttcccattcttattgtaaaacatattttttaattgaagtagataggtgagaatattta

SEQ ID NO: 162358 - DNA, 803 bp, Arabidopsis thaliana landsberg
atcagaaagaaggctcagttaacaacatctggaggttttgctctgtacaagaagtagaagatttcaaaggcattgtccgagtttttcctctatggctatccatcatattcgagagtactcctatggtgatgcaaacaagcttgattgtactccaagctctagtcacggaccgtgggcttggtcctaacttcaaagtcccggcaggttccctccaagtaataataatcatcactgcatgcattgttatcataatgaacaactggctggtctttccaatgtacaagaagataactcataagttgctgacaccgcttcaaaaagtcggtataggccaggttctcaccattctaagcatggcactctccgcggttgtggaagcaaagagactgaaaacagttgaaaatggtcatcccatgtcagtgttatggttgtttcctccccttgtgatagtaggaataggcgaagccttccagtttccggcgaatattgaattattttatggagaattccccgagtctctaaggaacaccgcgacttcattgacctcggtggtgattggaatctctttctatttgagcacagctctcatcgatcttatccagaggaccacagcgtggttaccaaatgacattaaccacggaagagtggacaatgtttactggcttttagtcattggaggaatcttgaatttcggctacttccttgtgtgttcttgggtctacaaatatagaaacctcaaggataatgatcaagaacaagatccaaaagatggtacaatgtaaagacacaacatgttctgttct

SEQ ID NO: 162359 - DNA, 1507 bp, Arabidopsis thaliana landsberg
agtgtagtgcccatccttcccccaagataaagctccatgcacaagctgtgtaagcacgagtacactctcaatccaattcgcattctgaacacaaaatgttcaatttcgtaggagatcgcatatagtccggctcacatctttagcaaatcgcataaagaatgactcatccaaagtgaagagagagagataagagcatacgagccttgaaaagagaggtcacttcttctcttcctcgctaaagacaaagaaagtgagataagcgaacacatcgacgggtggtgttgtcgatgagagacactccatatacgttgaaacaaaaccactgcaggatctgacgcatttgaatccattttctctatacaatttacacaagagaagatatttttaaagaatttcccaaagagatctatagaaatttatgtgctctattctcttaagagactaaagaagttgaaagctaaaagacataaatcaatgaaccttgacataaatggaaagagccttggtcaaattctgcgtcaccttgaagcaaacagagagacgaaaaaggagagagcttttaagggattcttcgtcactaatcaaatcctccggaagagacgaccatggaagagatgaaccggaggagaaagctgagggaccgccgtgaagattgggaaggaagaaatcggctgaggagatgaaaatcgaaattgttggagaaatctaggttttttcgggacagagagagaggtgacgaccaaatgatttttatcttttcatcacctttaaccaaaaacgtgtttgaggaaaccaatcaccacgtgccacgtcgtctgattttgagtatcaacaatatcattacaatgatacggctcaggcccaagcatatcattcggtccattaaatactattttctgggcttgtgatacttaaaaaaaatcactggtgttcatggtcttatctttctatcaaaatcctaaattgcaacttgctgacgctttaccggtccaacgtaactttactacaccttggtaacgtgtctaataagctgtatttagcaaaattttaccatgtaatatgtggtttacttttttggcatcatttgtttcgacataaataattaatggaccatcgacgttaatgaacactcattctatattttcttccaaaatggaccatcaaatttaacaaagaaaaacatgtttaaaaaacaaatgtagtttcatacttcgtattgggattaacaactgtcacatgataagtgcaatagttatatgaataattcacgtcacagtatgtcaaatttttatatcaaaattttaaaatcgcaacttgcaaatacaaatactactcttttcccctccatttctattatagtattaaaactaaaaaggtcagaaggtatgcataatttgtgatagaacatttttcttgttcatgaatcgaaagatgacaatatccaaacttcccacgtggttatcattccaaaactgaattacgccgtcgcatataacatatcttattt

SEQ ID NO: 162360 - DNA, 938 bp, Arabidopsis thaliana landsberg
gactctagaggatccccccgctactgttggtaaatactgttcttctttgattttatttttaaggaattaagtaaacagtagtatcacgtaatagctaacaacacatactgacatacacatttgtttgtatgtaaaaagaatgtaataatgacgcatgtgtaacgttttgttggtagatgataacgtagacacgatcgtaactcatttccacggttaaatgatagtactgttttctattgactgtagctgccgtcggcgagaggtttctagcgcgtgacatcacattccaaaacaccgccggtccgtcgaagcatcaagcggtggctctccgagtcggatcagatttttccgctttttaccaatgcgacatgtttgcttatcaagacacactttatgtccactcaaatcgtcaattctttgtgaaatgtcacataaccggaaccgtcgatttcatcttcggaaacgcagccgcggttttacaagactgtgatataaatgcacgcagaccaaattccggtcagaaaaacatggttaccgcccaaggacggtctgatccgaatcaaaacacggggattgtgatccagaattgtcgtattggtggcacgtcggatcttttggccgtgaaaggaacgttcccgacgtatcttggtcgtccttggaaggaatattcacggacggtgataatgcaatcggatatatccgacgtgatccgacccgaaggatggcatgagtggagcgggagttttgcgttggacactctaacttatagagagtatttgaatagaggaggaggggcaggaactgcaaatagagtgaagtggaagggctataaggtaattacaagtgatacagaagctcagccatttacggctggtcagtttattggtggtggaggctggttagcgtcgaccggttttcctttctcgttaagtctttga

SEQ ID NO: 162361 - DNA, 1078 bp, Arabidopsis thaliana landsberg
taagaagcggaaacgtggccaagacggtcattcaatgacttggatgcggttttcgatgaatggaacttctatgggaagcaaatactctaatggaaatacgcttacaagtataactaccaatgccaattaccgtatttccctttgcagcggttaaagacgctacaaataactttaacgagagccgcaacatcggtgtaggcggttttggtaaagtctacaaaggagagcttaatgacggtacaaaggtagctgtgaaaagagggaacccaaaatctcagcaagggcttgcggaattcaggacagaaatcgagatgttatctcagtttcgtcaccgccatttggtttctctgatcggttattgtgacgagaacaatgagatgatactaatttacgagtatatggagaatggaacggtaaagagtcatctttatggctcaggtctacctagcttgacttggaaacaacggcttgagatctgcattggtgcagctagaggcttgcattaccttcacacgggtgactcgaaaccggtcattcacagagacgtgaaatctgcaaacatattgcttgacgagaacttcatggctaaagttgcagactttggactgtccaagactggacccgagcttgatcagactcatgtaagtactgctgtcaaaggaagttttggttatcttgaccccgagtacttcagaaggcaacagctcacagataaatccgatgtttattccttcggagttgttctcttcgaggttttatgtgctagacctgttatagacccaacacttccaagagagatggtgaatcttgcagaatgggctatgaaatggcagaagaaagggcaactggatcagatcatcgaccagtcgcttcgcggaaatatcagacccgattcgttaaggaaatttgcggaaacaggttacaaaatgtttagcggattatggagttgataggccatctatgggagatgtgttgtggaatcttgaatacgctctgcagcttcaagaagcaaacattgataatgaaccagaagataatagcacgaatatgattggtgaattacctccgcagatcaata

SEQ ID NO: 162362 - DNA, 862 bp, Arabidopsis thaliana landsberg; identical to SEQ ID NO: 29662
  unsure (1)..(862): unsure at all n locations

SEQ ID NO: 162363 - DNA, 772 bp, Arabidopsis thaliana landsberg
atgtgctagtctccctcggaggaaacgaagtatcttgcacatcgacaagcttgatctaagggtaaaaaataaggctggcaaccattacaagtgtagaagttgtcaaaaattattcgatggcttcaggtacaagacaacgtttgataaatttgatgtgcggtgtggatccatttctgagccttttcaccatgaactgcatccccatcctttataccacatcttttcaccagaagagaagtctcatatttgtggagcatgtgatagacctacacagtatgtcttaagttgtactgtgtgtgagtttcatttaggcatggattgtgccactttaccaagaaaagtgaaacatacatgcgacggtcatgacttatcgttgcatcatggagctggaaacaccgacggtccattgtggtgtgatatttgtgaggaagagacagatccgagtgtatggttttatggatgtgatgattgtgggaatacactccatatcaactgtgtacttggagacatgtattacttcaagccaggcaatagatacggcaaagctgaagtagttgccaatgttggtatgactagacctttttgtgtagtttgtggaaagcgttgcattttctcttcctttcttaaggctactactgctttagatttaagtgctttagatccagctgcttcagattcaactgttctatgctcttgttcaattgaatgtgcctacgaacgcggcccttaccgagatgccgagccgaagtggtattatgaaagtcaacgttga

SEQ ID NO: 162364 - DNA, 887 bp, Arabidopsis thaliana landsberg
aaaaaaaacagcgataaaaccgaaacatcaagcaaacaaaaaaaaagaggagaatttttttcttttgttttcgttttcaaaaacaaaatctttgaattttatggcaacccgtcttctccgaacaaactttatccggcgatctcaccgtttacccgcttttagcccggtgggtcctcccaccgtgactgcttccaccgccgtcgtcccggagattctctcctttggacaacaagcaccggaaccacctcttcaccacccaaaacccactgagcaatctcacgatggtctcgatctctccgatcaagcccgtcttttctcctctatcccaacctctgatctcctccgttccaccgccgtgttgcatgcggcggcgataggtcctatggtcgacctagggacgtgggtcatgagctctaaacttatggacgcttccgtgacgcgtggcatggttttagggcttgtgaaaagtacgttttatgaccatttttgcgccggtgaagatgccgacgcagccgctgagcgcgtgagaagcgtttatgaggctacgggtcttaaagggatgcttgtctatggcgtcgaacacgccgatgacgctgtatcttgtgatgataacatgcaacaatttattcgaaccattgaagctgccaaatctttaccaacatctcacgtaagcctaattcctctgtttttcttctttgctctgttttttctgattattttacattaatccctaatcattttgtcttaaaacgtaattatttgttaatgggaaacgtaattatcaaattcagacaacttgtttggttcgacagctaaatctccgtactctgacaaagtacacttgcatagatatgtactacatttattatatctatctattttcattc

SEQ ID NO: 162365 - DNA, 1621 bp, Arabidopsis thaliana landsberg
tgaggccacatgaaattgcaacagagtaatgctcatagtatcttcaaaacagtatcaattcaatttttcaaacctcatttctaagaccttataatacaaccatgaatcaatcctactatatctattaaaaagccataagtggagaatgaggatgataatcacacaaattcactggacagagagtgatgtacctggaaaaacatggtgagcatgtctgaaggagagacaggaacagagacagtctcttgcggttgctcctctgcgacagcgacaccttctcctccttctccaatagacgaaagcttcctcaatccaaggcgattttgttttataaacccagcaaaactgcaattgcggctatttccgatagctctggtccgaaagttgaggtttttcgacaaaggaagaaggtgggtcgaagaaagattagggcttttggttctgcaaaacgagtgaaaggtagaagaagctgcaatcgacgccatttttcactactgacccaatcttctttcactcgataaggttgtgcgagttacaagagaagaaggttttttcatttttgtgttttgctcttttctcacattatccactcgaagcaagcctgtaaaaagacataaatacccttgaggaaagctctctttctgtcagaaggttcataaattcatggagtaatataatttttgaccatcaaaaaggataattttagctaatgacaatgacaaaccttgcaaacacagttctgaccttgaaaggacttagtgtgaaaaacttggtacgcttcgatcttatagattctcctgctcctgataccctcgctcgggccttggacgatttgtatcatttgggagcacttgatgatgactgtaacttgacaaagacaggtgagatgatgagtgagtttcctttagacccacagatggcaaagatgctcatagtcagtcctcaattcaactgctcaaacgagattctttcgatttctgcgatgttatcagtaccaaattgtttcatcaggccaagaggagaagctcaaaaagcagcagatgaagccaaatctagctttgcacacattgatggagatcatctcacacttttgaatttgttccatgctttcttgcaaaacaaccaagacccaaattggtgctgtacaaagttcatcaactacagagcaatgaagtctgcagttagtgttagagagcagttggtccggatcatgttgaggtttcagattaagttgtgtagccctgatttcaacagcagggactactacgtcaacataagaaaggccttgcttgcaggttatttcatgcaagtggctcacctagaacgcactggccactacttgactttcagagataaggatgaccaagtggtgcacttgcatccttccaattgcttggatcacaaaccagagtgggtagtttacaacgaatacgtttccactagccgaaatttcatccgaaccgtcacacatattcgcggtgaatggcttgtagatgttgcaccacattactataagcttgctaactttcccagttctgaggccaaacgagttcttgaaaggcactataagaagagaaaactgtcagaagagaggagttgtaaattgtatagcaattcttaa

SEQ ID NO: 162366 - DNA, 730 bp, Arabidopsis thaliana landsberg
atgtgatcatcaaaggaatcatacttgtaagtaaaatgagagaccaaatcagtaacattacgttaatgtttttgttgttgtatatttaactgattttgcatttggataggttatgatacttgccgggactgatacatcagctggaacgttagaatgggcgatgtcgaatttgttgaaccatccagaagtattacgaaaggcaaagaccgaaatcgacgaccaaatcggtgtagaccggttagtagaggaacaagacattgtgaaacttccttaccttcagcacattgtgtcagagactttacggctttatccggtggctccaatgcttttaccccacttagcatcagaagattgtatagttgatggctatgacgttccacgcggcacaatcatcttggtgaatgcatgggccatccatagagatccaaagttatgggaagagccagaaaaatttaagccggagaggtttgagaaaaaaggagaggataaaaagttgatgccatttgggattggacgacgatcatgccctagttcagggctagctcaacggctagtgactttggctcttggatcattggtccaatgttttgagtgggagagggttgaagaaaagtatctagacatgagagaaagtgaaaaaggaaccgcaatgcgaaaagctacatcgttgcaagctatgtgtaaagctcgtcccattgtccataaggttttagatgcttcttgtccataa

SEQ ID NO: 162367 - DNA, 2030 bp, Arabidopsis thaliana landsberg
ctccccagtctttctctcaactctagataacggtacagtagtaagatcacttgcgggaataccttcagagggaccggttctctatgttggcaatcacatgttgcttggtaccgaattgcgtccagcagcaattcatttcctgaaagaaaagaacattctgttgcgaggacttgcacatccagtgatgtttgccaaaaaatatggctcaaaactccctgatatgcatatgttcgactcagttaggatgataggcgcagttcctgtctcaaatatcaatttctataaactacttcgctcaaaggctcatgtggttttgtatcctggaggtgtccgtgaagctttgcacagaaaggtgatataatagtttgtaaactttttccgggtttctgcattcttgaaacttgttattttagaggctttaatgaacaaacaaaatttgcagggtgaagaatacaagctgttttggccaaacatttcagagtttgtgagagttgcatctaaatttggagccaaaattgttccttttggtgttgttggagaagacgatatctgcgaagtaagctttctcatatgctatacattataaatatccgaacctcggtttggcgtaactttggtttggacattgaatgattctcagattgtcctggattctaatgatcaaaggaacatccctatcctcaaggatttaatggaaaaggcaacaaaggacgctggcaacataaggtgttgcatcacatactctatttataatttgttctcataatacttctttcaagtaatattcatatgaacattgattttgaacgtcagggaaggcgatgagagcgaattgggaaaccaagagtgctatttcccaggacttgtacctaagattccagggcggttctactattactttggcaaaccaatagaaacagcaggtatgtacttagtcttaatgtatgctctctacttcaaatcactgacctctatacttgcaagttgcaataatggtggtttttctttttcatggcaggtaaggagaaagaactaaaagacaaagagaaggcacaagagctctacttgcaagttaaatctgaggtagaacaatgcattgactatttaaaagtgaaaagagagagtgatccctacagacacttattgcctaggatgttgtatcaggcctcacatggttggtcttctgaaattccaacgtttgatctctaacttatactgtggctatatatgttatagacatctaatcatatgatgtttagaggttctaagattctttagagatctaaagatcttttatttgttcatcgaaaataagacaagattatttaactgaatgtacatgacatgaatctatctattactttcgtaagattacaagtttttatttatgttttgaatgtaatgttaaactagactcaaataaatattaccacaaatctgacattcttttgaaaaatctggcatgctttggaaaaatatggcattcttatatcaagtgtgagatattcttttgaaaaatctgacatcttttgaaaaatatgacatgattacatcaagtgtgactgtgacattctttagaaatatatgtgacataactcttttgaaaaatctgacattcttttgaaaaatatgtatcataagtttttttagtacaccaagtgtgacatatattcatttgaaaagtctgaaaatattctaagaatttgagactttagtttccagagtcaaaccaaacttggaggcctttgcatgcatctcttatcaccagtcgctcggatttatgaaagttataatgaatgcagtcgtatgtaatctttctttaggatcaaacaacaatttcaattactctgtttaaaattcttgatttacatgcgatcaaggtatactgtatataggtaatttgttaaaaatgtaaaactcacaaccgaagaagatttatgttattttggttcttaaagtacgtagatatttttataaaatcaaattaaacatctaagaaaatatacaacgttaagagagatgacccccaa

SEQ ID NO: 162368 - DNA, 840 bp, Arabidopsis thaliana landsberg
ctttgcagcctccttcgtttatttttagttatgcttttccatttttaactgaaagatacctaatatgggatcaggaccatgttcattttcatgctatcacttgttggagtgttctatccatacaaccgtggagcactcttcactgttttggtcgttatctattctctcacatctggaattgccggatacactgactcctctttctactgtcaactcgaaggaaagaattgggtatgtaaaccctttccctttactcttttcaacttaaagtgataagcttttcatttctcaccgttcttcctcttcaggtgagaaatttgctgctaactggaggtctcttctgtggcccactatttctcaccttctgcttcctaaacaccgttgcaatcgcatacagtgcaactgccgctcttccctttggaaccatcatagtgatcgtcctcatatggacactagtcacttcgcctttacttgtgttgggtggtattgccggtaaaaacagcaaagctgagttccaagctccagtccgcaccactaagtatcctcgggagatcccgccactcccatggtacaggagtgctgtaccgcagatggccatggctggatttcttcctttcagtgccatctacatcgagctatattacatctttgccagtgtttggggccatcgtatctataccatttacagcatcctcttcatcgtcttcatcatcctgttgatcgtcactgcttttataacagttgcccttacttacttccaactcgctgctgaagatcatgaatggtggtggaggtaaatttttccacccacagctggttttttaattcggtttttggtat

SEQ ID NO: 162369 - DNA, 391 bp, Arabidopsis thaliana landsberg
tcttcttcttctttttctttttcttcctcttcttcttcaatcaacatctttttaactttcagggttcatcaatctttgaactacaagcagaagataaaaaaaaaccaaatcaaatctaaatccggtcaaaaaaccggagaaaaaaccggctaaagacgccggagaaaagcccgacgaaacaagaaagagggtatcttgctctcgggagataagccagccaccatcgctaaaagtagccggtcgatgccggaagctgagccagccaacgcttctaaggaagccagcgatgccggagtagaagccgaccaaacactgttgataaagccagtcattgccggccaaaaaagctgaaactctctgaaagatgaggagagagaagagagagaaaacc

SEQ ID NO: 162370 - DNA, 387 bp, Arabidopsis thaliana landsberg
aaattttaacttttactatttaaacattaaattaaatcctaatatctctaagaattatattaagagcccaccaatgtggatgctctaaacataagctctcttcatggttttcacttatgggtttttctcgtttctctccttacattggtttaaaacatttgggcatctcaatctcgcccaaatcatcaaactcaggtttcgatttctcttatctttatttcattttttctggattttgtaaaaagttgttcaatttttatagtttagtggtttgtttgctgacaagaagagaagatgtaagagtatggtgattagtgcgtctctgtttggtgttggagcacctgaggctttggttattggcaggtgttgttgctttgttagtctttg

SEQ ID NO: 162371 - DNA, 799 bp, Arabidopsis thaliana landsberg
atgattcagaacggtgaaggagccaggtaaatacactacgcttcttttattttagtgttcagagttgctctatttgaaatgattgcctaaaatttcagctttttattacatgcagctatgattttgcatttgtcgatgctgataagaggatgtatcaggactacttcgaattgcttcttcaacttgtaagatgaataatgctagtctctttccatagttggccaagttagctttagcggttatctctgttgacgcaggtcagagttggtggagtcattgtgatggataatgttctttggcatggacgagtttcggatcctatggtatgcaacttacacaaacacagccatgctcttaaagcttctcgaatgagaggaaagaccataatctcatatcgataaattcaacaggtgaatgatgcgaagaccatcagcattaggaatttcaacaaaaagttaatggatgataaacgtgtaagcattagtatggtaagtttattttctcgattctatcactttgttctcctaagtccacaacacaacaagctcttccaaactctcgcttgagtttatcacattttttggcgcgtcaggtaccgatcggcgatggcatgacgatatgccgcaagagatagtcatcaggaaaaaccaattgggtcacagtgaacctgatccaagagagaagtcttttaaacatgaaaggatctccatgaagccaagatatacatgtttcaggatagggaatcatttcttttgttctgaatccattctcacaaacacttcgaagactcatctacttg

SEQ ID NO: 162372 - DNA, 754 bp, Arabidopsis thaliana landsberg; identical to SEQ ID NO: 48124

SEQ ID NO: 162373 - DNA, 816 bp, Arabidopsis thaliana landsberg
atgtggacggctgagatggagcgtctcttcagcgcaccgcatctgacagtccagatcggacgcggagaagagatctctacaatctcgaaaatcatggtgatgatggctttaaataacttcccacctcttcacttgacgtcacgtcaactcaagcgactcttaaggtaaattctgtccacctttattatctactgcgttttgtctttagagatacaaaaatttcatctttttctgctatctccatcgtttgtctgctactctcgtgtttctcgatctgccctctttgctcttttctttcatctctctcgtctttctctatccaaaccaaaagatgagcgccttcgaggattcccagaacaaaagcaaccacaggtacggcgacgatgagagttcgtcccagaccaggtcgacggggtcactgccgcaagtacaaaggcgcgtcataaccctagacagaatgggtccaattcgtccgccgtctatcagagccgacaaaccgaagaagaaaaaggctgccaagcaaaaaggaggcacgccgatgacaaacagcgacctggtcgacctccggaggagatgccaggttccggtaggggtaactatgatactcccaaggccgccactgcatcgtgagaacgtgccggtcgggtgagtgtgcgcttatgccaatttctttgagaaatgtggcctttttttcccgtttccggtgtgtatcctcgagatgctctactgtctcggcctcgcctttccccagatatgcccgaactttgtccgccatgtattggcgttattcacccggctcgggaagtagacagagaa

SEQ ID NO: 162374 - DNA, 470 bp, Arabidopsis thaliana landsberg
  unsure (1)..(470): unsure at all n locations
tccgatctcatcaaaatcaccgatctcaagctcgttcctttcggtaacgctcatgtctccaatacnnnnnnnnnnnnnnnnnnnnntagtttaaaattttctcccttttaattaataaatcactttgccttaagtgaactaagttttgtaattttgtaaagcatggtgaatagtaatgccagctcaacgctcttgaagctagggtaataagagctttgcccgatccggtatagaaaaaattcaactatcttctatatttaactaattttgtatgtgcgggtttgttataagcttaatatgaaaaatggtatggttttggaactcagaaattgcagtacaagttcatacgctgcgttgaaaagaatacgaatgagtgggaatcatgtgttcaaaattctgaacgtgagaaaaccatcagtgattgttacaatggcgatctctctaaaaaggtaggtctatatccagaatat

SEQ ID NO: 162375 - DNA, 600 bp, Arabidopsis thaliana landsberg
  unsure (1)..(600): unsure at all n locations
cacattttgtcttttggcaaaagagagatagaaaatgggatcccgttttgtttgtaacgaacaaaaaccacacgcagtttgcgtgccttacccagctcaaggccacattaaccctatgatgaaagtggctaaactcctccacatcaaaggcttccacgtcaccttcgtcaacaccgtctacaaccacaaccgtctactccgatcccgtggggccaacgcactcgatggactttcttccttccagttcgagtcaatacctgacggtcttccggagactggcgtggacgccacgcaggacatccctgccctttccgagtccacaacgaaaaactgtctcgttccgttcaagaagcttctccagcggattgtcatgagagaggatgtccctccggtgagctgtattgtatcagatggttcgatgagctttactcttgacgttgcggaagagcttggtgttccggagattcatttttggaccactagtgcttgtggcttcatggcttatctacactttnnnnnnnnnnnnnnnnnnnntatatgtccagtaaaaggtacgttttcttgcatttattattgaattaatcgacgttataaaataaa

SEQ ID NO: 162376 - DNA, 1472 bp, Arabidopsis thaliana landsberg
ttagaatcctttcttctttgttacagccatggtttcaacctccaagatcaagtccgttgatttctacaggtgggaaccctctttcgtgtaacaattccaatgataattctctcgataatggtttttgacgcacttgcaaaagtttgtacctttctatacattttcgactgtatgtgtttgattttgcctttttgataattcgaaattggttctgtcttctcgtttttcatcttgatgatgaactgtgcatcggattacggataattactctgtgaattgtgtgtttgtgttgtctggagttagagctgagagtaatttgagttccatttgtttcttcaggaaaatcccaagagatttgactgaagcatctctctctggtgctggattatccattgtagctgcccttgctatgttgtttttgtttggaatggtagtaaactaatctctgccctgttttcttcttcttcttcttcacaatctcatattttctgattcttgtatcttttgcttcttcctctgtgtaagtgaaaaataccgtatatccaatgattttggttgattatttaactttcaggagctgagtagttatttggctattaacactagcacatctgtaatagttgacaaaagctctgatggggacttcttaaacattgattttaacatcaggtaaatggaattcatgtgttagtattggttataataaacaatgccaacatgccattgttcttttcttttgtctgtttgtgtttcaatctctctacaatagtggcggtgtcttcataaattgatgtttggttttgacttatttcttgtagctttcctgccctctcatgtgaattcgcatcagttgacgtgagtgacgtgtttggaactgtaagtttcggtttccaattctaagtatttctgtttctaagatcccattttgcactgcgtgcatacattgtctcttagctgttttataaacacaaaaggaaagaaaaaaaagcaaaagttttgacattatttattgttacagcaaatgtatgttataagttctcatgctaggatgtttaacttttgttgtgcaatgacaatgattatgtcatttcctatgtttaagttttgttataaacttcttcagcacaggttaaatatatcgaaaacgattagaaaagttccaattgatccgcatttaagagccactgctgaggaatttcactccacctctgatttacatctcatcaaccatggagacgaagatcatggtgacaatagtacttatgcggatatacccttaactggtgctgcttttgagaagtttacacatcagtaagttggcaacttaatctattttgtgtatactatactatatatgagtacctgtccaaggggcttaaagatgaattaatgaaattggactttcttgatgcagttttcaaattttggttgttaatttttatgcgccatggtgctactggagtaatcgcctg

SEQ ID NO: 162377 - DNA, 4702 bp, Arabidopsis thaliana landsberg
ctatgtagattacttaaaaatacccaaaaatatctacaaaatccgagtttatattctgatttttgggttatgcaatttagaacttgttcgagtaatttaaaacttcttagcccaaaaatatattaggtcaggactggttctaggaactttaactgtccaaacaaagtctatttatcataccaatgaacgagaacttacatagttgcattaccatgtctacatgtgagaaagacaatgccaaaattcatagttgaagttgtatcccacatggatgctcaattaacaactaactaattgcatcaccaaattgcatcatatactattatttaggaagtacataataaaaggtaaccttgccttttgtaaaatattactagttttgttttaaaaaaaacattctatttactatgtaatacgggtcaaaaaattagatttgagtagtatatttctagttgactaaaaagcgtgaagcaaactctcccaggcacgactatcgaggagtttccgtctttcaagtttttcgacgccggtggcggggctcttggtcgccagcgttgggatcccaccaccaagagcttgctctacttctgttctcaaccttttctttcctattacttaagtttttttcaatttttttctccgttgttgcaatcctttaaaatcttattgatctcaaccctcctcagcggctatgcttcagtgaccttcaaagagtggaaggagactccggtgaacctcctccctccgactagttccgcaacatccaaacagaagcacccaaaaaccagtgatttacaaaaattagatctagaatccactgaaccaaaaccttctcgagccaaatctcttatcccccatgaagatcactcaccctgggcttcgttgctggcaggagtaatccctcttggattggcagatgcgccaaggggagacgtcgtcggcgcaagacgactctcttcttagggtattttctattttccctggtgctaataagacttcttgtttgctcaactatacatcagaccatgctattcttgtgctcccactgcatctacaatctccaatgaggtcgatccctgcgcaaaaccatcaatttcccgaccagccgccatgagctcaaaacgctggtccccattgcaagattagggtttccccgagtggaacctgaggaccatcctttcatccactgtgttgtttgtggaagaattgtcaacaatctttgatttcacctgtaccaaattactttcaagtgtttggctcaaagctctcaaggaaccattgttgatgtactctatctatttggttgcttatctctttgtggcattggagaatacctagctttgttgtattttaaactttgggatcttagtgtgcttctatccttgtacttgtttttttcttatatgaatgaaatcaagctttcgtcccaaaatattataaaagagtagtatatttcttttaaatataaattagtttaaccaaaagtccgactaagtaatgaatcagaatttgaatatttatatattttttaaatgtatatttttatatacttcaataattttttaaaattttttagtttggagcatttaaaattatgtttacctgttatttttaaagaacatcatcaatatttaatagatcaaaaagttaaaaattataaatataatatttttttaaaataaacggatatattcaaaatatttataatatggggccggttaaatataatgtattatatgatgaatgagttatgatcgttataattatttgaatatttgtatttaattttatacaattcttctttagacgttacaaggtataagaggatctttatctcccaagttttatttttttggtaaggtatttctcaggttctttatgactaatgaaaaagagaagtgacaaggtattagagattttaaatcttcaagaatttaaccgacaaatataagtcttcgatcgttgcttacaaaaactgtcaatttttttaaagagtttcagattcctaaattgaaagaatgaatttcctgttcagacattttctggttttgttttttccatacatagtttttcttttttttgtttcaactcatgatattattttttaaatttaatcaaaactgattatttcaactttgggactaattcatttgcaactgctatatttatgtcatactaacagacaattcaattttaatacaactcaaattatcctatatacactaaaatccttatctccttctttattatgagacatgtattaaaacaaagcaaaaataataccacatttaatccaactaaaaatatcaatttgaaaatgatatgacataaattctcaaaattttatactctaatattgtttacttcaaacataaatatttacaattttatttaatggaaaaaaaattatattcgtgttgtaacatggattatgatcttttaaataaagttttacgtaatcatacatgctcacattcaaccaaaaaaaaatgaaaactagtttccaaaggtttattgtttgttactaatatgcttatgtccttttatgtttttacacagaaacaatagtttgtatattgactacgcaacaattcaaatactattttgttaacaatttagaaaacctaaattaaccactgaacaatcaatttcatctccataatgattattaatagttaagcattagggcggatcatctcttctagacacaattttttctttctcgcccgtttcccttcaaaagctctctcatctggttacatgtttcttgtatcctgctgtttcgtctcttttccctccccttttatccaaaaagcttcattaccgcaccaccttcgaacatgctcttctatggtgatagctctaatcttcccttgttaaggattctcgtgggttatccctttcctcggcttttcttgaagtcaagatcagcacctccttgttcctcaatggatgggagctctgcctcgacacgggagctgtggatgcgtcaaaccatggaagaatcatgttcaacagaccgaacctcatctctcgcaccccttgtttgggtagactagtctcagaagcccccaatgtggtcgccggaaagctcaattccgttctgccgccgccgcttttggtgaggaacagaagaagtgtctggctaaccctaatggtgctccggtttgggcctagcccatgtctcatttgccctccctcaagccctttacccaaagctttgaagcccatggagatttctgctgacttaagcccatatcttctaaggccaaggtttggttttatttcccttttgcacagcccaatctttttgaaactgtcatcgtttagggattgtagtggacgctctcatgtgatggtgatgatggatttagcttggtttagttgctacatttcacaaaacctggtggctagttcttatcgttcggtccgcttgtttctttgttggagtctgattttgcatcgtttggagggtagttcctctttggaatcctagagagttgctgcccatgtcaattatcgctgatctcctgtcaagtttcctcccttcagcaccatctatctctgttttggctggttatggacgccacgcaaacagagtaatgatttaccttgactggaatgataggtacttttgtcgagatcagttactaagcttactatggaccctatccgagactcgcttacccaatcgtagtttgtcgtcctttagagttaagactaccggcatctacggagtaggtgttaacgaagctcttttaactctcaatctacctattctccaattatctagttcagtcatgttttaatctattgcttggataatttgcaaccctctgtttgtttaggaaagtacggcgaccatgtcttcgagaggtggttaccgtccctttttcaaccgcgctaaccagatagccacctccgtggagcaccttttcaaaagctcggatgcattgtttgcaagagccgcttatgaccacttagtggtcgaggatttcgtgaagcccgccttcatggtcgaatccaccaaggcctcaacagatttttcaaaccttgtaaacttttttaaaagtgaacatccctttgcaaaactcataaagccactatctttatttccttgtattatcttagattcaagttttttgaatttccctcttttgaggattaagtgaatggaaaattattgtttaagaaaaaaaaaaaataagatgaggacccaaaagctcatagttcgtcttctgtaacatgctgcatttttcaggcaaagcaatccgactaaaatcaaggagatgtggaggggagaagcttccgcctgataccaacggtaagagctccacatgcggtgtagcgatgcagagtagaaaagggagatctacggcgaagaacgagagagacaagtagatagatctgagaccgaaaattgtggcggttccacgagatctttgtcgatgggggaggtatatttgatccggcaaagcgaagccaacgtcgaaggtctctgttttctattccctactattttctctctttcatgactgagcaaggatctcttcaacaaaaacgagatcggctctcttcctcctcaaaacaactctacagtggcggcatggcaacaaattttggatcaccatctcgtttggctgtcctatttcagcgagaatctgcagttttggacggcggctcgatcatgttttttgattga

SEQ ID NO: 162378 - DNA, 586 bp, Arabidopsis thaliana landsberg
aaaaaaacttatacacaatctggtgtggtctacttgttttgcaacagtgacaatatttccaacaaaactcttaccattacacccatcaatgtgaattgctgaaatgacttttgagttatggctatggctttctacttattatctcagctgcagctgttggtgtttcgctaccttactttattgaacaactcttctgccacaaaattcaagtatgtgttagctccctaaagctgcctccttttcgcttgaatttgtcagagtatccaagttttaatcatgattgaaagttctgaggtaggtttagaaaatacgaagctgctcaatacatgactctaaagcttggttatcttggtttgaactaggattaacattgttttggtttcctcaaatgatgttataatgtagttgcatttgtgaatgtaactgtgtgaaatgtcattttactgaattgtgtttgtctcttttttcttgttattctatagggatggctagaaagatatcctgatcaagcagccgtatacaaagctgctggtgaagggaattggcttcaccaatttcgattaggaagcttaatccgaaaatctcc

SEQ ID NO: 162379 - DNA, 3047 bp, Arabidopsis thaliana landsberg; identical to SEQ ID NO: 5765

SEQ ID NO: 162380 - DNA, 582 bp, Arabidopsis thaliana landsberg
cgaagtggataggcttgatcaactgaaatctagcagaatgaagggaattggatttaaaaaggcattcaaagtttgtggagatatatgctcgtgctcacatagaaataaaaccagaggttgttcgtgagaggatcatgtcgttgattgatgctgggaatactgaacctactgagttactggctgacatggatagccagatcgcaaaggccaaggaagaagcctttagtagaaaagaaattttagaccgtgtagagaaatggatgtcagcttgtgaggaagagagctggctcgaagattacaatcgagtatgctaacattggctatgttaataaacacattacttattaagcatagagttcaattgatgattcttttgggttttttgttctggaaaaacaggatcagaacaggtatagtgcaagccgaggtgcgcatttgaatctcaagagagctgagaaagctcggattctggtcagcaagattactggtaagaacttccaaaagtctctcttagttattactacacatagaattaaactgagactgaagaatatatcatactttgtttgtgcaagctatggt

SEQ ID NO: 162381 - DNA, 662 bp, Arabidopsis thaliana landsberg
atattgttaaaaagatcaactattgtcaatttagtttttgttcgatcggttctaaatctaatgtttccaatttaatatgtgcaggtcggcttaaccggtgttttagaagtgaaaccggtagaatatattcacacatccgaaatcaaactaggggaagacatacacgggacaattgtcgccgacaacaccgtcggtgttaaccacgaccatttcgtgacattccgtcttgatcttgacatcgacggtaccgaaaattcctttgttcgtaacgaacttgtgaccacgaggtctccaaaatctgttaacacaccgagaaaaacctactggacaacgaagccaaagacggccaagaccgaggcagaggctcgggtgaaactaggtttgaaggcggaggagttagttgtggttaaccctaaccgaaagacgaagcatggcaatgaggttggataccgtttacttcatggatccgctgcaggcccactcctggcccaagatgatttcccgcagattcgagctgcattcaccaactataacgtgtggatcacgccgtataacaggtcagaggtttgggcaggtggtttgtacgctgacaggagccaaggcgacgatacgttggcagtgtggtctcaaaggtactttatatttctgataaaatttgacta

SEQ ID NO: 162382 - DNA, 597 bp, Arabidopsis thaliana landsberg; identical to SEQ ID NO: 54685
  unsure (1)..(597): unsure at all n locations

SEQ ID NO: 162383 - DNA, 343 bp, Arabidopsis thaliana landsberg
ttgattttttttcctttatcaagaaaatttttcgtagaagatcgtcaggttccgctcgatgctacctctgatccacctgctctgttcgacggaaccacaaggttgtacataagctacacttgcccatttgcacaacgtgtttggattacaagaaacctcaaggtacttgttttttatatatttatggtatatatgtaaattgagatcgagatgaaaaatttataagcaagatttgttgatttgtttgacattggggagttttagggtctgcaagatgagatcaaattggttcctatagatcttcctaataggccagcttggttaaaggagaaagttaatcctg

SEQ ID NO: 162384 - DNA, 919 bp, Arabidopsis thaliana landsberg
  unsure (1)..(919): unsure at all n locations
attctgagattttaaagaggatgataccccaaagattttgctcgtaaaggtcgctgatcattatagtagaagaacaaatcaaactttagaagaaagagaatcaagtcccatcattcatttaaaaaaacttaacaattgggttagttacttacttagttaatgactgatctttatctcttctaatggaaatttgtaatagcaaaaggagttatgtattcatatctttgattagtttttatattcagattaaaagtgtgttgacaagtttctaggatctcttgcttcaacccaatatctttctctgtgttctgtcacttcagaggtacaaacttttttggttgttagtcatgaatctagccttttctatttgaattcttactctctatgttttgcagaatccggatccgtatcctcctactgggacttccttagtctatcttgaccatctggagctatgtttatgttctacggagtggtggaacttacttacctgtatactcgatgatgctccaaaacttcgagttctcaagctcaaattggtatatggttcctccctagatttctctgctgccttttttgtatcatgtttccactttctccaaggcctattgacactgacagaatgtatattttctttgttctgtagtatcgaaaacattgtgtcgagtacaacgagtcgatggaaccatgnnnnnnnnnnnnnnnnnnnnncatatgtttatcatcatatcttgagatatttgagtggaggcaatacaatggtgaagagcaagagagagaagttgcaaagtacattctagaaaacgcgagtcgtctaaagaaggcgatattctacttagaatctgcagaaaagcatgggatattgaaggagttagaatgtatggccagaggttcaaagaaatgccagcttgtgtttgat

SEQ ID NO: 162385 - DNA, 676 bp, Arabidopsis thaliana landsberg; identical to SEQ ID NO: 19890

SEQ ID NO: 162386 - DNA, 2647 bp, Arabidopsis thaliana landsberg; identical to SEQ ID NO: 38126

SEQ ID NO: 162387 - DNA, 515 bp, Arabidopsis thaliana landsberg; identical to SEQ ID NO: 14346

SEQ ID NO: 162388 - DNA, 7162 bp, Arabidopsis thaliana landsberg
taagttgccatttccaggccgtgagagagattcagaagcagaaagagtatgcacgttttgatgagatcatgaaacagttgtatgttagactccctttcttatagttggttctccatgttccaagctacagaagttacttgaaggatattttgtctaacaagaggagcattgaggaaagagttaaactgatttccaaaggagaagagtacgctcagctggtcgagtctcagagacgacagaaagaagctcagctcactgatgtagtagaggtgttagcagggaaagagatggtcagcacttttagtgccatccctccagctactattcccgagaaactcggtgatacagggagttttgttttacattgtcggattggaaagtctgtgtttgagagatgtctttgtgatttgggagttggagttaatttgatgcctctttctttgtcaaagcgcctaggcatcacaagtttcaaaccttcaaggatctctttgattctagcggatcgctctatgcgatttctagtgtgtttggcggagaatgtgcatgtcagagttggaaaattttacgttcccattgattttgttgtcttggaacttgataaggaaccacatgatcctctcattctaggtaggccattcttaaatacaacaggatatataattgatgtgagaagaagcatgatcaaccttcaggttgggaactatgctttggagtttgacatgagaaagatgaggaaaaatcccaccattgaaggtcaaccattctctatagacacaaatgatgaggctaatgctgaatgtgtaaaggattacattgacttgagtgatgttgaggaagtcctgaatagagacacaaaagatcctcatgtgactttgataccactacagcgtgtaggagacaccatcgagtataaggtgtagtgtaaaggaacctcaaaacctttttccaaagctagaagcattctcactttggagtggaaagaaaaatgtaggaaatctgtaaaaagagtggtttgtaaggttctaaggatgaagttgacttattggtgaccttgtttcggaacaagttcccgcactcgtgcccattgattctcaagaatccggtcaagctagtgatattaaacaagcacttggtgggaggcaacccactgttggtattggatcccgcaccggaagtccgggaccaactaaaaattgacatatggataggaaagaggcccacaaaagcgtggcccacatgcttctttagtcgaggataagaacgctggcaaagtggtcataccgcaaggtaaaagtaaaatcgagatcagaagtagctggtttaaaaggccgctgggatgaaaaggggaagcccatgatgctcaaagttaattcaaattcgaacgtttgaactgtaaattcaaagactgaaacggatacatttaagagataataattatgagtaaatgagaattaagtatgattcttaggtataagtaatagggccaagggccataaaagggacacgcatttttgtacaacttactatacacattttcttaccaaatttatagcttttccatagttgataattcttaatacatatttttgtcctcaagaataatccttctcacaaaatatataaatacttgagtgtctgaatccgacatccatattttggcgccgcctgtgtggacggaggattcttgaattgttagattttctataccgcgatttcaagataaccagcaatggccggagaagactccatcaacgcatcgttagccgaaactctcaaaaccatgcaacaacccatgtcagaaataacgcaaaaattcttggatgtggaaaaggctgttgaaacactgcaagcaaaccaggtatctcttagtcagaatgtcaatactatacaatctcgtgttcgttctatgaatgtaagaaaccccgtcggagtttggaggactattttcaattcgccaagctcccttgtgcgaaatggaatcagtggataaacaactccagatgccgctaacgcagtggttcaaccggaagattgggaaacacagctcgtaggcgaagatcagttcgcagatcagcacgagcaagaaaacctcgaccagctcgtgaccatgaggaaggtgaggcgggaaatgaaggaaatgaggtcgaagttccatcaggccacgagttcagagctggatatcaaccgggtcatcgaaaaagctaggcgaccacccttcatcccgcaaatcgcgagtttgagaatcagggattctcggaagcttaatctagaactgtacaatggtttggaggatccaaaaagttatctcgcagcttttctaattgttgcaggacgggttgacttggatgaagccgaaaaaaatgcgagatacttcaaactcttttctgaaaatctgagcagacaagcgctaatgtggtttacctagttggaaacagggtcaatcagtaacttcaaagaattgtcaaccatgttcttgaaacagtattccattcttatggataaaagcatttcagacaccgatctttttcacaagggtcgaatgaatcacttcggacttttatcactaagttcaagaatgtactttcgaagctcccaaggatttcgcaacacttagttttgtcagccttacggaaaggtttgtggcacgattcaagattcaaagaggatttaatacttctcaagccggacacaattcaagatgtgcttttccaagcaaacaactagatggaagtagaagatggaaaaaaaagctttgcgaaaaggaataagccaacaaaaccggcggtcaccttccctaccaagaaattcgaaccctcaaaaaatcaaggaccaaggaagttcggatcacaacctttcaacaataacgtcgagaaatagttccaaggaaagggaaaatcaaacacttgggtcagagaagaaagtttatactgcgactatagtgtctttaaaacgcaactcgtgtaactatgggccagcggagacctttccaaattcaacatagattatttcatgaagaaatatcacgaagcaagggataactccaaagttcaaaacaaaaggccgaggtacgtgcgctttggtagtctttctctgtaagccattctacgtgcatttcaccacttggacggccgacgtgcataaatatgttaggtactccagggacatgatatacaggaacttctccttcatcgaatcttgttaacctgattcatgtaattgattttaattctgaagtatagattgcgaatcgtaaaataaatagttatatttaccttgattttgtttgtatatgatcgtcaaagtagtgctttgaaaaataagcaatctcgtcattgatatatgactcaacaattgagcctgccacatatcttttgttctttgcttttcctttcaattttttgaaaaacctctcaaatggatacatccacctatattggacagggccacccaattcagctttgtatgggagatggataggtagatgttccataacatcgaaaaatgatggtggaaagatcttttccaagttacagatgattaaaactatgttctgtttgagaatttgaacgcgacttgtctgtaaagttctcgaacataggtcccggaaaaatgctccaattcctaaaatatatgtggaagttaaataattacataaaaaaaattcttccataaaaaatagttagaattgtacatgataatgcaaggtggacattccggtcaagaagttcagcaaagataaatggaagtagtcgctccataaaaagatgacaatcatgactcttcatgcctgaaaacttaccattctccaaatctacacaactagccaaatctgaagaataaccatctggaaatctaacatcatgtttcacacattgaaataaactctgtttggcttcgtctgttaatgaatacgctggaaaaggagctttaccattactatcaatatgtaagccctggccgtgaacaaaatttctcaatatccattcttgacatgatattgtcttttgatttacccttaacacgcaagagagtgttcatgatgttgtcaagaaaattcttctttgtatgcataacatcaatattatgtcgaagattgaggtccttccagtaagacaactcccacaatatgctttctttgtgccaattatgttccttcccatagcctcgcatcttcttttcatgaccgttcccaccaacatccttccttttgggtgaatttacactagccaaccactcgtaataaacttgctcccctgtcaaagattcgggtggatactcgctagaagcgtctcttcctttgagaaagtcttttttgttcctacgagatggatgaccatgaggaagaaatctacggtgataatcaaaccaacatgtcttccgtccattgggtagataaaaagactttgtactttccatgcaaactggacaagacaatttaccatgagtagtccatcctgataacatgctatacgccggaaagtcgctaatcgtccagagtggtactgcttttagattaaaattttgactcaatgaaacatcgtacgcatcgactccagtacaccacaactcttttagctcctcaataagaggttggaggaagacatcaagactagctcgaggatgatttggtccagaattcagaatggtaagaaataagtactctgtattcatgcacataccaggggtaaattatatggagttaggatcacaggccacaacgaatgattacgagacatgccaaatggattgaacccatcagtacacaacccgagataaacgttacggggttcttcagcaaaccggggatgtaactcttgaaaatatctccactctgccgcatctgaaggatgattcatttctccctcctttgattggtgctcagcatgccatcgcatagccgcagctgtcttatgactctgatacattctcttcaaccggtctgcaataggtagataccacatacgactatatggtactttggttcttcgacggtcgtccttaggcttccatctttgtgcaccacaaaatcgacattgatcttctttttcgtcttctttccaaaataacatacatttgtttttgcaaacatcaatcgtatgatatggaagtcctaaattgcgcatcaacttctcggtctggtaatgtgaagtggtagcctggtttccttctggtaaaaaatctgtaaacatctcgcaaacggagtccaccaacttttcactcatattatactccgctttgttgtgcatgagtcgagatgctaatgataactgcgactgcccttctcgacaaccatcgtacaatggattatttgcaccttctaacaagtcgtagaacttatttgaatggttacggaccggctcttccacattctgataactaccatcatgatgatagttatcatcatgacccacgttatcatcataccccacgttaaaattaaatgcatcgttcaccatatccacatatggatcttctacaacattacccacttcttcatgattctcactaaaatacgtcctatccatgtaactagttccgatatccatattcaattcttctccatgcttataccaaacataataatcaggcataaatccttgactaaacaaatgactactaactcttctacccgagatgatgtgtttttcattcttgcatacactacaaggacaatgaaatttacctcgacaactctgtactataggctgactattaacgaatgtcatgaattcctcaactcctgcgacgtattcggctgacaaattccccgtcacttcatcgaatctcttgtacatccaatctcgatagaaaccgccactaccgccataattgtagtttcccgccattatagaataaactaaatttctatttttttcttttttttttcttttgattgttgttttgatttgtttgcgaaagaagattgtcgtgaattttgattatatagacgaatttttatgactaatttacgactacaacaaacaaattaggtgtaccaacttggcaatgcggaaaacgttttccaacaacttaatgcgactattctgcgactcagttgcgactattttacgattacagatatgtgtcgtatgttagtcgccgattgggcgactaacaaccgcagtcggaaaatgtagtcgtccatttgcgactatgtaacgacaaacgtttttcttctataatataatcgttaaatagtcgttactatacgagtatatgccgactaacatatttagtcgtaaaataacgactaattgactactaatgttcatgttgtcgtatatgcgtcgtaaaacggtcgtgacgtagtcgccaaaaacgacgactacatctgttgtcgctttctgtagtcgttgtttgtctgttttcttgtagtgtgattgttgttgagggtcgttggcagacacaagaagaaactgcgttggttaatggactaccacttggaccaaaggcagtaaaagtatttgtggattcagtgcttcaacaagaaacattcatatggaggccaacaatggatatgacctatcttgaggactgtttgatggcttttgtttcatggcctgtcaataaagtttgctttgagaatccatcttctagacagcattctgcatcaacagatattgggacaaaatctgcagagacaagtgctaaagcagcgtcaactgcctcttaagcctcaggatcaggttctgaatcacctattgagactgcaacacgcccaagctctctccagttaagaaaattatatcagattcacagtctcctatccggaaatcacagtaagtactctattttattttgttctggttatttttgtcaaatcttttgacttttgttttatgttgtaacatggcagcgtatcatgcaaaatggttcaaaggaaaataagaagtgcatgttgatagacattaccgacaagaatcaagttgttgttgaaggccgatgggcaacaaatgatccaaaccagaaggttcactttgtttctttgggttctaatgcagttaaagtgtgggtagacattgtcaaagttagcgatgcagaagtttggaggaaatcagatgaaatagagattatggaagatgcccttagctcctgtattgcttagctagagaacaaggtcattatgtcttaaactgatggttttcttgtgtaatgctaagta

SEQ ID NO: 162389 - DNA, 219 bp, Arabidopsis thaliana landsberg
  unsure (1)..(219): unsure at all n locations
ctggctaacaatgnnnnnnnnnnnnnnnnnnnnnnnnnnnnnnnnnnnnnnnnnnnnnnnnnnnnnnctaatgctgctgatcctggtccggatagcgaagaatcaagcgatgtgcgcacgaatgaacctaactatggagcggtaacttcacctgatctgtacatgcatcaacactntgtatatccacctagacgagcatgagaatataccacatgctga

SEQ ID NO: 162390 - DNA, 614 bp, Arabidopsis thaliana landsberg
  unsure (1)..(614): unsure at all n locations
aagtacgccaaaaactcagatacaggatgtgatcgcatatttcaatacacaacttcacaatcttgcaacaaagatagatttgtatattcttgaacgtaaatgcacataaccttaaggcagaagagactactatctgtatgtaatatgaattgttttggggcaaaatctgtaatatgaattttattcgttctgtagactcctagtaagtgacattgacacgtgtgaggctagaaaatgattagccacaaatcacaaaagaagttaagaggcatgcgcatcagccacaaaaatcggttagtctcgtccacggctttagactttagtgtttccaggggaaagattggctgtcgtgaaaaaaggtcttcttgccgggagagttcctggtctgtccgaacctgatgatgaaggttcgtttcactctgttcttgattcctcttcttattgtcttgctctgtattttcatttgtatctataaatcatcctgtacgcaaaacaaatgggttcttaaatcctagcccaaatcatgccaaacaccctaaggcccggatataaatgggcctnnnnnnnnnnnnnnnnnnntgaagaccacaccaaattgcgcagcaaagcaagtt

SEQ ID NO: 162391 - DNA, 744 bp, Arabidopsis thaliana landsberg
atgagccatgttcctggattcattgggaaagcagaggagctgaagtcaaagggtattgatgagatcatttgctttagtggtaagtatgaattgatatgtttttgatctctcctccgttttggcctctatgagtttttgtatacttaggccatgaatgtttgcatcttttgttgcagtgaatgatccatttgtgatgaaggcatggggaaaaacatatccagagaacaagcatgtgaagtttgtagcagatgggtctggagaatacacgcatcttcttggacttgagcttgaccttaaggacaagggtcttggtattaggtcaaggagattcgctttgttgcttgataaccttaaggtgactgtagccaatgttgaatctggtggcgagttcacggtttccagcgcagaggatattctcaaggctctttaagaaactttatcgttccgcttgttgtattgtgaatctaaactgctgtatgtgaagaagagatttctatagcttgatttcgatcaacaagcatgtgtttgacttgcttggcataataaagtatttgataaacgttcaataacaatggcttaaaatgagtttcaagcgtatataatccataataactggatcaaatagatatacaaacacataaactgataaacgcaaagtcctcacaagtacctcttcatttccacacaaaggcaacacacttgcttagcacacaccattcatcttcttcctctccttcacaaact

SEQ ID NO: 162392 - DNA, 572 bp, Arabidopsis thaliana landsberg
atgtgcttatactccggggatgaatgctttcatgacctgaagttcgttaaagcagcagcaccaacggttagtatatacacttacgattgaaaaacttaggtacaactcgaatctagtataactattttttcattttgttgcaggtcttgaaatcaataacatcagaagacaacaaattacaggaagtgatggtgggattagcagcacaagtgtttagattcatgagctcaaaagaatcaagctatgttttcatggattcaggcatcaagagacaagaactggcaaactcgttagtctcaattctgaaaaagaacgacaagcccgcgattaaggttccaagaatcaggaggtttgtaattgagcttgcgatttggatgatggaagatgatgagttggaggataatgtagcattgtttagagagatgggtctagagaaagagcttgagaaggttctagaaactacggctgagcttgagaactttgatgttttctccggtactgttggactaagccgtcatatcataactgtccattcactagcagagctagccttggaaattcttagaggataa

SEQ ID NO: 162393 - DNA, 1057 bp, Arabidopsis thaliana landsberg
acaaactgcaagcaagactatggtcggatggtggaataaaagcgttgttaggaatggttagatgcggacatccagatgttcttgctcaggtggctcgcggaattgcaaactttgccaagtgcgagtcccgagcaaccactcaaggtaatgctcttttccagtattccttcaaggtcattcagcctttagagagagagagagattggtttttcttgcgtgggtttataatgtgaagagtgtatgaaggtgtgaagagtggaagatcactactaatagaagacggagctcttccgtggattgtacaacatgcgaacgatgaagctgcgccaatcaggcgacacatagagctggctttatgccatttggcccagcatggttagtgcgatccttgtctttgtctttgtggtctttttgatccttgttgtggttcatcatgttcatttgattgtttggtgggggcagaggtgaatgcaaaggagatgataagcggaggagcattgtgggagttggtgagaatatcaaaggaatgttcaagagaagacattcgaagtttggctcatcgtactctctcttcaagtcccgtcttccgttctgagatccgtcgcctcggcatccagttttgacttgttttatgttttgtatcatataatcatcatctctctcaacgagattcacacatcatcaccatctgtattctattttattcattttatagtaactatttcatttttctttgctttttcatttactcttgattataaaaagaattactagatcacgttgtgtgattcattcaacctcgaaataaaacaaagaaagattgctaagacttattatgcaacaacgtgtcaaaaacacagactgtctaatattttacaatttacatataagaaagttaaaaaaaaaatccctcgtgaacactaatctcttcccatggctaccaaacaatgtaagtaatttgtgataaaaactcaaagaagacccaaacagaattatgatgaaaatcgagggagtaaatgaagaaatcttacagagagatagatagatatttagcagc

SEQ ID NO: 162394 - DNA, 611 bp, Arabidopsis thaliana landsberg
cttctttggatattcccttctaggtggctatatatcctggtaatgtcctaacgctgcaaatgtcgaaaccaactcagtttcgttacaaaagcggacaatacatgttcgtccaatgtcctgcggtttcgccattcgagtggtaagaattattcataacagtttttgataccaaccaaatcatctgtcttactgatttgtatttcgttttaggcatccattctcaattacttccgcacctgaagatgattatatcagcattcacattagacaacttggtgattggacagaagggattaagaaggcattctcagtggtatgtcatgcccctgaagctggaaaaagcggacttctcagagcagatgtaccaaaccaaagaaggtgcataaaattctttaaaattcaatatattattctcagaatgtgaattttgatactctctcttgtaatatagttttccagagctgttgatagatggaccttatggcgctccagcgcaagaccattggaagtatgatgtggtattactggttggccttggaatcggcgcaacacctttcgttagcattttgagagatctactcaataacattattaagcaacaggaacaagct

SEQ ID NO: 162395 - DNA, 374 bp, Arabidopsis thaliana landsberg
agccactccactaattacaagctccaaaagctttctccttctttttctctctaatctctatttcgtacggatttctctaaccggagcgatggagattgacggtggagatcgtatttccggtgaacgaccgatcattatggtcaccaacgacgacggaatagacgcgcctggccttcgttctcttgttcgtgtcctcgtctccactaacctctacgatgttcgcgtttgcgctcctgattcgtacgttttactctaatttttgtagaaatgtagctcaaatctcctttggtatacgatcgaatcgctcctatatgatggttatgtacgaattgaatttctctagatatcgatttcgagtttctggactcatttag

SEQ ID NO: 162396 - DNA, 345 bp, Arabidopsis thaliana landsberg
agtttacataggcgttgtggtaactagtaatgaggaccacaacagaacgacatgtgatatcgcatataggtgctgttcgtttgatcagttagatagtgcatctgggtgatccatccagaagatccattcagatgcatcatttggatgatgttcaatcctgaagttgatagtgcatttggatgaatcatctgaatgcacatgtgttcgtttgaattattttttaattatgtacatctgcatctgaatgcatagtgtatcaaatgactaaaaaagacatatatttatcttagtcttatttttatgatgtaaattatatttacatctattttattcttctaataatat

SEQ ID NO: 162397 - DNA, 417 bp, Arabidopsis thaliana landsberg; identical to SEQ ID NO: 83

SEQ ID NO: 162398 - DNA, 497 bp, Arabidopsis thaliana landsberg
gtgattcttcgaaaacccagcaaaaaagtcagattctttctattggaatcaacaaaggtccgatgaattcatatctcttccgcgtaatctgtatactccattcgattatcgcactcacaagtggaactctgatgatgttctacacagagaaagcttcgatctttggacatggtagtgatatagcaaacaagctcaaaggatcaacacctcacgacgagcagcttattcagatttctcagtcattctctggtttgcttctctttgctatcggattggtgcttttcatggtgtcgtttgtgaaagacagagagtttcatagcttctttgcagctggttctgtgattctctatatggttatggctttatggagagttatgtttgagtggaagaatgaagatcttgcttttgaatgtcccaagcaagcccttggagatattgctttagctgtctcatgggttttcttcctcgtttatacatggacagacaagtatgattga

SEQ ID NO: 162399 - DNA, 671 bp, Arabidopsis thaliana landsberg
atggggctttcatttgcaaagcttttcagcaggcttttcgccaagaaggagatgcgcatccttatggtgggtcttgatgctgctggtaagaccaccattttgtacaagctcaagcttggtgagattgtcaccaccatccccaccattggtcagtcctcttcttctaaacacaaataattgctacatcatctcatttcttctgctctatcatcagttgcatgattgcttatggtagcatgtactagtaataataacctctactgagtactttctgtttcctagtagcagaccatgttgaccgctgttctaaacagacttgtctgagtctgattagcatgatcatctaaggctcctatatacttgactggccttatcaatgtttctaccttgcaggatgagcttcgtgatgcagtactgcttgtgtttgccaacaaacaggatcttccaaacgcaatgaatgctgctgaaataactgataagcttggactccactctctccggcagcgtcactggtaagcatcatgatctattgtcctttgttgctttcctttgctattattagtctagctcacaaaccagagaaccaacactcttcgatagttctcttcaggtacatacagagcacgtgcgccaccaccggtgagggactctacgaaggtctggactggctc

SEQ ID NO: 162400 - DNA, 2896 bp, Arabidopsis thaliana landsberg
ggcaacaagacaaagaatttggatgagcttagtaaaagtgtacagagaattggaggagtggggctcactatacacgacgaactcgttgcacaggttagtaatatgggaagatgatttaacagtaggacgtatcagtagagatcagaaacatcaagtttttgttattgtgtgtgttcaggagagaataatagatgaattggatacggagatggacagcacaaagaaccgtcttgaatttgttcaggtaaaccccttaaaggtcttgttgctggtttgattgcagaaagtaaaaactgaaagaatgaaaatggtattgtgacagaaaaaagtgggaatggtaatgaagaaagctggagcaaaaggtcaaatgatgatgatatgtttcctgctcgtcttgttcatcatcctattcgttcttgtcttcttgacctaaagaacagagccgcgggatcttatagatgggagtttaatgtcttacattatcatgtttgtggtgaaacaaatggaatatttacataaggttgtctgttttttcttctcctatccaatcccacatataattttgaactttggctgtgtgatctctagagaacctgaaattaaatactttcatagcttgatcccatggctaagttccttaaacaatacaaatcagtctcatcaaaagtaagccgtcaaaaacttccctatagaatacacctttattatgccttctttaagtttccgcaatgtctcctttgcttcttcagttctgtaacgaaaaaaaaattccgaaagcagactccataagaaacatctaaagacaacaaaatgactccaaaaataaagaaccggcaaaaatctaacaatttgtggcaacaaacccggctactgctcaaaagaccacccttaatagttcataattgaaggcaaatgcttcaactgatcgatcatcaacgaatccaaaggactcactcactataagcatgatctccggaagaatcattgccggatataattagttgaataactgatttattgttgaatctttctgatactatcgttaaactcttatgacaacgctttttttttttttgtgtgtgcaaaatgacaacgctttagattgtaaaatgaataatgagtcattgtatcattaataagaagagatttgggctgataaggcccaacgtaagcccataaaagaatccgtcggctgggatataagggctggatcgatttcaatcgatttcaaaaaagaaaaaaacgcacaggtcagatacacacacaaggaggcgcaggagaatatgtcgacggaggatgctgtgtgttttacgggggaggaatatgcccgtcatgtgagggagtactggcgtggagtggcggaatccgatgtaattcttttatcttcttcttcttgtttagagaatttccatgattgtgatacatgttgaactgacataattattaaaccctaaccctgatcctagttcttatttcttaatagcttgtagaaactcgataggttctagtgttgtttatgggattgctaactgaatattttattgcattagggtttctctcgcttttagagattgctaactgattttttacattgctgatgtatcttaattagggttttgattccgaggatattcgaagtccagtagtgcttactggactgtttcactacgactgtcaatctggtcgtcgttatcctgaccctctcttggtcaagcgatatgctttgttggggcttcatcgtttcaatattttgcaggtaattatattttaaaactatatatatagtctcccctctctctctctctctctctctctctctctctcttggtgcttcataaacatgtcatgtaccacatccaattaattttctcttttcatctgtcaggggacaagtttcgagctcgctgccctactgaaattcaacaagacaatgaaccttacgtcttcgtactacattactcttcttgcacatgatccatcattgcagaaaacctttcaggttcgagttgatgaacgagaatatggcagtttggatttgacagtcgctattgctagacctaaaaaagatcaaaatgaaggtgacttgtgctgcattgttcttttttattttaatacaagtcaagagtataaaatcaaatctcacttgctgattaaaaatgttgcatgcatagcggcggagaccaccaaggagcccttcgtacctcacttttgttgtagtgcagtgtcagatggtgtcttccaaggtccattgcctgattggccctcagatgatgctttgcgtcatgatagaaaccgattttacgaggtaagattattattactaagacacatcatccgttttgttttgctcgtcatcatttaagtagtgataagtttttcttgcttttgcagctagagaaatcagagtggcaagccactgattggatttctctttatttggaacttttgattttagcaactgatagaggaatgtttggtgtaagtttattttttgtcttttttcttttgcataatgacataccatgacttttggtaataactattaacaccaaaactgctgttggtgcaggtagcgcagactggtctgcctcaggttcagattctgaaagtggtgattgaaactgaggaagaaaatgagaagcccctggataagagactcaatgccagaagggcacatgtctatataacttttacgggcttgcccaagtccccacgtcttgttgagattggtgagcatgttgaacgcaaagctatcattagaagagtcatcgatgattcaggatacttgactctccttggtaagttttggagtggtaaagataccgagcagcgttctaacactcgccagagtgaagaaaaagtcgagagttctcaaaaacgatctcgcttatgctag

SEQ ID NO: 162401 - DNA, 531 bp, Arabidopsis thaliana landsberg
aaacctcctaatgattactcacagcagatctatgatcggtatggtggagtatatgttgattacaataaacaaactgtgagtaatataccatgtttgcgtttgggcgttgattctgtaacgctgttctgtacaacttgagcaaacggtctaatgtttttatatgtgattaggtgttgccggctatacgtgagaagcatggtgaatatatgctgagagagcttgttaagagatgggccaaccagaaaattcttgttagatggttatcccacttcttcgaatatcttgaccgtttttatactcgtcgggggtctcatccaacactgagtgctgttggcttcatatccttccgcgacctggtttatcaagagttacagtccaaggccaaagacgctgtactagcacttgtaagcatctctaactgagtagctctggtttacttattctggtttatctaacgcaatttgtattgccagattcataaagaacgcgagggcgaacagattgatagagcactattgaaaacgtatagat

SEQ ID NO: 162402 - DNA, 521 bp, Arabidopsis thaliana landsberg
atggtccctctaattatttgttcgagcagcagggaacgctcagagaaaagattgagcttcagcataatgctaaaggtaaaagccaatggacaaatacaagaacagactcccatctacccaatgatatatagtatgatagctcagaagatgatcccagtcccatagatgtcctaactctaccctttgtctcattctttctctttttggttcaagttctaaggggttcttctttaaaacgattcaagagtctagcgggtttggttttatactgataataggtttggggtcaattatcctataacaccaatcatgcccttgtagcattttaggttgtcaatccaaatgagtgtgatgctaacaatcaagatgcaatcagagttcacagagtcaagccaagcaataacaggttttggggtgttctagcagtcctaagtgaacatgcaggaaacagaaattcaagcagacaattaaaacacttgaccaacacagcttgttgccaagcactgggtgtggtcgagtaa

SEQ ID NO: 162403 - DNA, 1307 bp, Arabidopsis thaliana landsberg
  unsure (1)..(1307): unsure at all n locations
ccagcgtgttagacaagaattgtcatcaatttgatttagttttgaagcatttgggtttgggaattttgttttgattttctgcaggttgtatgaagtgatntgcattagattggattgaaatggctacggagcctacaaggagctggttccagatacggcagcagaaaccggataaatcaagccctactaaaaagggacaagagggaaatgtgaagaatcttgggagacctcctatgaatgatgcaccatctaatgctactaaacagaaagttgctgcagcgaagcaatatatcgagaatcattataaaattcagaagaagagtctccaggaaagaaaagagcggtacgttctcgggattcttcttgtgatgccaatatttacttcttgtgctttagttgttacaaatggaacttcagagtagtcttattttctagtactgatggttgggtctgatttaggaattaatctgctactggtttaccccgaacccctctgatatcagctcgttcttgaatacaggcggtgtcatcttggaacaaaacctagctgatgctgatgttactgttgaagacaagacggatatattaaagaacttggagaaaaaggaaatggagtatatgcgtctacaaagacagaaaatggggggtgatgactttgaactgcttagcatcattggccggggtgcttttggtgaggtatatctctttatgtgttctttgagggtgcctctctgatatttcactacctttttggaagcttagctaatatcttgactcatctttacatataaaatgtgatgatgcttcttttttagctctcttactggctaccgaagtactgattactagctattattctttttctatgaaccaaagcttctgttagtgattttacttggtgtattgatttaatattatttcatttctgtccaggtgagaatttgtaaagaaaaatctactggaagcgtatatgcaatgaaaaagttaaagaaatccgagatgcttcgacgagggcaggtaatgcactatctgatagcatctctccaaatcaaagagtttagttgtgattaaattggtaattcattaacatctgcgtaaatacgctaatcctctctttatgcggtaaatatcaggtggaacatgttaaagctgaaagaaatgtgcttgcagaagtggatagccctttcattgtcaagctttgttactctttccaagatgatgagcatttgtatcttattatggaatacctccctggaggtgatatgatgaaactgcataatgcgaaaggataccttacgggaagatga

SEQ ID NO: 162404 - DNA, 855 bp, Arabidopsis thaliana landsberg
tatttgttggtcatgatgacggaggtctacttgctctcaaagctgcacaaagattgatggcaacaaacgaatccaacaaagtgagtagacttgtaatcagatgtgtattgtgcaggcttatatattttcctttctaaacctagttggtactgatatttctaggtcgtggtcaaaggagttgtcttgcttaatactagcttatcaagggaagtagttccagcttttgcaagaatacttctgcacacatcactagggaagaagcacctcgttcgccctcttttacgcactgagatagctcaggtggtgaatcgccgtgcttggtatgatcctgccaagatgactacagacgtcctacggctatacaaggtaccctacatcaaacaaagatttgcaatttggtagacatgtatcaaataatgtgttttcctccttgtcaggccccattacacgtagaaggctgggatgaggcacttcatgagataggtagactttcatctgagatggtgcttgcacctcaaaatgcagcttcgcttctgaaggctgttgaaaacctgccagtgctagtcattgctggggccgaagacgcccttgtgccattgaagtcctcccaaggaatggcttctaaactccttaactctgtaagtccctctttcaaactcaagctctcttatcccagctacggtttgttttcatgtcaagatagcaactgacattcattcgtgtcatcaacagagactagtagcaatctcaggatgtgggcatttaccacatgaggagtgtcccaaggcgcttcttgcagccatgtccccgttcatcactagacttgtaattaggccagatctccagagtcaatag

SEQ ID NO: 162405 - DNA, 2037 bp, Arabidopsis thaliana landsberg
  unsure (1)..(2037): unsure at all n locations
atgtctgacgattccaaacaatcaaaattctcatctataggtacccgtttcaaggtaagtctgattttagtttgcaatttctactaaacatgttatatcaataatattggtcacttaattatatttggtccttcttttcagcaacaattggtatcgttgctcgagattctaaataccacggagccgcactatattcgctgtataaaaccaaataaccttctgaagcctggaatctttgagaacgaaaacattttacaacaattacgttgtggggtgcgaatgacattctctgtcgatttcatagttcagtttctcgtgaaaaattttatgtctgaaagaaggatattttttgtgttcatgactttagggagtgatggaggcaataaggattagttgtgctggctatcctactaggaaacattttgatgagttcttggccagatttggtattctnnnnnnnnnnnnnnnnnnnnngaagtaagatgtttcctctcatagaatttcttataatgggtgatatccattttcatgtcttaactgagtccttataatagctctgatgaccctgctgcnnnnnnnnnnnnnnnnnacaaagtgggactcgaagggtatcaggtaattccctcatcaagctttttgcaatgccactactgcttgtgtgagctacattgatagttaaggattgacattttacttttgtagattggcaagacgaaagtttttctgcgggctggacaaatggctgacttgaatacccgaaggactgaggtcttgggaagatcagcaagcattattcagagaaaagttcggtcatatctcgctaaaaagagtttcatcgttctgcgtaattctgctaaacagattcagtcagtttgcagaggtattttcaatgttgtcgaacatgtctatagctcaactagactaaatgattggattgttctgtcctttttttatttattgactaagttgcaaacctatgtgtctgcctttttgtcaggttatctcgctagaagtgtatatgaaggcatgcgtagggaagctgctgctttaaaaatccagagagacttgcgtaggtttctggctaggaaggcttacacagagctatattctgctgctgtttcggttcaagctggtatgcgtggtatggttgcccggaaagaactatgttttagaagacaaaccaaagctgcaataataattcaggtacacttaaatcaaaattgcagaagtgtcgcactattagaagttcaactcgtcagagaacaccaattacataacgagattgattacttcacgaataacaacaaaacagttggtagttctgtcatattctgaccgtggtaatgctcattgttattatagactcggtgccgtggatacctggctcgcctgcattacataaaactaaagaaagcagctatcacgacncaatgtgcatggagatcaaaagtggctcgtggagaacttcgaaagcttaagatggtgagatgtggtttctttctttagctagtgttgttccattgtctcttgtttcagaggctcacttataaagatggtgctttgcatgaatttaactgaatttctttaattcattttacacctaggctgctagagaaactggagcactccaagcagccaagaacaagctagagaagcaagttgaagagctgacctggagattgcagttagagaaacggataagggtgtgattgctgtttgaaaagctgaccacattttgtttctcgcaaatttgaccctaattttttcagggccttcttgcattttatgaatattattgagagtttttcatcctctttcaacattgcagactgacctggaagaggccaaaaaacaagaaagtgcaaaagcacagtcttctttgtaggaattgcaactgaactgcaaaaaaacggacgcattgcttataaaagaacgtgactctgcccacaatattgctgacactgccccgattattcaagagataccagtggtcgagcaagaatatatggatgagatcaccattgagaatgcagagct

SEQ ID NO: 162406 - DNA, 841 bp, Arabidopsis thaliana landsberg
gcataaggccggccagactgagattcagatattgaagaagctagctggctctgacccagagaataagcgccactgcgttcgttttctttcaacttttaagtataggaaccacctttgcttggtgtttgagtctcttcatctgaatctccgtgagattgtgaagaagtatggtcgcaacattggtattcaactatctggtgttagagtgtatgcaacgcagttattcatatcccttaaacatctcaagaactgtggggttcttcactgcgatataaagcctgacaacatgctggtaagctatacttgtctgtgtttttctcctgcttgatgcacataaattttaacttctggtcgttccttgattatccaggtgaatgaggcaagaaacacgttaaagctttgtgactttggtagtgcaatgtttgctggtacaaacgaagttacaccatatcttgttagtcgcttctacagagctccagaaataagtaagttccactgtagctgttgtcttaatcatctacttggatatttcatggctgtatgttctattataactaaagctgtactctcttttttcattgtagttcttggacttccctacgaccatccgttagatatatggtcagttggttgctgtctgtatgagctttttagcgggaaaattatgttccctggctccacaaacaatgaaatgttacgcctgcatatggaactgaaaggtgccttccctaaaaagatgcttcgcaagggagcatttatcgatcagcactttgataaggacttatgcttctatgctacagaggaggatagtgttactagaaagacaacaaagagaatgatg

SEQ ID NO: 162407 - DNA, 461 bp, Arabidopsis thaliana landsberg
ataaccttggtgagtagagaagagcgtaccattttatctcatcacacttattttttttatgtaggtcacaggggaagcggaatatacggatgatactccagtacctcctaataccttacatgctgcctttgtgctaagcaaagtgccacatgcccgcatcctttcaatcgatgattcggcagccaaatcttcatctggttttgttggtctgcttcttgccaaagatattcctggggataatatgattggaccaattgttcccgacgaagaattatttgctacacatgtcgtcacgtgtgtgggacaagtaaggaaatttgaaacctaaattctcacgttttttcttagcttttcaacggagcctaaaacttgcttgagtctcagaagaaattttacatgctttttataagcacatctgtatttgtggcatgcttctgatcaccagaaagtaaacgaggcaa

SEQ ID NO: 162408 - DNA, 873 bp, Arabidopsis thaliana landsberg
atgactcctatggaggtgtttctctatcttatctatctatctaatttacaattctgattgtttgctttgcgtctaatgtttctatggaaattttgatagcgtgccaagtttctcgagaatgacagtcaaatagaagatgctcattctgtagctgttatagctggtgatacacctgtaagttctcacctcacattgatgcttatgtatctgtaacttgttcacttagatgttacattggtttttttatgtttacccatcttcaggcttcagactaggtggacgcgcatttcatttgtttagcttgtgtagatggtaaaaaaaattcatatcaacacctaaatgatactcacttccaagttggcactaaactgtgacactctattaccatataatgcaagtgagctctatgaacttgatggagatagggcaggaccagtttcacatggtaattcctctccagctaccttattgcatgtactataaacacgtcactctataagcttaagaattatcaaagtagtataaacccttcactctttaagcttaaagttatcaaaacggtgaaagaatccaggaaatgcaacccggtatatacttgaatagctttgatattatcctcgtaggacgcagcgaaagtgataaagaagataatcgagaagaatcctagttctctcaacttcaatgtgacagccatctctaagagtgcctgaggctgttattaagagaagcaatgctcctaagtcttgtttctgagtcaatgacttactcggattctctttttgtacattctgaatcttcttttcttgtttccgaattataatatgcggttggtaatcatggtttagagaatccacatttatagatcaatggacc

SEQ ID NO: 162409 - DNA, 1743 bp, Arabidopsis thaliana landsberg
  unsure (1)..(1743): unsure at all n locations
aaacccttttattcaactttcgaatctttacaatgaccatatgatggcacaatataaaggagccgctttgggagaattgagtccccatccgtttgcagttgcggatgcagcttacaggtgcttgccattcaactttgaagtttttctcttgttccattcatcattggtggatttctgttttgacatttttgttttctgtttgtatagacaaatgattaatgagggaattagtcaatcaatcttagtaagtggtgaaagtggagcagggaagactgagactgctaaaatgcttatgaaatatctagcgaaaatgggaggtcgagctgtttctgacagaaggactggggaagatcaagttttggaggtaactaatggcaaatagtttattatagaccttgtggattgtcaaagacaggatttctagagtttagtgaaagattattctttgacatgaatggtttgtgtgcagtccaatcctgttttagaagcatttggaaatgcaaaaaccgtcaagaacaacaattcaaggtgaatgtaacacacacacacgcatacaaactcacaaattttcatcatttcttgtactcaccatccattgaccaaatatttcatcaccttttcatctggacaatcattatcatgttgcagtcgatttggtaaattcgtggagattcagttcgatcaaaggggaaggatatcaggagctgctatcaggacgtatttgctagagagatcacgggtttgccaagtgtcagatcccgagagaaactatcactgtttttacatgctttnnnnnnnnnnnnnnnnnntaagttttagatcaaaattaacttttaaaatgaccagtgaagtagctgctgattctcagcgtactaaaatgtatacttatttctactttcaggatgctaagaagtttaagcttggtgatcctaagatataccactatctcaatcagtctaagtgtatacaattggatgctatgaatgatgcggaggaatatcatgcaacaaaaaaggctatggatgtcgtcgggatcagttccgaagagcaggtacctccatctgttaaacatagcaaaacctgatatgttatcttgatcaccaacttcttaacatttccggcatgcctttaggatgcaattttccgtgttgtggcttccattctgcatcttgggaatattgaatttgctaaagggacagagattgattcatcaattcccagagatgaaaaatcttggtttcatttaaaaactgccgccgagcttctcatgtaaatggcttgacttatatagactgaagtgggttgcttctgtatgtgactgaagtggggatccttactagcatattcttttgctgcaggtgtgatgaaaagtcacttgaggattctctatgcaagcgtatcatggcaacccgggatgaaacaatcacaaaaactctcgatccagaagccgctcttcttagccgagatgctttggcaaaagtcatgtactcaaggttgtttgactggtgagtttctctgttctcaactgacgaagacattctcagtagctaattctcttcatttgaagacataagtttgaattgtatttagacagaactgttttatactaattatttttctgtctatgcaggctcgttgagaagattaatacttcaattggtcaagatcctgattcaaagtacttgattggtgttctggatatatatggattcgagagtttcaagacaaacaggtgcttaaccg

SEQ ID NO: 162410 - DNA, 1101 bp, Arabidopsis thaliana landsberg
ttcaaaaaaaaaaaacgaaagtttcctctgtttcatataaacggtaaagaaaacgagcgtgaccaattctataacttgtttgcttagtagaagattttggcaatgtttccaaaattgtcaaatagactatctgcgcctaagattcacagtttcaatgatagatcgttcctaatgtagctttagttttgtgtttgtgtagtgacgagggaacttatgttgtaggagtggaggagctacaaagagagctgatgccaagacatgtggcagtgataatggacggaaaccggagatgggccaaacgggccggattgctgacgtctcaaggccacgaggccggagctaaacggcttatagagttctccgagttttgctttaaattggggattcatacagtttcagcttttgctttctccacagagaattggggaagacacaaggtgtgatattttagactatgtagcttacattctcactcaactcttgactctaacgatttgttggtattaataagattgaggttaagtgcttgatgtctttgatccaacattacctcaagtccaagatccaatatttccaaaggtataaagtacaactcaattgaggttttttgttgacaaatgatctgctcatggattaccaaaatcttgttgtttcagagaggaaactcgagtttctgttatcgggaacctaacgaagatccctgagtctctcctccgaacagtacaagagatagaggaagctacgagaagctataagaagaagcatctcatattggcaatagattacagcgggagattagacatcttgcgagcttgcaagagtattgtgaagaaatcagaaaaagggttgatccgagaggaagatgtagacgaggcattgatcgaaagagagcttctgacaaattgtactgagttcccaagtcctgatctattgattaggacaagtggagaacagaggattagtaacttcttcttgtggcaacttgcttatacagagctcttcttctcgccggtcctttggcctgatttcgataaggataagcttctagaggccctggtttcgtatcagcgccgggaaagacgatttggctgtcgggtttga

SEQ ID NO: 162411 - DNA, 508 bp, Arabidopsis thaliana landsberg
tctttgtttaaatataatttggcttcatctgttccatataacttgaaccgagttcttgaagtaaaagaactgatttgtgattcttctggtgatcagaacaacaactgaacaaattgtcttattgttttcaagagaaaaaaatatactaaaaaaggcagtgagttcaatgtaatataatgtggtagcacacactaattacccaataagggtaattctaaatattcggttctgatccggatcggatccaatcgggtttgggttggcttgggtaaaaagtttcaggtcctaaaaatatccaaaataaatagaaacaagtatattctatgtagatagtgggtacccaaacaaaaaaaacccattaaaatttgttatttttaataaagttaatcatatttgaatatattttactaaattttgacaaacataacaaataatttttaaatagtttagttgttagggatatttaggtctaaaattaatttacatatttagatttataattataatc

SEQ ID NO: 162412 - DNA, 751 bp, Arabidopsis thaliana landsberg
atgactttaaaacatttgtaagtttcatagtacatttcaaagttgcaatttgtaactaaatgagtgattgcattttttgttgttttatcgacaggctattcgatggaaacctactaaccggtgaaatcccacaaagcctcagccttgttaaaacattgacggtgttgtaagtagtagaaagagatttttcaaaaacattttttatcctagttaacttcttcatatatgttgttttctttgtgacagacgccttgataggaatagactaagtggagaaattcctccaagtcttaataatctcacaaatcttcaagaactgtaagtgagcaactaaaagatttgttctgtgttctcatagaaaataaataaaaagagatgagagagttcttaagttgaatccattttaggtacttgtccgacaacaaatttaccggtagtcttccaagtttaaccagcttgaccagtctctccacattgtaagtttctctatattattcttcctataatttgttgctcaattccttcactctcaagcaatctaaaaccatgatgtgattgttttgtaacagagctgtgagcaataaccgattaacttcctcacaaatttcatcatggatctcattattaccgacgtccttggcaacattgtatgaacatcatctctctctcgctcttgatctccatgtgtatatacatgcaaagaacaaatggtcttctgcttgcgcagaaggatggcagggctccgacttca

SEQ ID NO: 162413 - DNA, 202 bp, Arabidopsis thaliana landsberg
gttaattgcgagtttttgtggggtttttcagttttgaacttgttgtttttttagcactaaacccaaaccgaaaaagtgttcggatcacgggttaaccggtcggaccgaacggtttgggtcggacgtgaaaacactggtcttcttcatggctttccaagggagagaagagcttatcacgagtgacaaattaggtttagtataa

SEQ ID NO: 162414 - DNA, 410 bp, Arabidopsis thaliana landsberg
catggccaagaaagtgtatcaacggtctccaatagaagtaagactccaagcctaatcaaacctctttttgacaaacgagattgctagtaacctcatgtattcttcttttgattgttacctttaattaggatcttgaactggcgaaaatgttggtaagggtaaacccgttggttacgaataatctggcaggggcaagaagctttactggggaaggatatggatcggttacacgtatttatatcataagtggagaggataatatattacctgaggactaccagcgttggatgatccgcaacttcccggtgaaagaagtaatggagatcaaagatgcagatcatatggcaatgttctccaagcctaaggaactatgtgctcttctcttggagattgcagataaatacgcctaa

SEQ ID NO: 162415 - DNA, 1287 bp, Arabidopsis thaliana landsberg
attcttgatggattgaaatatctccacgataaaggtcttatacacaggtttgactagaaaaatctctttttttatagcagttcatgtatttcacaagcatctgatttcctgggtcgtttacttttttttcatctgatgtgaaaaaggaacattaaatgtgcaaatgtattggtggacgctaatggaacagttaaacttgcagattttggattggctaaggttcttttccattaataatagatgtttatagtattttcaagtactaacctggtacatcgcttattccccttacttgatacctgtggcattttgttataggtaatgtccctctggcgaactccgtattggaattggatggctccagaggttattgttttaaaatccttcccgctgttttaatttgtcaatacaatgatagacaaacatatcatacatcaaaagaaatgttgtatcttaaactgttacttaaatatgttcccgcatatattgtgatccaggcttgataagctcgaaaatccccggttatgtttccttcaggtctttgattaatctgaaactagtttgaaattatttctattttagtttatagttcttattataactgtgagtatgtaattagtgatcataggtaacagacgcggatgtatatcattttgattgtactttaggctatacttgtacaactgtgtttctaaactgaacataataatttgatcaggttattcttaacccgaaggattatgatggttatggaactccagctgatatatggagccttgggtgtactgtgctagaaatgttgactggtcagattccctactccgatctggaaatcgtaagccttcaagattctcaaactttctttatatgaaagtaagcaaattcccacaattatcaccaactatttagctgtaaaagtaaatgaacaaagcatttggcacagtttaaatttgtacttctcaacaagtgattttgttttgcaccttcaattgttttgaacttttattttatttttatgggattttgaagtaataattaaaggtcataatttgtgtaaacgtgcagggtacagccttgtataacattggaacgggtaagcttccgaaaatacctgatattctatcgctagacgcccgggatttcatacttacgtgtctcaaagtgaacccggaagagcggccaactgcagctgagctgcttaaccatccatttgtgaataggcccttaccatcttcgggctcaggttcagtatcttcgctcctctgtcgatgaggctaatttttgaag

SEQ ID NO: 162416 - DNA, 552 bp, Arabidopsis thaliana landsberg
cttaccagtcctgatggaaatattataaatcctttgacaagtacttgtggaaaatcgagtgctactgagctgcctattgaacgccttattagagccgtaagtaacgttactaattttgaagggtatattgcaacagggcagtgtcattgctgccatccctcatttgccgtggaaacattgttctgatcttgatgtttgctttctgttgttttcagatgaaatccatctcaccacaagcgctttcgtctgcagtatgtgatattagatctgttgtaagcatggttgataggattgctggttcagtaccaggcaaaggttcaagagcttatttggtgtggacttggttgcaatgactaagtgccatctccaagaaagaaacttcatgacgcaagatggcgaccatgaaaaggaagcgtcagacaaccccaatgccatcaagtgttgcttcattgggaggaaagcgtttgtaatagctacaagcattttgctggtttggtaacatcagatatggaatctactgtgacttgtggtggcaagaagccaagaactgag

SEQ ID NO: 162417 - DNA, 640 bp, Arabidopsis thaliana landsberg
caaagctattcccgctcgtgttacttttgggtaagtaaattcttccttacagacttccgagtatatgaaataatagaacggttttatgtttctcgaaccatctattatgttggcaagcctaaacctttgtgactttgtgttttcatcttaacaatctttttgtactggagcagatgtggtcaagttcagaccggtgtattccatgatggtgcagctccaaatggtctttttgggcttggcttagaagatatatcggttcctagtgtactagcaaaagaaggaattgcagcaaactcattctcaatgtgttttgggaacgatggagctggtaggatcagttttggagataaaggtagcgtagaccaacgggaaacaccattgaacataagacaaccacagtaagcaagccgttgaatcatatcttctttatgtttaaccaaacttgtctatctccttgaatatacttccttcttctaactactatgttgttttcctgttgaccagtcctacttacaatatcaccgtcactaaaataagcgttggaggaaataccggcgatcttgaatttgatgctgtttttgactctggaacctcattcacttatctgactgatgcagcttacacccttatttcagaaagc

SEQ ID NO: 162418 - DNA, 536 bp, Arabidopsis thaliana landsberg
gggaagataatggggtgatggggaactgatattcctgaagatttggagttgaacgaggaggcacttgctaatgctcttaaaaaggtaaagagtctcattcattctcttgcacagacgtttctttgtcctgcagttttatcttaagcacttgtgtttttttgttttgcacaggaggatctcagtaggagggaagagaaagatgagaggaaacgcaaatacaatgtcaaatacaacaacgatgtaatgatcatctaaaccaatcttaacactctaataacattttgtctcatattcttgatttagtgttgattaatcaaaatctctcatttcatcgcaggtgactccggaagagatggaagcttacagaatgaagagagttcaccatgaggatccaatgaaagatttcctctgaaagaagttggctttcattcccttttaccatgtaacctgaagaacaagcttataatgttacttgtagtagtagcggtaggattttgacattaaagctctgtggaagtttgctactactggtacta

SEQ ID NO: 162419 - DNA, 716 bp, Arabidopsis thaliana landsberg
atggtagtggagaacacagagaaggaacacagcgatggaaagaagaaagagaaggaacatatgagcaagggtaaagaaaaggtctatgatcgagagaaccaacgcagggataaggagaaagtgagagacctaaaaagaagtagagaagaggacagtgagaaggagatctctagagatagcgaaaatgagaaggaaaaagacaaggataggtcaagagtgaagaaaatagcgagtaagaaaagacgtgaagatgatgacgaggctcataaagctgcagaaagatatgaacattctgaaaacaaaggtatgaatgaaggtggcgataatgtcgatattgcatcaagtggaaaagaagcatctacgttggaccttcagaatcgcattttgaagtaagtgatactcatatgttatatgacatctagaattacagctagtataggaattaaaagtttatgttttctgatgatgctccttatgctctatcatgcattgcaagcagccgtaagattgaggaaaaactaaatgctgagaagcaaagagcacagcagctctcgacaagttttgaggagcaggtattacctcaattccttggacatcttgtatccttttatttcttcataccttccttttatttgatattttaataaatatatcttatctcatatttgtttaagataatcttaatcaaggtgaaaatgaagatggcgaggatggcg

SEQ ID NO: 162420 - DNA, 797 bp, Arabidopsis thaliana landsberg
ttacagatggagtaaacagtgaattgactgtgtttagatagctgtttctcatgttctctagtttatgtaagaaataggaaacagctttgcacttatttgatagattttttcgctccacaggcagtggttgtaagtattgatcctcgtagagtttatgtgaaccatccggatgatgtgccatacaaagtcatcagagtaactaatccaggtatgctggtattctcacctctcttatatttgctttctcatttgttcaaaggaaaattatgtaggctggctatatatcatgcattaaatggattaatttgagctttctaatacattaaaattacaaggcaaatgttattaacttattattgctatgttaactcagaactctattttcctaacggacattatataattcatcttgcgtcaatcttagtttagctttcgttgaaaagccttgagctgcttgaactacacaagcagcacagtcacattgtatagagtttctccataaatttgcatacatgtaataaccgggatgaaatcttgctggtgttaggcccaaatggagaagaatatgcctggtatcagtgcacggtaaaatttcggccacccttttcattttaagatcgatttgtatcatttcttaactattggtttctcaactaaaaggtcagtggaggacgagaaggtcgacctattggagcatttgagcttgcgaaagcggttgaagaattaggtgctggtgaaatactattgaactgcatagactgtgatggtacactcaaaacttcaatctttgaattagt

SEQ ID NO: 162421 - DNA, 565 bp, Arabidopsis thaliana landsberg
cgaaaatccaatgatacgactaaaagtgctgaaaatgaaacgtttcttgcatctcaagaagcattcaccgggcttaaaccgtataacagaactacagaggtattgaagagttctgagcacaagtttctgaatgattctcacaaaatagaagcttctggacaacgtagaagaagcaatgaaactgcaagttctctgcatcctcttcaaccaaagattcctcaaatccgcaagaaatatccccataggagcataacaaagccaccatcaattgtcatatcaataaagcagatgaacaatatgatattgaagcggcataatgatccaaaaaattcacttgtatgcaaatgttattaagtttttaccgcaagttctaaatccttattactcatcgacactcgttcattccctgttttctacatttttcatgttcataggcacctctctggggatcaaaagtggaccaagagcttaaaactgcaagagacaagatcaagaaagcggctttggtcaagaaagatgatactctttacgcacctctctaccacaacatatccatcttcaaaag

SEQ ID NO: 162422 - DNA, 2070 bp, Arabidopsis thaliana landsberg
gttttgaatagacctgaagaaacagggagatttaacttttcatctcagtttccatactacaaagaagaattgtttagaccagatcttagcaaaacacgtcccggaaagcctgttgttttcgatatggacatgagcgccggagatttcctctctctcttctacctcctcaaagttccggtggataaaatcgatttgaaggtatgattttacagagatctagctaatccgtgttgcaaaactattgtgtaacaaataactcagattgcaacggttgcttattgcacaagtaactaggcttgctacacaagtaactaggtgaatatgctgttttcttcaatatcctaacaccccctctctcttgactcgcaaggctattattgtgagcccaaccggttgggctaatgcagcaacaatagacgtggtctatgatctgcttcatatgatgggtcgggacgatattccagtgggcttgggagacatgttggcattgaaccaatccgacccgatttttccaccggttggaggttgcaagtacgtcaaggctattccacgaggctgtggcggatttctggattccgacactctctacggtcttgctcgtgaccttccgagaagccctcgcaggtatgtttgtgtatatgagtaatgtgaaaatatcttaagaatatgttaatatttatacaatgctatgatacgatcagtttaagcaatatatatctacattttgatgcagatacactgcagagaattcagtgacacatggagctcccagggacactgataggcctgaactccgacaacctctggctattgaagtttggcaaaatctgaccaaatctggtaatggagtgtctaagatcactgtactaaccaatggaccgttaactaacttagccaagattatcttactcataaaaaatcatcctcactaatcaaggcaagaacaatctgacaatatatttgataaattcaattaagatcctagacttaatagatggcttctgttgtaaattgcaggaagtttacatcgtgggtggacatataaaccgtgagaaatcagacaaagggaacatattacagttccttcgaattcctacgctgaattcaatatgtttcttgatcctttagcagctaagactgttcttgaatccggtctaaacatcacactcatccctctagcaacccaacgcgagttttctttccaagcaatgcttaatagactctattcctcgacgaaaacacccgaagctcggtttgtgaaacggctgcttacaagattgcaagctcttcatcagaaacagaggagatacatgcacatggtaaagcctactcttgtcattctgtttcatcgtaagactaatatgattttggccttgattgttttcaaacacgcgaagacagaaaaacattcaagaccctcggctagttttcaaactaaccctacattgttgttacaggacatgttcttaggggaaattcttggagcaattttcttgggaggagatcacgctttattgaagccgaaaatgcgaactgagtacataaaagtgatcgctgaaggagatgaatcgaaagatggccacatattgattgacaaactgcgcggaaaacaaataaagatactcgaaagagtggatttgagaggctgctatgagagttttgcttctagactcgatgataagaaacaatctgcagtcataggaagctttgaagaacaaaggatgaaatggaacacaccaccaagttacaaacctataaccgctcgaatatttcactgaacttatggtacaaagctcttttccagagacgtttatcaacgacaataatactccaccagaagaaaaagagtgatatgttaaatggcaagacatgctactggattgacaataccaagaaacacacatattatataacctattaagtatttgactgaatctatgtgtttacattatattcttttcaggaacagtatagttttacagaactccccttagaacaaatttcatcaacgacaacaactctaagagaaactcggaaaaaaacagaaaactttgagagtaaaggcacata

SEQ ID NO: 162423 - DNA, 276 bp, Arabidopsis thaliana landsberg
gaatttaatgttaaattatatttaaaaagtaaataaacgtttatacatcaagtgcaacatatgattgaaagagtagaaaattttttgtaaaaaagctcatgatcttgattgaaaccatagttggagagccttatcatatcgatagtctccgcttgctgcgattgtggaaatttgattcctcatttgtttgtcgagccaccggattagatgagtcgctgaattcgaacgttccccatgtcttttaccatttctctcatgccatatggtgtgtaggca

SEQ ID NO: 162424 - DNA, 379 bp, Arabidopsis thaliana landsberg
ccccaccatattactctccttctccaaggttgagtacaaatctcctcctccaccgtatgtttattgttctccacctccaccaccatattactctccttctccaaaggttgagtacaaatcccctccaccaccgtatgtctacagctccccaccaccacccacgtattattctccttctccaaaggttgaatacaaatctccaccacctccatatgtctacaactctccacctccaccggcgtattactctccatctccaaaggttgagtacaaatctccacctccaccatatgtctacagttctccaccaccaccatcatactctccttctccaaaagctgaatacaaatctcctcctcccccatccttatattactaa

SEQ ID NO: 162425 - DNA, 707 bp, Arabidopsis thaliana landsberg
agaggaattggtgacaaagcagtcaatcagcttgaaaaatctgttaattcaaagcttgaaacaaccgtagccaggcagattcaagcccaatttcagacatctggcagacaagtcctgcaggtaaaaattcgagtttaaactagtttttttatgccttactgtctcttgtatatatattttttatgcttttcagacagttatgactgattgactggttatatatacaagtcttgtgcatacattctcaactgcatcgttgtttatcgtaaaagcagttgtctcttatatatatttgctgccatttgtcaacttcaggaaggtcttaggtcaagtatggagtcctcagtcataccttcctttgagaggtcatgcaaaaccatgtttgagcaagtagactcaaccttacagaaaggaattggtaagcacacgagcgcaacacagcaacggattgactctggacaatctcagcttgctcatactctgagggtatgatagaaaatcgtccttcttccagattttttggctctttcttctagttatggtagcaaaatccttttttaatcctcatgttaaacatgcttttatacaggaaaccattagttctgcatcatcagttactcaagccctaaatcgtgaattagccgagagtcaaaggaatcgcttagctctcacagctgctggatcaaatcccttagttactcaactaa

SEQ ID NO: 162426 - DNA, 761 bp, Arabidopsis thaliana landsberg
aatcaattcttgttttctagatctagatttgtaaagcttaatctcctcatccttgggttcttgatgtttggatcttttgtctccgcctttcttagcaccagatctggtcgtatccttcttggcagaggcagtcttcaaccggttcttcactgcctcagatgaagatttttcaccatcgtagatctagatcttcttcctttcttcaagagacattctttgtgtctctaggttttggatgtgtctcactgcctccgtggctccttggagcagtataaagtggatcgcacggcactttcattcggttttatcttgtggtaaaggagattcttgtattataatccgtttgtgtgtttttgtaagtctcaaatttgttttaatttgctaggtttaagttttgttaaatctttttttggatatctagatgctgatccgggaagtattaatggatgttgttagtttatttgtttgggttttcccctttgtttaccttgtttagtctttgtctccgggagttttctgttactcgccggctaatgtctccgggaggtttttgttactcgccggctaatgtctccggaaatgttcatgttcttgccggctttattgtcacagcggaggaatcgatcacaatcatttgtagcttagggctgctctttttggctatagaaaatctttaaagttgataaaggcattacttagttgtaatgatttttctgtagttgattgtcctaattccttttgtgcttttataaaccaattaa

SEQ ID NO: 162427 - DNA, 1052 bp, Arabidopsis thaliana landsberg
  unsure (1)..(1052): unsure at all n locations
gaatctcaaccacaagtacgggccagtgatacttctccgtttcggattcgtccccttggtcgtgatctcatctaaagaagcagcagaggaagttctcaagattcacgatcttgaatgttgtagccgaccagagacggccgggactagaaagatctcttacaactttaaagacatcggattcgcgccttacggtgaggaatggaaggccatgcgaaagctctcggtggtcgaactcttcaccgccaaaaaacatcagtattttaggtctatcagagaggaagagaatgacttgttggtcaagaaactaacagaattggctctgacacgatccccggtgaatttgaagaagacccttttcactttagtcgggagtattgtgtgtcggatcggattcgggtttaatcttcatgagtgtgagttcatcgatgaaaatagcatctccgaccttgttgacaagtctgagatacttgagatgacttctatgttctctgatttctttccaggaggaatcggtagattcatcgattggatctccggtcaaaacaagcgattcgataatgttttctcggacctcgacactttctttcaaaacattcttgattatcatnnnnnnnnnnnnnnnnnnnnagcagatagctctgatataatcgacgtggtgatcaacatgataaagaagcaagagaaagatggagactctttcaagctcacaacggatcatcttaaagggatgatctcggtaatgtttttggacctttattagttgtgtagactaatcttcccttttttaattaaatattcacacaatttttgttctgtcaggacatattttttgttggagttagcacaagtgcctccacactgatatgggcgataacagagttagttaggaaccgtaaagtgatgaagaaagtgcaagaagagattaggacaacactcggagacaagaaggagagaatcacagagcaagatctcaccaatctccattacttcaagcttgtggtcaaagagatattcagattacacccagcagttccatttttgctaccaagaga

SEQ ID NO: 162428 - DNA, 911 bp, Arabidopsis thaliana landsberg
atggcattagtatatgaaaatagtcaaaataccacgaaagttgctaatgtgaaaaggtaggctctggcatcctgtggttcccttcatcttaattgcttagttcaagatttgtttctggtttaagtgtttcggatattgagaaagcgaaaagcaaagcaaccaatgcgacaacgcaaagtctgaaaaaccatacagtatctgttgtcgaacccaagattttgggccatatcacggttttaaaggcctattttacttagtcttacaaaagtgataaaaagagagttttgaacgaacctaaatcttaatcatcatgatagtttttgaacaataaaatcaaagatagtcttttattaaatgaacttgttcaagacagggacttagccatttgtcttagcaaaaacttctgaatttttcctgtggaagtcttgggaagttcctcctgaaagatcactttcctcggaaccatgtatttaggtaacttcgtcttacaaaactcccttatctctctctcggtcacgggaaccgacccgtcaccattgttatcacacttcaagctcacaaaagcacatggtgtctctccccacatcttatccggtttagccaccaccgcagcttccttcaccaccggatttgtatacagaaccgtctcaatctctgcgctgcttatattttctcctccgcatatgatcacatcttttgaccgatctttgatctccaagtaaccatctttgtgtataaccccgatgtctccagagtagaaccacccgtcctccctcatacaagccgcagttccttgagggtctttgtagtatcccaacatgactgagctgcctctgaaaacaatctctccaaccgaaactccgtcgtgtttcacactctttcctgttttgcgatcccttacatcgacttcc

SEQ ID NO: 162429 - DNA, 300 bp, Arabidopsis thaliana landsberg
tccacgggttcggcttttgtgttttgcttgagggcaagcaaaagctaagtctggaggagttgatatatccctatttttacttttttaactatgttttaggtataggttttagagtctaattgttatttctagagtcttttctagtccttttcaggttttacatgtttgggatgcatttggagattatggagtattctggagattaaaaaacaacttaagttgctgaagaaatccggagacgaaaatgcacgtaggtgtcgaacgacaccacccctggtgtcgagcgacaccaatacctga

SEQ ID NO: 162430 - DNA, 1448 bp, Arabidopsis thaliana landsberg
atggccattccgtcagaactcccggcctcgacgccatccaaaggtattaaattttagctaagacgcgaagaagaggcaaagtgggctgggccaaccaagttttgaagctagaatgcaacatgatatatataaagaaaatttcaccgtgaccacctctgtgagtttttttttcaggaaggggcaaagtgggctgggccaaccaagttttagccattcggcccaaaattgacgaatttgccctggaacgagaaactgacggagccggttcagtttcgtgaaccgttttctggttacggaaataattttaaatatttaaaattatttaaaaaaacgtaagtaaataattttaaaacttaaaataaatcaaaaactgtcttcgagaaacgtagaacagttccgacgaagagtcatttcgaagacgcagaaaaattccgacgaaacttaaaccttattccaattgaggctctattcgagttcgagtctttgattaagtggaggaaatttcgatcgagttcgtgttaaagtgtctaacaataagacgattttcgggtttatcgattaactgttcatagaaaaactcaaatggcggagacgaggaagagtagtaggcggcgaggagtttcagatgttaatgagtcatcgacggcgacgactaatttgggtaagtttgccctaacttcgtttggagaatgtcttgattcaaaatctaggttaattttagagattttaactcagaaattttcaattgacaaagggtttttagtttttttccgccaaaaacagttgattgagtataaaaggtttcggtgtacgtgtatatgaatatcgagtttttgtcaaccttaagctcacacatagtcttcatcatgatttctctaacttttttgatcaactgcttcaagagtttctgagtacctacaacttgacattgcatgaaaagagattcgttgacaacacgtctgtcaaggatatgcttctttaactgatcgatttaggcttaataaatagcaacttcatctttaaagcatctccgttcggaacgaacagtacgaaaggcatcatcacgagaattgcggtctttcgtttttcctcaacggccagcatttccttccttgcctctctcgctttttcctctagagaattgtatatcgcaaatccggcggcaaacgactgataacagataaaaaaagagaacaaaaagttatcataacataaaacaataaacatgacaaagcaagaaacagagtataactgtacataagctctttagaagcccaagtttggtagagattcttcgctataggggattcaatgggggcatctcacgagacgacccgataacgtttttaccaaactcaccgcaataactgctgtctggaaacaacaacttttcctatcatcattcccgaaaaggagtgattgacctcctaaataacatgagtagaacc

SEQ ID NO: 162431 - DNA, 457 bp, Arabidopsis thaliana landsberg
caaggagtgacagagaccaaagaatctatgtgttcatgtaacatgaacttgaaggcagtctcactggctgccacatttgctctgggtcagctcgagtcacacattgggtagacttttgagcttgtgcatacaggtcctagtgtgaattttctggctatatcactagtccctgtttgtgtttgcttttgttagaaactttggtgttgcggagaagacactgacagacgcattgacaaagactgaggaacattacggtactgtgtggtgcggttttttggtcatcgattctcaatgactaaatctccagactaacggaatctgccttttatatcatccttcatttgatcaggagacaatcatcctaaggttggtgtgattttaaccgctgtggctctgatgtatggaaacaaagcaaagcaagaacgctcaagttctatcttgattcaagaggtgagag

SEQ ID NO: 162432 - DNA, 1513 bp, Arabidopsis thaliana landsberg
cgcacgattttcaacctcgaggaacttttggaggatatatgcgagtcttgctgctgttaggacgagaaaacctttgcattggccagacgttatcaactcgtttgaaactcgtaagttctttgaaaatcttgttcgtttgtcaatttgtctcgatacgttttttttacggagattgttttgcaaattcaccgtcaacttcagagatgggaaaagctagtcgtcagtttccgatttacgctgatacgttcgggaaggtagttcagtagcgacggatgtcgatgttcccgttgttgtaaccgaaccgcaacaggtggtggcaaaggttttagagagtagcgagatcgagactaaccaacagattactaacaaggatagggcgacacaactttcagatgctcgagttgggaagaaagcttcgggttctgatagcgaggatagggcgatgcggctcttagacgctcgtgccgggaagatagcttcaaattctgttagcgaggatggagctattttccgtgagccgttgagtgttcatgcttccccgcgcagtaaggtttctcgcggaggtagttcaagagattcttttcccgtcgtccgtgaaagaggctcaactcaggatattcgggaggtagatcattccttttcattcaactatgataggaagggttatccgttctcggacagtaggagttattgcggtgagtttgctagaaaagttatcgggtcgtcgcttgagaaccctcccggtgaattccctattgcgaagaatctctaccaaacttgggcttgtaaggaggttcagggtcgtttatcctctatttatttactttgtcgtgtttattgttttatgttatgataacttttcgtttatttttcatttatttttctttttttttataagttaattgccaccgaaaacgcgttacaaaattttcttgaggaataggcgagggaggcaagggaggaaacggtggccgttgaggaaaaataaaaaaccgcatattttattgcaacgactcgtttgcgtaacttaaactaggagaaatgaaggattgagggtctcgaaaagcagatcaaggagctctcagaaaacctcagaaagtcgaacaattttggtcgagctgagcaatcaaggttgagaagttctcgtgacgatgcgtttcgaaatgctcattccaaatggagccagttcaaagatgaagttgctatttataaaggtcggatcgatcagttacagaagcatatctttaagaaacgtgttgcggacgaatctctttgcatgcaatgccaagccgtaggtactcggaaagtcttgaagaagttgatcaaaaaatgtacagcaatccagggggaaactatgtgtgagcttaaggttgacaaaaaggagttgcgtaatttggtcgatgctcttgagattaccgatctttgtgacgatgacctcgtggcctttctagagtttgaggatgaggcactgatgacgacagctgaaggcgaagcaacgagtggtggtagttag

SEQ ID NO: 162433 - DNA, 3109 bp, Arabidopsis thaliana landsberg
cagttatttacaatttcacacaataaaccaaactaaaccaaaaggtagccacttaatccgggagacttggacacgggaacatacaaagcggagcagagcttcctctcaccaacaacttttttgcaaattcaaagttacagggtttaaggttcgagcaagccaaagggtttaggtttctagcaacaggaatgcacttaaggggatgagccatggtcaggttcaatcctcgaatggcctcttccatgtcaaccttgtctcctttggttttccagtcaaagcattgcaacatcattccaatcgcagttcctacaaagatgtaactcagatttactcccagacagcatctccttccgcttccgaaaagaatgtactgaagtgcatcgtcttgccctgatccaaaagaagctaaaaacctctctggcttaaactcattaggacatcaccaagattcaggatctatcatcataagcattaacaatacgtccatcatgtctccatcttgatgtcctttggctcctcttctccgtgttccccaaaaatctcattatcttattcgctataaagccatccttaggtttcttgaagaagagatagcaacagagaagtgagaagagacataagaggatgaagatgaaggagttttgagcgtcaacggtgatatcattgttttttttggtaggttgatgaaacaagaggaatccgtagtcaataatcaatcaggattgtttataacagaggaaatttgtactaagttcccagcgaaactctcgtgaccttcatggcatgtacaattatggtcacaagtgtggaccaaaatagatcttttcatcaaaaaaaaaaatgtgtgaatccaatggataacttggttttcatattcttataattaagaacttaaaattaaataaaaagatagaagaaaaatagtgctttgagaagaagaaaaaaaccgttgccctagaattaaaatccacttctcagtgtcataggcgtcgtcggtttgggaattttataaagttggtctcttttgaattcatcagtttcgtcattctccttcaaatctggaaaccaaagcgagtgtgttttgctctcttgaatcgaatttgtaagctcgtcgattttgcttctttccgggtcgggtaatcaatttgatttgattcttcactcttctacagtgagcagaaaatggaagctctctacgccaagctctacgacaaatacaccaaactccaggttttctgcaacatcttccgtttaattttcttgtcaatttctgagggtttctccggaatttcgcttttctgggttcgattttgatttccatctccttttttttcagaagaagaaatattccgaatacgatgagattaataaggaacaagaagagaaattccttacctttgtttcaggtaccaatttcgaaagattcgttctttgagtttgagttcctttgttccatacttgaattttagatatctctagttaggtttgatttcacattgcaattacaaacacttggaatcgagaattataacaagagaccttttaagtctgtgaatacgttcttagtgtgtctgtcttttctctcttttgctatttgcagcctcagaggagttgatggaacatttgagaggtgaaaatcagagttctctggagatggttgagaagttgaggaatgaaatcatttcaatcaggcatgtacttcaccttaccgtcttgattttcccagacattcttttttatttagagaagttggagccttgctaatgtaactataacaatcttgatccacagatctggcagggacgacaagtttctggagtgtcaaaagcttctcatggaagaagaactaaagagtaagaaactatgttaattgatgatagttgctgctctattttcatgtgtcatggaatgtagccttataattggacatgatatgtagtttagttaggaatttagctgagataatgtgaactgcttcatggagagtgatgaggacttggttataatactgtctaggataaaatctttgttgtttttcttacagacaaatcactttctgaagaagttgtcaagctaaaagagctggtccaagaggaacatcctcgcaactatgaagatcaaagtggaaaaaaacaaaagagaaagactcctgaaagtgctcgagttacaacgagaagcatgataaaacgtagcagactgtcagaagatttggtggaaacggatatggtatcacctgacattagcaaacatcataaagcaaaggtaaaacagatcacctcttaacctttcagttctgagctgaatgttgtgcatcttgcttcacaaacccagtggatcataaaattagccttactgatactttttcttgcttttgtttcaaggagcctctcttggtttctcagccacaatgctgcagaacaacctacgatggatcaagtagttctgctagttgtacatttcaagctcttggcaaacacttgctaggaatgaaattatcaactaataataagggcaaacgcgcctgcattgtagcctcacacccaacaaccggtaatttgtttttcctgcatgatctatttactttgattcaaaagatcttttgagatcatcagccaccagaaaagcaccaatgctgattttgtttccctgattattttaccataacaggtttatccttcagcctaacttttataaataacccaaatggtgaagaatctgagctgctttacaagcctgcatcactcggaacatttcaaagagtggcaccggaatggatgagagaagttataaagttcagcacaagtatgtgtcccatcttctttgaaagagtctctcgagtcattaagctcaattgttgatcggtaccgtatgtacatctccctccccttatcttgtgtagtcatctctgatggcttcttagtgtgatgtttctcaataggtttgaaaagctagggaagttatcattgtatctatagaaatgtgtctctctttaactttggaattagtttcaaagatagtgtgtccttgtgatgaatcatattgtaacaagatcttgatttatcctttgctctcgataccctctcctcttgtagacctcataaatctctga

SEQ ID NO: 162434 - DNA, 1543 bp, Arabidopsis thaliana landsberg
  unsure (1)..(1543): unsure at all n locations
atgtcagcacctgggaagtttgattattcttctggtgggctagataggcctctatacagatctaactttgccgcacagatggaaagatcgagtagctttcgcgagtccatggaacatcctgtcccatctcatccaatcatgttgaggaccacttcaccaatagcacaaactgatgtaacaaatttctttcagtgtttgcgttttgatcctaaggtggttgccgcggatcacaagtctattcgtcaaggtgactttaagcggcatgtgagtattgctcttggaatactaggcgatgagtctcctagtggatctttaaaagggaagtttattccatctcctattccagaagagatcaaaagatttaaggctggtctgcgcgaaaacaatgtgaaggccaggtagtttttaactaccacaagttagttagttgtgtttgaggtgctcttttgactcatttactttttgtggtcgcagggagcgtgtaaaaattttcaacgaagcttcttctgtatttaacaagtttttcccaagtgtacctacaaagaaaaggtctcgacctgaagggttttctggtgaccgctctggtgatcgcttggtatcaggaccaggcctaggtaaaatgggaattcagggtcagaccctggctggtggttttgagcttgaccagcaaaagttggatgaacgacctaaaagtggtgttccaaataagcgaacacgtacttccatggtaattctgattttttttacatatggagttgttatcttggttcgtacttgaacaaatgtcttatattctataatgcagtcttctgtttgcatgtcattgcatgcttctgacactggaaggtgcatcttttgaattggtcaaaaaattggatcgtggttactagttttagatatgatatagaagcnnnnnnnnnnnnnnnnnntttttttgctacaatgtagtatttttttatatatgtcggattgcatgcaaatttaagtgtttaatcaaggagcatttgtcttcttatattttagtaggtcctcaactatttttgcttttacgcttgctatattatcacaatactgttatgacctgaatataattgatagtatgaaactaactgatgttttttaaatgttttgataaaaatttatagaaatttgcgtgtgatagtattttcatatctcaggtttcttataaatagtaagtgagtcactattgctttgggaaaccttaatctctttattttgtggtgcagatggatgttcgaaacaactgtattgttcgacagtcagcggctgtagacaaagataaagaaataatgcgggtgggaaatcataatgcagttcagggtgaagatcgaacttctactggtattgatggttgggaaacgtcaaaaatgaagaaaaaacgctcctctattaatgcggactgtcatcctaacttggcttcaaataaagtggttgatggttaccgagacttgaagcagggcatacaacagaaaccaacaggcgattcccggtcaagagtgaatggtgactcaaacatgttcag

SEQ ID NO: 162435 - DNA, 544 bp, Arabidopsis thaliana landsberg
acactttctatggaatcttcagctgcctattgttcttccaaaaggtggatgctttgatccatatgactggtttgatcttagcaaagtgttttgctttgttttcgcagctttggtggttaatgatacaagtgcaatgaaacttagggagaagctatatctccttgctcttggttactatcgaagcggtgacttttcaagaagccgggattgtatagaacggtgtttggaggtttgatcatctgttccatggataactcctgaatatcttattgttgatgtattctacaatgccttctttttctttctgtggttttaggttgaaccggagtccggacaggctcaggcactcaaaaaggctatagaggaccgtattgtgaaaggtactattgtgtcaactgtccacacatcgtccattagaatcttcagctgctttttcttaactctcttttgatttttgaaatcagatggtgtgattggcgttggaattgctgttactgctgtaggggttgttgctggtattgctgcagccatattacgcagctaa

SEQ ID NO: 162436 - DNA, 507 bp, Arabidopsis thaliana landsberg
gtttgtccagcgagacaccgttggctacacgacaatagagctgaggaaaccgatcacttgaccgcttggctctacaacatggttaagaactctgaaccagtcgatctccgttttgttacgaggcattattgtggaaatgcaatcaagaggcttatgttcgggacgaggacgttctcggagaaaaccgaagccgatggtggaccgactttggaagatatcgagcatatggatgctatgttcgaggggttagggtttacgtttgcgttttgtatatcggattatctaccgatgcttacgggattggatctaaacggacatgaaaagattatgagagaatccagtgcaattatggataaatatcacgatcctataattgatgagaggattaagatgtggagagaaggtaagagaactcagatcgaagattttctagacattttcatctctatcaaggacgaagctggccagcctttgcttaccgctgatgaaatcaaaccaaccattaag

SEQ ID NO: 162437 - DNA, 165 bp, Arabidopsis thaliana landsberg
gacaaatgaagcatatagtaaagatcttgagcctgttggtggctatctctgccttctggattggtcttttgcaggctgcaattattcctcgaagccatacatggttggtgagtaacaaacaattttgtcctcttttatggtttcttgcttttttgaaattaggat

SEQ ID NO: 162438 - DNA, 786 bp, Arabidopsis thaliana landsberg
gttgctaagtcatacgtagctgaccaaagagttggttacgcagaaccaacctcgggcgttgagctttacctctgtccaacactgggtgaaaccttggatttgttgagcaaaatcatctccaaggattatcttgatgaggtcaagtgttcagaagatatcgggttgattggtgttgttgtgtggaggcgtgcagttgtcgcgtctcctggctcacgccataagccgggattcaaacgtcagcattcttctacaggcactaagaggtctgtattggctccagaaaaccaaaagtctagaagtgtgagtgttacgaatccttctgttgtaaatgttgaatccatgaggaatcatggtttggttggttgtgatgatgatgatgaagacatgcctcctggatttggtcctgtagctgcgaaagatgacgatgatttaccggaatttaactttaattcctccagtggaccggttacttcttctcctcgaccaccgttgcagtcccggtctttggatcaagtaagggagctcatactcaagtatggaaattcaacaggtagtggtagtaaacgaccatgggatggtcatgatgatgatgatgacgacgacattcctgaatggcaaccgcaactgccaccaccacctcctgacttgagtcctcaatttcatagcggaaccatggccagaccaccagcacaacgacctgttgcgggaccaccgagtggatggaaggccaatcaaaacgcacctaggcaacaacagtacagtgcacgtaggaacagaggattttga

SEQ ID NO: 162439 - DNA, 898 bp, Arabidopsis thaliana landsberg
ggcttcttcgtttttccttaccactgttgcagctgcaataggcttcttcacccttttgagaaaactcagattccatcatgataacaaagaaaagaagtcaacttctttatctccttcatcatctccatcttctttgtctccttcatcagttcctccaccttcttcgtcttgcatctggacacaccaagtctttcccagcttcagcggggaagatgtccgtagagactttctcagtcacattcagatggagtttcaaagaaaatgaatcacaccatttgttgataacaatatcaagagaggagaatctatcggtccagaactcattcgggcgattagagggtccaagatcgcaatcatcttgctctccaagaactacgcttcttcaagctggtgcttagacgaattggtggagatcataaagtgcaaggaagaaatggttcaaacagtgatagtcattttctacaaagtggatccatctcttgtaaagaagctgaccggtgatttcgggaaggtattcagaaacacttgtaagggtaaagaaagagaaaacattgaaagatggagagaagctttcaaaaaagtagcaacaatagctggttacgattcaagaaaatggttagttcttttgatctttaattgaccactcttaatcgtttgcgttatagatataggtaaagcttttaaaccagaatagtactaataatgttttcttgatatgcatgcaaaatcttatgatgtgtatgtaacatgttgtgtgttgcacctccctttaattttacacagggataacgaagcgaccatgattgaaaacattgccactgatatttcagaaatgctgaatcattctacgccatcacgtgattttgacgatttaattgggatgagagctcatatgaaa

SEQ ID NO: 162440 - DNA, 223 bp, Arabidopsis thaliana landsberg
aacatccgccgcgcgagaactggcgggaaaattcagccatcgcctcgaagaaaaaacctcccaaatctgagaaatcggaaaagatgacccacaccgaaaccctaaatctgctcgatgaaatcgagtctcttgtctccgatcagcttcaagtggtaattgccgatttccttctccatttctggattccttaatttaactagttagggttcttcgatttccactt

SEQ ID NO: 162441 - DNA, 604 bp, Arabidopsis thaliana landsberg
acagtccataaggcattttaattttagagctcataaagcccaaaaaggtccgatactaaacaagtttactgaattgtgtcaaatcaaacagaaaagcagaaagtctcttcctttttaacagtttcgccgatttcgaattccgaagctttttagaatggagaaacgttcagatacagagagttcagagattttagaagattggcatttatctcctcccgtgaatccggaagaaggaatcgtaatggtttctgttcccacttcaccagagtctgacgatgcgagattgaatccaccaaaagagattgaaactagggtttcggacaagaaattaggttccacatcaacagtcgccggtgaagcagcagcgaggagagtgttgccgccgtggatggagccgtcgtacgaatggggtgctgggaaatggaaagaagatggaagaaagaagaagaaagagaaagagaaagaagagattataccttttaaagaaatcattgaagctctgcttcgaaactccggtgacaaggttaaggaagacaaggacaaggttgataaaagtcacagctgtgttgagatattgaagtcaatgggctttaagtttccttaa

SEQ ID NO: 162442 - DNA, 1260 bp, Arabidopsis thaliana landsberg
atgaggaggatccgaagacgctttgatagatcaaaaagtctagtagatttggtcgcccttggtcgagtagaggatcgagtaagaggggcgagtagaccgatctgctacttcctctgtggctacttggatcgagtaagtgggtcgagtgaattgatgcctcctctatggctgcctggatcgagtgaactggtcgagtagattgttctgctgcttctctcctggtttgatagagtagagggtcaagtagaaatccttgtaagctccttctacacatgaaaacacaccaaaacatgcaatatgtatgcaaaataagttaaatgtgatgcaaaatgatatgatacaatgagtgatcactaagctaaatgatgataaataaatgcctaaaatgagtaaaatacactgttatcaactcccccaagcttatttgttgcttgccctcaagcaaacaaaaaatcttaagttgaaggaaaagtttgaaggtgaggattcaaaaaccaaagcatgcatatagaacggggaagctcaatatctaggtagctaattctatgttgcaagatgatagacccttacttaaaaactttagccatgctcgtcacaatgcaacctaacaacctgccttaatatattcaagcattcacattgatatgtctataatttgcatgttttacacatccttttatcaccattttgagtctagtttcatccatctttcatagcattcatcatcatttttgtacattttgcatcttcagtcgagtgtaggtctagtcttgcatacattctgcattctggagtcgtttcaggtactttggagctattggtgcttagaaagaggaaaaacagaacagaaagtcacatttccaccaacatactcgatcaccagtagcagagggagaagcactcagctcagcagtccatccagacacttctactcgatcgcagaggagactaggcagtccattctgccagatatactcgatcgtagaggagatgaggcagtccattctgcagttctactcaatcacaaagatgaaggagtccatcctgacaattatactcgatcgtagaggcaaccaggcagtccactttggcagtccaccagtatactcgatcgtagaggagaagaaccagtccatcctgacagctgaccaacatactcgatcacagaggccaagaagcagcctagaccattctttcaaccaacctactcgaccaccacctcgaccctttgatcaatccgcactgaaccagataacgtga

SEQ ID NO: 162443 - DNA, 376 bp, Arabidopsis thaliana landsberg
gccatccatagatttattccaccatcttctctttatctctggaaatccatcgccgccgcaaccgtatggtacgtttcgtttagatctacggttttgtaatcatccgttgattcgtcgacatcagcaacgatttgcttcatccacaaaccgaataggttcgattcaaacataagcctgggatttgagtcaattatttgcatttgcctacttttccattttctgggcacgccagatatttgatgaattgctcgaatagatagatgtcaaagtgaagaaaagaagtgaagcgagccgattcgacatgtacgggagaaaagggtatcagcttatcaaagattttgccaccggagagaagggtcagctcaaacctttcaac

SEQ ID NO: 162444 - DNA, 607 bp, Arabidopsis thaliana landsberg
atataaagagatccctcaacataccaaaactagctgtgactccaccggttgtacgagatgcacgacttgaggtatggaagaacttggcacttgattggtaattacataacaccgaggaaatttttgccattgaatcaaacttaagcttccttgttgcattcgagctcctgcggaagaacacactaaaataagaggtaaacattgattggctgcatactcggtccatcgagttattttttcttctactacggatcccatgctaccccccatataccgaaaatatcataaccccaagggctaccgtaataccgtttagttgacctgtacatgtttgaacagcgtcatgtcaatcctgtagttttgtgcgcagaggtctaagaggatttgtataggttcctctttagcatgtaatttgataggatccgcatagaccttgtcttcatctataggattacaaggatccggatctatcgaaagctggattctttctggacaagtcgttcccaaataatgtccacattgttcacggacattcataaagactttcgagtcctctatcaacaaccaacctagccatccgcctgtcgggcttatgtagttctagtta

SEQ ID NO: 162445 - DNA, 203 bp, Arabidopsis thaliana landsberg
tctcgatgttaaatggagcttttcttctatatcttgtagtgctatgcagcgtggtatgcctcagttcctggtttgaaagtccttgctccgtattcagctgaagatgctcgtggtcttcttaaagctgccattagagaccctgaccctgttgtcttccttgaaaacgagttactgtaagtagtattcctaatttgagttcttgc

SEQ ID NO: 162446 - DNA, 767 bp, Arabidopsis thaliana landsberg
gtatggttgcttcactcactcctttgcctgtgattggtgtccctgtccgtgctacccgtttggatggagttgattcacttctttccatcgttcaggtacactttcattgcatcataattaacttcagctattgattttttgcaccatttgaaacgatttaggtctgcgattcttaagcctttccatttattctttttctttttgttaccaaagatgcctagaggtgttcctgttgcgacagttgcaataaacaatgcgaccaacgcagccttgcttgcagttcggatgttgggaatctctgatacggatcttgtctcaaggttctctttcttatcttttcttttgttacatatgagtcagatagaagaagaattagggaaccttaatataaatgagattggtggattttgatttggttgatcaggatgaggcagtaccaggaagacatgagagatgagaacctgaataaaggagagaaactggagacagaaggttgggaatcatatttgaaccagtgagagtgttactggtcagagcactcattgggaaattggggagtgaaccatcacgattgattttgctgctacgaagatcataatagagtgatctgagagttagcctcaattcttgagttagtttgttgttgtaattgtcattgccatccgctttaagtttaaagcatgattcattgggagtcaatgtaattgagcttgtttttccaaaagatgtccatgaaaactgtaagttttaacactaaagagtccttt

SEQ ID NO: 162447 - DNA, 287 bp, Arabidopsis thaliana landsberg
atcagtttcctttggactcttcctcggtggacgccgttttagccatttccaaaacatctggtttcccagtgataaaatatgtggggagttctcaagaatcttgaatggcactgattttgtgtgcaaacatttggagggtgaaatgcaacgggtttgtctcgtgcatctggtctatgtaatgggtttatttgacctcttataatggcatcttccttgcagaccattcaaaggagagtggcgttggctgcttttctggagccacagtgtctctatttgaaatctattaa

SEQ ID NO: 162448 - DNA, 516 bp, Arabidopsis thaliana landsberg
aacttcattttggtggcgatacgtgggtggttagttattgtattccgagaattctattttcagcgagtgttttaacatgtgtagttcgtgaaatcggcaaagctttgtatcgtttaccatccatcgacgaaagatggtgtattcttgactctggagatcccatttgggaactcaaaagagaacttccttattttcgacaaggaatgagtggaaaacctgaagaacgatggagataatctgcctttaaagacatttttaaaactgtcattaaaaccaatgatttgatagcatatagattctgtctgtcaaaatcctctatacaaacacacgcacaccgtattcaactttgctcatatcagatctctatggcactaacaagctctggcgactagacagatatcccgcaatcccatgactccaggcgtagaaccttgacaagtatatgaccggttatccactgtgcttagcggtcaatgaaggacttattcatcagctcgacagcgttgtccatgaact

SEQ ID NO: 162449 - DNA, 1091 bp, Arabidopsis thaliana landsberg
  unsure (1)..(1091): unsure at all n locations
tgtcgatcgacactggatccggacagtaccctgtgaggtgcaaatacctatgcagcccgagtctgtctacactcctcctgtcctttatccgaggaggcgtcgttctaagcaagagaatcatgctgccaagtgcacaaccataatggagaagatcctccatactcttcctaaggatgcttcaaagacatcttctacctcactcaacaagtatgtcaagcgagttgttgacaatggaattagctcagatgaagctaagctgcttaccagagacatcagtgcaatcatactgccaaaggccaagaaggagaaggcactgagagtagacatagctgagtacatccgcaccattactcctggtcagaccattgagaannnnnnnnnnnnnnnnnnnnnnnttcttgattgctctatctccacaagcagattcagccgctctttgtgtgatctggaatcaagcatcaacctcatgcctaagtctgttgttgagagactaggcatgactcactacagacctactcgcatcactctccttttcgcggatcgctccaagcgaatccctgaaggtatccttgaagatgtttttgttaaggttggtaacaggaacatgttggttaggatttgatcagacttgttaggcatatggacttagtttgaatgatcatggcaataggctacagaatgtttggagttcttttgttttcaaaacctcttccacgggttcggcttttgtgttttgctagagggcaagcaaaacctatgtctggggagttgatataacccgattttcactgattttatctatgttttaggtataggattttgagtctttatgttacttcttgagtctttttagtgttgtttcaggtatactatgcaatgggacaacaatggagataaggagacattttggaggaaaagctaacggaaaggaagctaaggacgattttggattcaggaatcagcgaggagtgtcgaccgacacactcttggtgtcgatcgacacaagtttcggcccaacaaaaaccctagacgctttcaagttttcagaagctcaagtttgccccataagacttccctatttgcattattag

SEQ ID NO: 162450 - DNA, 753 bp, Arabidopsis thaliana landsberg
ttgtaacatttacaattacaccaacctgtgtcggaaaaaataggctggtcagtttatcaaacaactcttgtttcagagaattagtttttttctctattttactcttactggttttatcacataataagagtatcaatttgttttctagattctttcagcgcaatttgcaagggagaacaatattaaccagcctggaacgatatatctattggatacagatggtaggaagtggctgacaacggttaaacgggacaagaaaggaacaatgagtttgggaaagggttggaaagagtttgctgatacaaaagacttaaagtcaggcgactcctttacgatggagttaatatgggaagacacaaatcctgtgctcagtttgttacgtacaaagtttagcagttctaaatctaacaaggaagagtccatttttttagaaccaaaaagtagagattcatcctccccaacaatcgtaaacagattcgtgacattagcacttacaccagaagatgttacagcctgtaaactggtaacttggtcaaactatttcttgtttctgttgttgaattataaatggtaatgagagatgtgtttgttgaaatcttttgcagattcttccaagtaagttcatgaaggctaatggcatcaacaacaaacttgggaagataactcttttgggtgaaaacggagtcgaatggccgggatatatgttgtcgctagatggaactctcgctttaggaaatggttgggaaggctttt

SEQ ID NO: 162451 - DNA, 258 bp, Arabidopsis thaliana landsberg
agcttgcgaatcagagagcttgagaagaaatcaaatcgagaaaatgaggatatcgttggcgattgcatcaactgcgaagagatttgttcatcggagtcttgtggtgagaggtaatgctgcaactgtttctccctctttttcctttttctggagacgagctttctctggtaagactagttatgattacagagagaaactgagtagaaatgggctgagtgaattaaagttagatgacgctgttgctctgttcggtgaaat

SEQ ID NO: 162452 - DNA, 1076 bp, Arabidopsis thaliana landsberg
atgttttataacatgaattcttttctcaatcaggcgaaagcacttgctgagaaaaatgaacgtgatcttcaagtacaaagagaacaagctgagaaagatgtaactttcattaccacgtgtttcaagtctgggccctcttgcagtcattagtgtaaaatatattgtgctaccttaggaactgtctcaacaatgaccatccgtcctttttttcccttgtgtttattgaccatccttgatcctctctgtcttgtttttttgtttaatcaccatacttattctggatttcagaggattggtgggaccctggatgttgagataagacgttggggtgcagggaaggagggaaacttgcgtgctctgctttcaacattacaatatgtgtgtcttattgtccgttttctttattatttgtacctctgatgtttatttgtatctttgatgttatgaatccacaatctcttctgatgttgttatgtgaatgagcaggttctttggccagaatgcggttggcagcctgtatcgttgaccgatttaattaccggtgcatctgtcaagaaagtttacaggaaggccactctctgtatacatcctgacaaagttcagcaaaaaggagccaatctccagcagaaatacattgccgagaaagttttcgacatgctcaaggtaagtgaattcaccatctttctggaactaaatccatcactgctacttcagctgccaccgacaaaacaccttgcattttacgaataaccgcacaattgtataaatccacatttgctggcttcatctcctttgtcatgacaataaacaggaagcatggaacaagtttaactcagaagaactcttctgaggaaatcatggggctatgttttgagatgtgtttttcgtgtgccgcccaaaagatgatacatttggcattcattaaatagccaaagatgatgcccaagttggaggcagatagttgtggatagagtatgtattcccaggattgattacccatcactgcatcattataggcaggcatcgaagcaatatgggcattctttttttgtcattatccttctcgagtcttgtcc

SEQ ID NO: 162453 - DNA, 757 bp, Arabidopsis thaliana landsberg
aaatgatctcctatagatctcaccttttcgattaaaagatgtatttttctcatctgtgcagttctaagattctcattttctgactatataaacatgaaagatggcgaaaggttgatttcaggatcataataaagtaagagcaactgaaaaagagaaaaatactctggaagtttttaatggtcgccttgaatactgcagaggagtacatcatggtatcatccatgaagagaccgaaaaactcgttgctctattagcagaaatccgatcataaacaagaaaacaacgaggaaatgttcatcgagatttaaagagaggtggagattaattctcaggcacgtacaaggtcatagtgtcgcgaaatgttccttcgagcttgagttaaattgttctgcctatagagatgctttaagaaatgctttgcagatgataaaccagtagtcaaaaaaattggtgtccaccgacccctgaaaaataaataaaaacaagtgcaatgggacaaatgaagtaacttagttgcatgtttgaaactttaccttttctcagcaagatttgagttcaattctttgctagcaatgagaatctgcaagttttcatgatcaaatgtcgatcaaaagtttttaaacatagatctacatgcttcaatatgtgtatgtaacaataccatgatcagattcaaaagtcctgtttccttattgacaaatgaaaaatctccattgatataagcatcagcaagtcctaaatcaacctgtgtcataac

SEQ ID NO: 162454 - DNA, 3330 bp, Arabidopsis thaliana landsberg
attgttcatcttcttctccttgttgcattgaggtgagttcaatttgatctatcaatgtctaaatgcatgctttttgaattatcggatctcttgtgtttgatttcattgatagagatccaattatgatctagatctgaagaatcctgttttttgagttcctattggttaaaaagtttcctcatttagctttagttcgaatctggaatgttaaacgattcggatcgagatttagcagtagtagaattcagttaggtagagtgatatttttatactattagtcttcaattataattgcattgagcttttcctacttcactgtatcgttttctattgtaaagattgatcctttttatatattatgcagggggtgttgttgatgttctgacgatctgatttgagtagatctgggtagggggcaaggtctctgggtctacttttgatttgagaattttttaagtgaagtgaagatatgacaagtgctcttggatggagatttccttccactaatggaaatggccctgccccaagtgacacggtaataattacttgattcagtattaacattcatcacacgggtttatggaaaagcttgtttagttgatatactgcaatctttctgagttgcaaagtcagatctggtgtattagcaggatgattaagctgatatgtcccttgcattttgaatctgatttgaaaaaagtacttgagctaagtccattgttaattaatggctttgtaccagtcagttatatctgatagagtgtcatgataaaggttatagtttttccattgcataggagcgaaaaggtcttgttgctcttttaacttattttctgttgtttggtcttgattgcaggagagaaatggggatatgaagatgcatgattcagagcccccaactccacattcaaccacaaagatgagtttgaggtaacgcatatatgtatttggtactgcatgggagctaatcatcgtgataaaattgaggttttatcagtatttgttgcaccaccatcttggtttaacaatgcctgtggaaattaatattatctggattggtttcctatgttatcctttcaaatgagacattttaagcagaaaggcacacctattagcgaattagtatctaactttccccatcccctgcagagaccggacaaccagcatggaagatccagatgggacattagcaagtgttgcccaatgcattgagcagctgcgccaaggttcatcatctgcacaagaaagagaatattgtctgaagcagttactggaccttatagaaatgcgtgagaatgcattcagtgctgtcggatcacactcccaagctgtgccagtacttgtctctcttctccgatcgggatcagttggagtgaagatacaagctgcaaccgtcttgggttcactctgcaaggagaacgaacttagagttaaggtgttacttgggggatgcattcctccattgcttggtcttctcaagtccagttcagtcgaagggcagatcgctgcagcaaagacaatctatgctgtttctgaaggtggggttaaagaccatgttggatcaaaaatattttccactgagggagttgtaccggttctgtgggaccaattgcgcagtggaaataagaaaggagaggttgatggtttgttaactggtgcacttaagaacctttctagtaccacagagggattttggtctgagacaattcgagctgggggagtggatgtacttgtgaagctgctcacaagcgggcagtcaagtacactatctaatgtctgcttccttcttgcgtgtatgatgatggaagacgcctctgtttgttccagtgtattgactgcagacattacaaaacagcttctcaaattattaggatcgggtaatgaagccccagtgagggcagaggctgctgctgctctcaagtcgctttctgctcaatctaaggaagcaaagcgggaaatcgctaattctaatggtattcctgttttaataaatgcaacaatagctccatctaaagaattcatgcaaggtgaatatgcgcaagcattacaagaaaatgcaatgtgtgcccttgctaatatttccggtggtttgtcatatgtcatatcaagccttggtcagagccttgaatcttgctcttcgcctgctcagactgccgacacccttggggctttagcttcagcattgatgatatatgatggcaaggcagaaactacaagagcatcagatccattggtcgttgaacagactctgctgaagcagtttaagcctcgtctaccattcttggtgcaagaacgtacaattgaagcacttgcaagtttgtatgggaattccatactctctgtcaaactttccaactcggatgcaaaacgtttgcttgttggtctaataacgatggcggtgaatgaggttcaagatgagcttgtaaaggctcttctgatgctgtgtatccatgaaggtagcctgtggcaagcactacagggccgtgaagggatccaattgctaatatctcttttgggtctttcatccgaacagcagcaagaatgtgctgttgcacttctttgccttttgtctaacgaaaatgatgaaagcaagtgggccatcactgctgctggaggtatacctccacttgttcaaattctagagactgggtcggccaaagccagggaagactctgcaactatccttaggaacttgtgcaatcatagcgaagatatacgtgcttgtgttgaaagtgctgatgctgtccctgctctcttatggctactaaagaatggtagtccaaatggtaaagaaattgccgccaagacattgaatcatttgattcataaatcagatactgcaactatcagtcagcttactgctttgctgaccagtgatctacctgagtctaaaatttacgttttggatgcattgaagagtatgctttctgtggtcccattcaatgacatgctacgtgaaggcagtgcttccaatgatgctattgagacaatgatcaagttgatgagctctggtaaagaagaaactcaagcaaattcagcatcagctcttgcagctatcttccagagcagaaaggatttgcgtgagagtgctctagccctcaaaactctcttgtcggccataaaactgttaaatgtggattctgagaggatccttgttgagttttgccgctgccttgctgcaatcttactttcaattaaggagaatcgcaatgtggccatttttgccagagaagcattgcctaccatagtatctctagccaactcttctgttctagaagttgctgagcaaggaatgtgcgctttggctaatcttatattggacagtgaagt

SEQ ID NO: 162455 - DNA, 547 bp, Arabidopsis thaliana landsberg
atggtagtaaagaagaatatgcatgtgggtgcgtgagagaaaaactcgttatcttcttgctaatgattttggaatattgatgtattattaattcattattgacctatttgactaattaacccctcttggccggttaaggatcaaagatgttttccaaaagttgtatatatgtatggtttgcaattctaaccaactagaccggttaggggtaagtcagcattctctcctctgatctatgtatatgtgtttctttggtcgactcatctctcccaaaatatacttgatcggagaagagaagaagaatgctaacttatccggaatgggctagctggtgattttagaaattatgcatggtatatatataagaaaatgtctaagatctaaaggaaagttgtatgttggtaatattttttttttttaactccatgcaggatcaagctcaaagaacggcgtaaaaccggagtcaaacatctttgcatgactcattacaatatgctctagatgatggattgatatgaatatgcgagaaataaaatcagtatgaaac

SEQ ID NO: 162456 - DNA, 1243 bp, Arabidopsis thaliana landsberg
gttatgattctgaccaggtatgattaccgtgctggattctggggagtgatgggaaacccttgtctcggtataataccagtaagaactttcacatctcttctatattgctttgaattccagtacactgtttcataattctttgtattgattggtacttgatgaggaaatgggaaacaattgttggttgatgcagccatttatagaggagtttagtcgaccaatgccggataactgcggtgcaggaaacacgagtgtgtttgtaaacggaagagagcttcacgagagagacctagagttactatcaagtagaggtcttcctcgaggcaagaaccgttcttacatcattgatatagcaggaagagttcttgatggagactctggtgaagaacttaagagtcttggcagattagctccaacgtaagcacaacacaattccatgtaatcaaatttttacatcaatcatttagttgattctgaaattttatggttgaaaattgaatcagggttgacaaggtgaagcatggatttggcatgagggttccaagatcattagtttcgtgaagcttcgtcagctttgttttgacctctctgatttgtaaattattctttgtgattgatatataacacatctttgcttatattctgacccaaaacttatttgctattctgtttttgggtttagtttcttttttgggggttctcttacaatgttccattctttctcttactttttttttttttgtctaagagataaaccgtatggttttatatcttgtgatctggtttatgtaaattgatcattttttattgtggataacctgttgcctgttgggaaataaaataatatttgtttgattttgtgacaaaagataaatgtatatatttatagatctgtccaggctgtgtgtacttgttaaatcgttttcaagaaagaaaacacactggtatggtagatccaaaatcaacttcaagtaagatgggtccacgtagcaaatatttaaagcccatggaataatttattcacaatgggcctcgtggtcgtggtgtaccctactccatattaaaaaacagagtcgataatctagtctgtctaaaacgactaattcatgtctaaagattagtttatgttttaaatcaccgagaactaattctaccgtctagatagaacgatttttttttttttctctagatagaacgtttaaaacaaaattagcatgaaaattaccacggttatcagaagaca

SEQ ID NO: 162457 - DNA, 432 bp, Arabidopsis thaliana landsberg
gttgccggaagaaatttctaacttgggttccttgcaatatctcaacttgtcatacacggcaataaaatctttaccagatggtttgaaggagatgaaacgactaatcgacttgaatttggagtttactcgtgagctagaaagtattgttgggacagcaacaagtctaccaaaacttcaagtgttgagattattttgttccagagtttgtgttgatgacatagtaatgaaagagctacaactcttggagcacttggagattttaacagcaaccatagaggatgcggtgattttgaaaaatatacaaggagtggaccgattagcgagtagtattcgaggtttatgtctcagcaatatgtcagcacctgttgtaatattaaacacggtagttctgggagctcttcaacgcctactatttggaactcgaaaatctct

SEQ ID NO: 162458 - DNA, 632 bp, Arabidopsis thaliana landsberg
atgaaacccgacccggacgatgaaccggactaccttttgggtcaccgggtcatcgggtcaaccgggttggaccacgggttaattagttaaaatttatttaataaatttaatattaatagaaaatttagagtattttataataaaaaaaatttgtagtatttataaatataaaacaaaaataatcatatcatatttaatcaaatataaaattatattatatttaacaaaatataaaatcatttacacccaaatatatatatatatatatatatagaaaaaatcaaacaataataataaagtggttaaaaatttgaaatccaataaatgtctaacaccgtaacaaatatattaggagatcatcaatgacataaataaattaatacaacatcgtgaattaaaacaactaatctcgattgtctctctcaccattcgattcaattttaaggcggtattgtaaagttttcaccaaaatctaaaacatcaaatgaatttaagaactgaaaaaacttttaaaaataattgaataaagtctaaaatcccatattttattgtaaaatcaagagaactttttaaaacccacactcggccggttcaatcgggtcacgggttaattgcgagtttttgtgggtttt

SEQ ID NO: 162459 - DNA, 302 bp, Arabidopsis thaliana landsberg; identical to SEQ ID NO: 60838

SEQ ID NO: 162460 - DNA, 994 bp, Arabidopsis thaliana landsberg
atgtgtttggacaacatcaccaacaacaacaactttcaacatcctggcgtgtcaaacacacaagactactcaccgttactttcggcgaataactacgggttgaataatcacttgatgcagcaacaggatcagcttcatggttttgatcagaacttgtgtatgatgagtgaaatcatcaataacaacaacggtttacaacatcctaatctctcaaacactgttccacatgaattcccttatggtaacactagcttctctcaagatatgttttcgagctatgatgggagcagtttgctacagacatcttctctgccacctctccacaacattcctaacagctattgtttttctgacaactcaagacttctctgctaacaaatctgtccaaaaggatttgttttttgaagcttcattaagagtcagtcaatacttataagtaggaagctgatcagagagagattgaagctgtttctgcttctgaattcttcctgctactgtctttttttattttacagtgttgttataactgtaaaacagatccatttgtggagattttgtttttacttttaagttggtatttcagttagtattgacatatatatatatgaacttccataaaagtctttcacaaaaacttgcatgaaacaaattataatctaaaatcacttatggtgacaagactgtttcaattggttgatacaacctgcaaagtgaaatcctttactcttgcatcttataacaaacttgtaacttagtatccttcttgtctgaatcagctaatatatacatgaagatggaaagtagctctgatttcgtgaagacaatattctctgcacccaattactgtggcgagtttgacaatgctggtgcattgatgagtgttgatgatagcttaacatgttcatttcaaatccttaaggcatctgagaagaaagaaagatttggattcaacaacagtgttcctagaccaggaaccccacctcataaggtgtga

SEQ ID NO: 162461 - DNA, 200 bp, Arabidopsis thaliana landsberg
catgggattgtctctattatattttagaatgcatcattccaagaaatcttgtcagacgttcggcagcatatcgttgatggtttcactcccaaggccttgaattttttcagtagagagtttgacttctttgaaaaggtcacatctatttctggggcattacttcctcttccaaaggaagaacgagtagctggtattaggag

SEQ ID NO: 162462 - DNA, 492 bp, Arabidopsis thaliana landsberg
gaattgtttgagaacctagctcagtcaaatggaaattacaacgaggactgcgacaggatcataagatgattagatgactcggatgacaaacacaagaaaaaaatcaaagcgcggaatgacaagctggacatgattcttcttagccagcagaagcatgtgcacttccttgttgctgacgagcagtatcaagtccaagatggggtgggaaaccagttagaagaagttagctacatcaataatcaatatgattacaggagatttattaaggacttctccaagatagccaggccgttaaccagactattgtgcaaggagacggagttcgaattcgataaggactgcctcaaatcatttcacgccatcaaggaggctttggtatctgctcctgttgttcgagctcctaattcggactatccgtttgagattatgtatgatgcatcagattacgccgtaggagctgtgctaggccagagaatagacaagaatcttcac

SEQ ID NO: 162463 - DNA, 119 bp, Arabidopsis thaliana landsberg
agaagatgagtgggaagaagagcttaaaggagttgaagagggagagggttgagaaggaaagagagagagcccttttcatggaacagagccagagagccggtggtttttcccggaggtga

SEQ ID NO: 162464 - DNA, 264 bp, Arabidopsis thaliana landsberg
gttactatgactatagacgataggtctatgaaattatcccacatttcgtatggactgcaacatgttatcttcactcccgtggtactgggagaatgtgatcatgttcaatcagtcgaagactgaaaatgaaaaaaaacagcaatctactgagtgggaatttgaaaaaggtgaaggaattgaatctatagttccagatttcttaggctttgagaaagtcagtagtggctgtgctactagtttttggctcactgccgtatcaaaaag

SEQ ID NO: 162465 - DNA, 369 bp, Arabidopsis thaliana landsberg
atgcagatatacagagagtgtgatgaatcatggaggctaacgttaaacggagacctaaatattccgctggggaggacagaagagttctgtgaaggaccatgcttctcagaaacacatttggctttgaattgcattgaagaaattattcaccactacagattctttaacagagccaccattcacgacatccgtgaaaccctcaagtctggctgcagctacggacctgaacgaggtttacgatttttaaagactggttcttgttctggtttataccggttattcgcttccttgtttaatgctagtttatataattgtatgcaggtgttttcaacgtcttggagcatattgaagatgaagatgaaaatgcaa

SEQ ID NO: 162466 - DNA, 1060 bp, Arabidopsis thaliana landsberg
tatttcttttaaaaatgatgaatgtgaagcatgtattcttggtaaacatcgcaaatccgtgtttcccaaatctagcactatctatgagaaatgttttgatcttattcactcggatgtgtggacatcaccttgcttatctagagaaaatcataagtattttgtaaccttcattgatgaaaaatcgaagttcacttggcttacgttatcaccttctaaagatagagtcctaaaagcttttactaactttcaaacttatgtgactaatcattatgatgctaagataaaaatcttaaggtcagataacggaggggaatacacaagtcatgcctttaaacaacatctaaacaaacatggaataatccatcaaacaagctgcccatacacaccacaacaaaatggagtagctgaaagaaagaataggcatcttatggaggtcgcacgagccatgatgttccatacaaatgttccaaaacatttttggagtgatgcggtggtctcagcgtcctacttaatcaaccgaacaccaactaagatcttactagactcttctccctttgaagtgcttaataaagttaaaccgtttatcaatcacttacgagtatttgggtgtgtatgctttgttcttatttcaggagaacaaaggaacaggttacaaccaaagagtacaaaaggcatgttcattggttactctattaatcaaaaggggtataaatgttatgtaccggaaacaagaaaagttcttatctctagagatgtgaagtttctcgagtctaaaagctactatgataagaagaattgggaagatattcaagatcttactcactctccctcggatagagctacaaatctccggatcatccttgaaagacttggtgtaagtaatattcagactcaaacaacaccaagaacctcaaatccggagactatcacacaaccagagaacatgaaagaagaagaagaagaagaagaagaagaagaagaagaaaaacaaggaaaagaagaagcaatagaagaagaagaagaagaagaagaagaagaagaagaagaagataaggtgtag

SEQ ID NO: 162467 - DNA, 179 bp, Arabidopsis thaliana landsberg
gcgctaggggtattcaatccaactgcacgtacttggaacgtacttcctgtgcaacccatccctatggcgccccgctcaatcaggtgtatgtctgaatatgaaggacatatttttcttgtagatgcatcgtctctggagcccatggtgtataggcttaaccggttggagtccgtttggga

SEQ ID NO: 162468 - DNA, 120 bp, Arabidopsis thaliana landsberg; identical to SEQ ID NO: 2984

SEQ ID NO: 162469 - DNA, 269 bp, Arabidopsis thaliana landsberg
  unsure (1)..(269): unsure at all n locations
tcgaattaaagtcaatggcgtcacgtttatgtcttctccttctcgttgcgtgtatcgccggagcatttgccggagacgtcatcgaactcaatcgatctcagagggagttcgattatttcgctctatctcttcaatggcctggaacctattgccgtnnnnnnnnnnnnnnnnnctccaccaacgcttgttgcagagggtaaatatttatcttaatttatatcgatctccaatctcatattggaattgttatcgtctatgatgtatcgggt

SEQ ID NO: 162470 - DNA, 204 bp, Arabidopsis thaliana landsberg
ctttctccggtgagcttctctgtttccggcgttgttttccggttaccgttcttcatgtcttctaatctttatcgtcggaagagtatgaagcttggagaaggcgaaggctctctcgtgttatcgccagtcaccggaagaagctagcataaagtcagagtggcaaaactgtaaatagtggaggatgatgagggtaaaaggataaga

SEQ ID NO: 162471 - DNA, 272 bp, Arabidopsis thaliana landsberg
aaaaaatgaaaaaataagccttggaaatttcaaagaaaatgtttaaataattcttattgattataatatataaattttaggagttttaaaggctagagatataaaaaaattgtcaagcatgtttcagaaaatatattatattaactaatcatgcaagtttagttattagtagtattttctagaaataaacctactggtatttgtttaagtaaaaaatatgtaatacttacgtatccttaaaataaaaaaaacgagtatatgtgatatgttct

SEQ ID NO: 162472 - DNA, 165 bp, Arabidopsis thaliana landsberg
gtagacagaagatttgaatttcttgattccaccgtttggacgaacgtcttcaatgctgtaaccgaggggagcttcgtaaaataaggaactactactgctggacttctttttaccacctttcgactccatcataatctcattcacgcttttctgtattagacaaaa

SEQ ID NO: 162473 - DNA, 82 bp, Arabidopsis thaliana landsberg
ctctacctatacatacacaaaccctttatcctcgaaagcttcctggttaggtttttatcaaaccctttgagccaatcggtaa

SEQ ID NO: 162474 - DNA, 180 bp, Arabidopsis thaliana landsberg
agaaagaacaggtaggctcgtagaaggggtctggtttagagaataagtgaattaattattcttgataataatgcatgctttagtataagatttcttggcttctccggttgtcttaattctaagtatagagagtttcgcgaaacaccactggttactctaaaaatcatagtttaggtttaa

SEQ ID NO: 162475 - DNA, 435 bp, Arabidopsis thaliana landsberg
aggcatctagttgtcctaattgatccacatcatcgagaacaagaaacactttcttgtctctcaaccgttcgtgtgctactcctaaatgaggaatcatgatgtctttctggttgatcatcttagacaacattttgttttgaagttgcaactgtacactatattcatcaagacaaggacttggataacattctttgatattcaccatgattgtgctcagttggaaactcttggagacttggcttaacagaaacctagcgatagtggtcttaccaatcccaggcggaccccatatcccaatcatcctcacgtcatctaaatctaggcgtaacaatgctcgcatattttccatatgagctcccattccaatcaatgcttcgaaatcccttgacggtgtagcattaatcaacttgtttgaaacatcggtggcaatatttt

SEQ ID NO: 162476 - DNA, 111 bp, Arabidopsis thaliana landsberg
attgatttataaattttgtcatgctatccaacctctctctctctctctctctctctctctctctctctctctctctctctctctctctctctctctctcatctcaccatca

SEQ ID NO: 162477 - DNA, 298 bp, Arabidopsis thaliana landsberg
aaaatgtgtctcacgaaacttttatcacgatttgatatgacgaaactgatttctcccaaaccctaacgattctgcttcttctccttttctctctttttctcctttataaaacgaaaagtggctaactaaagccctaatttcgagtttccttcttttataggcacactttagggtttccaattaacccaaccaattaaaccggatgatttaaaaacaaaccctaatcgattttccggttcacgggcgttacacattgagccaagtccaatttcaccatatatatgcacgacgcttgcaa

SEQ ID NO: 162478 - DNA, 404 bp, Arabidopsis thaliana landsberg
acctaactaaacgtcgatccaatgtttaaaagtcgatcctttcttgttgacggagaagataaaattttgcatagattagccatgttaacactaaaccatatgctaattaaagccacactctctcagctagctaacgtgtgcttactcacattgggctaattaatcttaaaatagagaatttttgcagctgaaggagggaataaataatactctgtcttccgactacccagacagcatacttgagtgattacataaacacagttacaaagatcaatcgaaccaaacacaaacactctaaataagatgcaagacttatactaaccatcaaagaagacactgttgtggtttggataatgagatcatttggatccgatagcagattctattgctacttcaaagccatg

SEQ ID NO: 162479 - DNA, 228 bp, Arabidopsis thaliana landsberg
atggatgaacaaacttctcattgttaagcgactctataccaaaatggatgatagactcattccatcctcaaaacaaacgccgggtattttttatctacactgagacaacctatttgtcaatcctttcccacgatcaagacaattggctgaatcccgtgaaaccaatacagagaagttcattgatatcttctttggcgtaaagcaaatcgacttcgattctcgaataat

SEQ ID NO: 162480 - DNA, 131 bp, Arabidopsis thaliana landsberg
tttttttatatgcctagaaatggaatactctttgagaaaagagtacgaatgtattctgctctttaggtaatcaagtacatatgtgaaggaaacataagtttatatccaaaaattggaatcagccaaagcca

SEQ ID NO: 162481 - DNA, 148 bp, Arabidopsis thaliana landsberg
taaaaccagcaaatccacataaataccagttctttcctgcagcttaagatgcttctcagcttcttcattctgtgctttcttcaactctttctcatttcctattgttttcttcttctggtatataagagctgctttttcttcagcgctg

SEQ ID NO: 162482 - DNA, 580 bp, Arabidopsis thaliana landsberg
  unsure (1)..(580): unsure at all n locations
aacctcctttgactaatatactaggatgattatagattcattatatggaaccttgatgtgctaaagaaatcaatctgatctcataacttggattttcatggagataaaacaacaaatcaaaatcaaaagccattatctggcaacaattgtctggtttattgatagcagataacagaataaacaaagaagcaaaaagataagatattgcagaatcgttcattgtaagaagattctctgatgcaaagacaagtcagagagaccagttggtatggtgagaagaagagtcataagcccttgtgttctcatcttccatgtactgtctcctactttgatgatggtgatcagataactcgaactcacccattgccgtgccactacttatctgacctaaattcaaaacaggagacatatcattatcattgtccttgaatacccaaggcgggttcagatactgatgctggctaggtgcaggtggtggttgagccattnnnnnnnnnnnnnnnnnnnaacctgaagaagctcgccatgtattgttgttgttgttgttgttgttgttgttgttgttgttgttgttgttgtt

SEQ ID NO: 162483 - DNA, 351 bp, Arabidopsis thaliana landsberg
attaatatggttatcctgttcactagggttctttattttaaagaattgaaactttaaacagtttcaaaatattataaattgaattttacaaaaaatttaaacatgataaacactataacagatattaatatgggatgatatagtaagagagaaatcctagatatactacgagagaaatcctaaatataacaatcaaaattcaatgatgaagtttggatcaatattaatctttttttaaagtttctaattttataaatatttgaaatttataataaaatgacaaatttgtgtttaatttcacgggacggggttatatggtgtgacgggtttgagtggataataacatgggat

SEQ ID NO: 162484 - DNA, 103 bp, Arabidopsis thaliana landsberg
ccaggttttcctcttctgactaggtacgtaagaaaggacatgggggtgctttcttcttgggccattgaattgattagcctcaccattggactcggtgctattg

SEQ ID NO: 162485 - DNA, 209 bp, Arabidopsis thaliana landsberg
tacagaatttgttaatccggcttcttctacgagttgttgctgattatcattagagacacggtgtagaagaagaccagacatgaaaacaggaaggaagagaagactggcatggaacattttccttgctttatgcatggtccggtctcggtagaatgaaaatgctgtcgcagcgattgctagtgtgaaaagtgttgattcgaggcaaaacc

SEQ ID NO: 162486 - DNA, 391 bp, Arabidopsis thaliana landsberg
aaaaatgtcgacttctaaagccataaccttaactctcttcattgcaacaacattactagcgccctgcaacgcagccgcaaacgcaacaacgaagccgctcttcccagcgattctaatcttcggtgattcaaccgtcgatacaggaaacaacaactaccctttaccaacaatcttcagagctgaacactttccttacggcatggatcttccagacggaaaagctaacggaagattctcaaacggaaaacttatctccgacataatcgcaaccaaactcaacatcaaagagtttattcctcctttcttacaaccaaatctctccgaccaagacattcttaccggagtctgtttcgcatcagctggtgccggttacgacgacctgaccagtctc

SEQ ID NO: 162487 - DNA, 257 bp, Arabidopsis thaliana landsberg
tgttccctttgtctgatttttcccgggcttatatgtccacccacgatgtaaacttcgtgcaatttacatcagaagccattttaattaatatcggatcttgatgaaatttattagaaaaataacagaaggctcttataccttgattattgagaatgagtttttatctgatgagatgattttggctaagctagttaatggtccattggttagtacggtgatcttagacacttcatcaacagatttggtcagattttgcc

SEQ ID NO: 162488 - DNA, 327 bp, Arabidopsis thaliana landsberg
ccacatggatgcagtggtgcttgtcggacaggtctaaaaaacctgtttccgacaaaataatccacatctttacctaagtaagctaaaacttacacttaatgattaaagccgacccagattcgcaccgaataagctgataggcggccaaaaaatagtaagccaagtccgctcgcacgttctagctgacctggacgcgtccacagggtaaactggacaccaacaccgcacctacaaagtacgacgagtcagtctcgcatacttcatacgtaagccttgtgattcgagttcaacgtatacatgataagtcaagggacgctgttgaaccaa

SEQ ID NO: 162489 - DNA, 267 bp, Arabidopsis thaliana landsberg
gttggactatgcaagatgcaacttcttggcctgcatacagtgtacggtaccatccaggactgattccggtaatgacattgtgatcatgaggattcctcttatggaaatgaacacgctgaattatttttgggactggacagttatcttggaacacagccgcattgtgtgatatggatggaaatgagctacctcgttcggtggatgttgctcgccagaagcgaccggtgtttgggctccttaagagggcgggagctctgaatgccttgg

SEQ ID NO: 162490 - DNA, 140 bp, Arabidopsis thaliana landsberg
gttaattgcgagtttttgtgggttttttcggttttgtacttgttgggttttagcactaaacccaaatcggaaatgtgttcgggtcacggattaaccggtcggaccggacggtttgggtcgggcgtgaaaacactggtttt

SEQ ID NO: 162491 - DNA, 231 bp, Arabidopsis thaliana landsberg
gttctgtttgtttatataccttcagagagtttcaagtcttctcgttgtggtcttgttctgttttcttgatgtgatttattattcattttaacaaaagaagtttgtgcaaagtcacaatgcagaaacccactttatttagattttagataagcaaagcacacagatgcattatccttaagaaaaacaaaatacaacactagaccacaacttcataaactcacaacataacct

SEQ ID NO: 162492 - DNA, 364 bp, Arabidopsis thaliana landsberg
gaaagaacaggtaggctcatagaaaggctctagtttagatactaggtgaacttatcgaactcgtttagcatgcatgtttaagtatagaatttcacggcacatcaccgggaatcttagctctaagtataatgagtttcattgaatatcaacggttactctaaaatcatagtttgagtttcagaacggtgagataacaatcctactattagctagatctacaatttatctatcttccaagacaattccttagacccgatgcttaaatcgcttgaatctagaactcatttacttattttattgtcttttacattaatacactttgtctagcttaattaaaatcatcataagtcttttgtgtgaacat

SEQ ID NO: 162493 - DNA, 224 bp, Arabidopsis thaliana landsberg
aagtcattgctaatgaggtaaagcaatctcactaaatcgatccaccatttgattgatacgaacaagaaattcaaaacctccagattccgaaatcacagagacggagattaagaactctttacgaagaagagacgagttcaaattcggatagagaggatttcgaaatgatagaatagagagatagagagacgcacacagtgatgtgaagaagaagaagcagagga

SEQ ID NO: 162494 - DNA, 412 bp, Arabidopsis thaliana landsberg
atctctccattgtcttccctcagctaaagcttggatccgatctcgatacacagacgcggcgttggaattgtacttggagatgatatcagtctctttcgagatcccgtactgagcgagaaaattgttgagacgctcgttgcctccagcgtccattttcttgatctggatctcggaccatgaatccatggtgacggatctgacgaatgagatgtgaacacctaaaccacggtgcttaccggagcattccaagcacatgaagattccatatgaaatcgatgcccattgtggattcttctgggagcaatcgacacagaccttgttctccggctgagattggagcgtccgtaatcgtctcgccgctgccattatattgccggctctccgatctgacccctgactagatctgatccag

SEQ ID NO: 162495 - DNA, 396 bp, Arabidopsis thaliana landsberg
acctgtgatctcaataagcaagcttagttccagatatccatctcctcttttaccaatccatttgattgacattgcatatagttattgctgtacgctccgtatctataatggagagtggcactgtgattcgcttggtgcagcaacaatggtgttgcctgtttcatcagttttgggtcgcaatggcctcccagagaccataaaggaagtgttgtccttatgcctggatcagacatgctcttcagcgtatataaacctgggtggtggtataaagttcggattgaatatggtgcatgatagtgtttctttgctctcttcgcgctactgctgaatagcagaatgtattgaaaggtgatcttcaaagaaagatcagtggtgcgatacagaattcaatataat

SEQ ID NO: 162496 - DNA, 431 bp, Arabidopsis thaliana landsberg
attggcttgaataaaatattttgaatactcacatctcttttaggtcggatatttgggatataaatcctataattgatttaggttaaaatgaaaaaaagaaagaaacagactctactcaacaagtgtgtttttaagcaactccaatagagagttctctcaagaaatagtgggggattctattgttaaaattaccaaaaaataattgaaaatatcaatggatatgcccagaaaatgtgaaaatcagatttttactattgataattcaatattaggtaagtatgaaagagaaaaaaattaaagtcataattgtccttcctactttgtttaatttaccaaatatgccatgtatcaactattgttataatttcactatatatcaaatattttactatatttatataaatattattcagatatttaatatgttagca

SEQ ID NO: 162497 - DNA, 194 bp, Arabidopsis thaliana landsberg
ggaagagactccgagtatcagaggttggtctgcgtccacgacagggatcattgatggtaagaaaggactggtgatgtttggtgggaaagctcaaaccaatgatcggtttggtgatctcttcttttatggagttgactctgcataaacgctgttcggtgacggtgatgatgagtgtttgtaaatatgtgtgtgtg

SEQ ID NO: 162498 - DNA, 128 bp, Arabidopsis thaliana landsberg
gaggatacgctgaaatcaactatggcgtataaggtatcgcaaggacggtagaaacttgtgaggatgatcatgaccctagctgtgctgcccgccaattccgatgggaatgttttaatcgattaggttca

SEQ ID NO: 162499 - DNA, 435 bp, Arabidopsis thaliana landsberg
caaaaactcgcctctctcttcctggaaagtctcaacaagcttctgtacatggattggtgtcacgtgcgatgtctctcgccgtcacgtgacttctcttgatctctccggtctcaacctctccggtactctttccccagatgtttctcatttacgtcttcttcagaatctatcactcgctgaaaatctaatctccggtccgattccgccggaaatctcgagcctttccggtcttcgtcacttaaatctctcgaacaatgtcttcaacggttcgtttcccgatgagatttcttctggattggtgaatctccgagttcttgatgtctacaacaacaatctaaccggagatttaccggtttccgtcaccaatctgactcagctccggcaccttcacctcggtggtaactacttcgctggaaagatcccgccttcgtacgg

SEQ ID NO: 162500 - DNA, 515 bp, Arabidopsis thaliana landsberg
attttgctctcctctgcagttcctgatgttctatgcgtgctcactagatcctgaaaattgtggtgtgaagtttgccagtaagctgttggaaaaatttctctccagcaacaacaatcaagttactaggtgggtttcatgcttatccttcatggtaaaaatatctctgcacgatatcaagctaatattgttctctactcaccagactcaccgcttgtatatggttttgttttctcctcttactaagcaggacgaatgcagtgacatatctagctagctacttggctcgtgcaaattttttgtctgcttcttttgtggctagcatgttaaaaaggtagaaagagactgctagaaaaactggcaaaagatgattgttttgaattcaagtttcactttgttgtaacattgtttctcttgtgtctgaaatcctagattggtggatgagtgtgctgattattgcagaacatgcaatgatgatgctaggcctgaagtacaccaagttttctattcaggatgtc

SEQ ID NO: 162501 - DNA, 274 bp, Arabidopsis thaliana landsberg
tcaacaagctcttattgtctttggattccataacttgccaaaccaacctccttcaccgccaccaccattgttctttcctctcgcgtctctcgaagcttttacactgttcagcggaactagctgtgggctgccatttcctgaagaagcttccacaatctttgtcaccatctctaacacctcgctcatctttggacgcgcctttgcgtttctagtaaggcaaaggttggctacaaccgcgagtttctgcactgacttgatcatgtactttccctcg

SEQ ID NO: 162502 - DNA, 169 bp, Arabidopsis thaliana landsberg
aaaggtaaaggaaaatcttaagtcttgttcttggtaaaccatacaatatctaagaacactcaaacacattttctttggtcttgactgattcaaacaagaaacataacctaaccacataactttatctacaatgttccgtataaaacaaaacacattcatatgaactttc

SEQ ID NO: 162503 - DNA, 182 bp, Arabidopsis thaliana landsberg
ggttagggttaatgattttccgtcgagtagtctcacaaaaaactgcaacggcttagaactctgatccgccatcgattttcgattcaaaagcttggacgaagaagaagaagttcgatttctagagaggaatcagagagaaattggggaaatttgacggagccctaataataagtctctctctc

SEQ ID NO: 162504 - DNA, 387 bp, Arabidopsis thaliana landsberg
ggaaatataacatagacttcagctaaacaaggaatcatttcctctaaatgtttcctaataacataatctcacaagagatggaggtttcgatttcaatggagacattctagcgattgaagcaaagtagtagaaaactttgtcaaattccaactcctaaatatcaccagccatgcttaacaccaaatttagcccagctcgagaaaaaaaaatgtcgaaagtgagacttacgtgaggaagatagatatgctgaaagaagaatcttaatctttggtacaaggttcgtattcaagtcgagattcttgagcgatcttggtagcttctcttccatagtattcactgcaagatttatgatcgccggagattcgaatcgaggaatatttgcggacg

SEQ ID NO: 162505 - DNA, 226 bp, Arabidopsis thaliana landsberg
acataattttttagtattattataccaaggagaaaccaaacataaaaacataaacatatatgcatgtcataaagtcactcatagagtgacaccgacttatttaaagtaaaatacacacacgatcaagcaccaaagatttttggtagattaacatgggacgtaacagatacatttgtgagctgggaagacatagttgcaagatccatgttttgctccctcaaggtta

SEQ ID NO: 162506 - DNA, 122 bp, Arabidopsis thaliana landsberg
cttcgtagcttctccgtggtgatcatggcggctcctgcgttggtggttcaaaaaacagaggaggagtggcgtgcggttctttctcctgagcagtttcggattcttcgtcaaaaaggcactga

SEQ ID NO: 162507 - DNA, 187 bp, Arabidopsis thaliana landsberg
  unsure (1)..(187): unsure at all n locations
aaaaaaacgaaaaaaatgaaagtatccggtttgctatnnnnnnnnnnnnnnnnnnnnattggcgatttcaagagctttctcgatagcagattcagatggtttacacacaacaggcgttttgggaagtgaaccgaccggttcagaccggttaaaatgtccaacgatatcaaaaatctcgggattgtta

SEQ ID NO: 162508 - DNA, 436 bp, Arabidopsis thaliana landsberg
ctcacttcgattcttagattttgttttgaataacatttaatgtcgatagcgaatttatttctttaggtctagggtttaaattctacactctgtgcaacatattaaatgacttttgattatgatcatgtgtaatgtgttaagtattcgtttgggactgtgatatatatgtagtgtaacgtgcttgttaggttaatgtgtatacaatgacgtttatccctattttgtgtcgaactagatcataacccgtgctatacagcatgggcattaatattttgtataaattaaattatatattttgtttgaattacataagaaatagtatagtataaaaatgatgtcataatatttttcaatatttttactatttgcatataatgctgcattggattgactttgtttaaaaatgttatttttataataaatacaacatatgtag

SEQ ID NO: 162509 - DNA, 258 bp, Arabidopsis thaliana landsberg
  unsure (1)..(258): unsure at all n locations
cccccccccccccctccatttcccccccccccccccccctcccccccccccccccccctccccccggttaccttcccaccacccccccccccccccctccccccacttccccccccccccccccccccccccccccccccccccctcccccctcccctccccccccccccccccccccctttcctttatactccccccccccccccccaaaaaaaaaccccncccccctcccccccccctccccccctcccctccccc

SEQ ID NO: 162510 - DNA, 108 bp, Arabidopsis thaliana landsberg
acattatcctaatctaatccatcctcaagaaccctaataactactcaaacaacaaaatcaaaaacataaacccaaaaattactctaaacatatcaaaatgtagatcta

SEQ ID NO: 162511 - DNA, 113 bp, Arabidopsis thaliana landsberg
cactacttcactgccatcatctttgacatggtatcaacacctattgtggaactagcatatgcgagtgcaccgggcaatataccgcgaatcccggcaatcgatgagatgtttat

SEQ ID NO: 162512 - DNA, 186 bp, Arabidopsis thaliana landsberg
acttgtcgaagtagaaggcgaacggagccataacaacggtggcaactccgtgacggtagacggaaagaacgtaaatgctcatgcctttgtttaggacatcctttgtaagaatatccattcctgcataccctatttgcaacaataccattaaaatgaatggtagtgccttcttcatacatgccatct

SEQ ID NO: 162513 - DNA, 218 bp, Arabidopsis thaliana landsberg
attatcaaaacacaatgccaattgaaactatatatttggtaaatattaggcataagctgtgattgaactccttatgtcaagagcaaggatcaaatgtatagtctacacactatatacaatctagtgaccttaaggtgaaagcaaaattccatatcaaatctattgtcatatattaatttagacaacacttacagatgcttactacttcgaatctctcg

SEQ ID NO: 162514 - DNA, 391 bp, Arabidopsis thaliana landsberg
aaggatttctttcttcaattaaagaaacgtttattacataaaagtggaagaagaagaaacatgtttggaattagaagaaggcatgaaagcaagaaccataagcaaaaccataatcccaataggaatcaaaagcagcataaaaggaggaggaggcaatggtggaagaatcaacggtaagatcaagagagatgctgtgagaccaacaagcacaaccattgattctaaactgaagtaactcgctgatattagcctccttggactgttctgcgacgacaatgtccgaaacaattcttgcttccccataatcggagctggagctgaaccacgaaaactcgtgtttttccggttatgatctcctctcacgtccatgttgttgttgagagaataatgt

SEQ ID NO: 162515 - DNA, 263 bp, Arabidopsis thaliana landsberg
  unsure (1)..(263): unsure at all n locations
cccccccctccatcccccccncccccncccccnnccccccccccccccccccccccccaatgcactccccccccccgggctggccataaccccgaccccaccccccccccccccccccccccccccgcccgcccctttcccccccctgggttcgggccccccccaccaaaccccccccccccccccccccccccccccccccccccccctctcccccccccccccccccctcccccccccccccccccccctccccccccccc

SEQ ID NO: 162516 - DNA, 481 bp, Arabidopsis thaliana landsberg
  unsure (1)..(481): unsure at all n locations
ggggggggggggggacggggggggagggggcggggggggggggggggggggggggggggaagaggngggggggggggggggggggggggggggaggggaggggcggaggggggggggggggggcgggggcggggngggggggggggganggggggggggggggggcggggggggggggggggcggggggggggggggggganagcggagcganagagggggaggggggggaaaaagggggnggnggggggggggggggggggggcggggggggggggggngggtttgggtggagggtggggggggggggcgggcgggggggggggggggcaaaacaaaggcgggggggggagaaagagggggggggggggggggnggggaagagggaaggggngggggnagggggggaggggggggggggggggggggggangggggggagggganaggggggggggggggggaggggggggggggggggg

SEQ ID NO: 162517 - DNA, 320 bp, Arabidopsis thaliana landsberg
  unsure (1)..(320): unsure at all n locations
ccccccccccgccccccccccccccccccccctaccccccccccccccccccaccccaccccagggagaaacctcncttttcgcccccccccaggcttgccccctattaaaagccccacccccccccccccccccccccgcaccccccccccccccccccctcccccccccccgcgcgcccccggcccccaaaccaaaaccccccccccccccccnccccccccccccccccccccacccccccccccccccacccccccgcctccccccaccccccccccctccccccccccccccccccccccccctctccccccccc

SEQ ID NO: 162518 - DNA, 247 bp, Arabidopsis thaliana landsberg
gctacaccaaagacaataatgagagttatgggtgtgaagggtctcactctttatcatctcaagagccatctccaggtgtatataccttcttcctcagtttcctcttctttaatttttttgttattagcttcttttataatcttgccgtagtaattaggatttaaaacatatactgtatgtgtgtttcaactacagaagttcagacttgggaagcagcctcacaaggagcatagtcaaaatcactcca

SEQ ID NO: 162519 - DNA, 95 bp, Arabidopsis thaliana landsberg
aaaaaagattgagccgagtttatctgttgtatatactattttttttgatagatacatacacccaagatatttatcttacatgtataagagatacg

SEQ ID NO: 162520 - DNA, 343 bp, Arabidopsis thaliana landsberg
agtgctcgaaatcgcaaccatcgagcaggatcgtctccttaggtggcctgttcgaccagttgggattcgggtcgttcagagaagacgatgtagcctgcgtcgagagacctttgacagacacaaggccgccacggaaaacggaggaaaaagcggcgaccagaggacgggaccggctgagcagagaagacgccggagatttggcgagaggagcagatgaagcaaaggatcgcgtgaacagaaacgaaagagatttcgccggtcggcaaagaatggatcgagaaatggtatgcgtcgccatggaagctctagattgggcttcgcagataaaaccctaggagagagt

SEQ ID NO: 162521 - DNA, 398 bp, Arabidopsis thaliana landsberg
cttcgattgtaagaagagagacatcaaaagtaccaccaccaagatcaaagatcaaaacattcttctctccaacacttgtggccttcttgtcaagaccataagcaatggctgcagcagtgggctcgttgatgatacgcaaaacattcaaaccagcgatgacaccagcatcctttgtagcctgacgttgagagtcattgaagtaagcaggaacagtgacgacagcgttcttgaccgtagtgccaaggaaagcctcagcgatctcacgcatcttaataagaaccatggaagagatctcttcagcagcgaactgtttctcttctcccttgtattcgacgacaatcattggtttctctgcagttccggagatgatagtgaaaggccataactgtctgtcactt

SEQ ID NO: 162522 - DNA, 517 bp, Arabidopsis thaliana landsberg; identical to SEQ ID NO: 72512

SEQ ID NO: 162523 - DNA, 157 bp, Arabidopsis thaliana landsberg
gtctcttctcatagtaatgctcatgtctatagtaatgttttacatggctcgtccaattttctcccaaaaaattaatccatatttagaggtgatgccaaaagatgtgaccatatctccatcttcaaattttgattacgtcgaagctcccgatgaagct

SEQ ID NO: 162524 - DNA, 211 bp, Arabidopsis thaliana landsberg
agttggaaacaactctccttcttcaccattttatgaaatcaaatctaaagtgttatagttcttggtgaaaacctaaagtttcttcatttctattttttacatttcaataaagctcatcgagctattgtattttccaatatttgatttctatgtcaataagctcatttgagcatcagtttagaaatgtcaacatggtatcagagccacagct

SEQ ID NO: 162525 - DNA, 159 bp, Arabidopsis thaliana landsberg
accggactgtgtcagggtcactctctgaagtaagaaatatgtctgaaaaagcgtaactaatacgccgcttaggctcagaaagagcctggagcaagctattaaccttcctatcatgccaattgacacaatgctcgctatggctcaccctctaatgtgtcg

SEQ ID NO: 162526 - DNA, 413 bp, Arabidopsis thaliana landsberg
aaaagagaaaagtgaagatgcaacatatcgttttgtagacgagagaaactaatcattgtatgaatgagagagttcattattattaatggtgacagaacataaacaaacatcagattctcgaccaaaagaaaaaaacagagaaacagagaatcgagaccagatctaaggttgaatgtaaggagtataagcagatctatcgtgagcggagaaattcacagagcaggagctactggaaagaaataagaatcaaaatcgaaaatgagaagaaatggaagagaagcgacggacctggagatggagctgacgtaggggcgataacgttaataacgatgaacaccctacgaagaagaagctcctccgcagaatctctctctctctctgtctctctctctctctttttaatttgtgagtgt

SEQ ID NO: 162527 - DNA, 171 bp, Arabidopsis thaliana landsberg
ctatacatctacaactccccacatccaccatactactctctttctccaaagtttgagtacaagtctccgaccaccactatacatatacagctccccaccaccaccaccgtactactcaacttaccaaacctttaatacaagtctccacctccatcgtatgtgctgtaggtc

SEQ ID NO: 162528 - DNA, 376 bp, Arabidopsis thaliana landsberg
tctcgatcaattatccattttgcccagattttttccagaagctcatcgaattcgtaagctttcgcgccttttcctctctttaatttatttgttaatcaattttgaatgtgttgtatctctagggtttataatttcagtttcacccttgttttctattgtttcgcggaataatctcttgtcatggaaggtttagattgattcgacctttttgatcttgacctaatttattccaattttcgtaaaattgttccttaagacctgtttctctgactagctcagattgattttggtatctgaatcaattgcggaacctaactggcagatcaattcgagaagttttgattttgtttgaagatagtgaattgcgagttcagtg

SEQ ID NO: 162529 - DNA, 229 bp, Arabidopsis thaliana landsberg
tttcttattcagaatatgatttgtgtttctttgatcatgtcttagtaatccacttgttaggtttagggtttctcattagagatttagatgatttagtagattgccccttgctaggttatctataggattcttcatcttaattgttcttattgctagttctagagtagctaattagaacttgatattagataataggtatgtccccataggtatttgctatttgatctat

SEQ ID NO: 162530 - DNA, 353 bp, Arabidopsis thaliana landsberg
tacaaagtctatcaattaatgtcctctaaagtttgatgtctctttcttattggcagatttactctccgacggatggatccacattcacttaatagttaatttacatctattcattttataaaatttaatactgcaaaaacatacaagatttttgaacataaatatgaaggaaattaatagattcaaccagttaaaactacaacaaacactaagtaaaaaatctacccaaaatttaaacaaaatgtattataaatagaggttgatttcttgaaacataatataagagtcataagattaagaacagaaaagaaaacaaagtttgcttttgtaggattctaagacgatcaaagatg

SEQ ID NO: 162531 - DNA, 132 bp, Arabidopsis thaliana landsberg
gggggggagggggggggggaagggggggggaggggggggggggagggaggggggggggggggggggggggggggggggggggggggagggggggggggggggcggggggggggggggggggggggggggggg

SEQ ID NO: 162532 - DNA, 289 bp, Arabidopsis thaliana landsberg
  unsure (1)..(289): unsure at all n locations
ggggggggggggggggggggggggggggggggggggggggggggggggggnnggggggggggggggggggggggggggggggggggggggggggggggggggggggggggggggggggggggggggggnggggggaataaggggggcagagaagcccgggggggggagaggggggcggggggggggggggggggggggggggttcggtgngtntnttngaggggggggggggggggcgcgccgcgaggtcaantccggggccggcggggggnnnggggggggggggggg

SEQ ID NO: 162533 - DNA, 436 bp, Arabidopsis thaliana landsberg
ctcacttcgattcttagattttgttttgaataacatttaatgtcgatagcgaatctatttctttaggtctagggtttaaattctacactctgtgcaacatattaaatgacttttgattatgatcatgtgtaatgtgttaagtattcgtttgggactgtgatatatatgtagtgtaacgtgcttgttaggttaatgtgtatacaatgacgtttatccctattttgtgtcgaactagatcataacctgtgctatacaacacgggcattaatattttgtataaattaaattgtatattttgtttgaattacataagaaatagtataatataaaagtgatgtcataatatttttcaatgtttttactatttgcatataatgctgcattggattgactttgtttaaaaatattatttttataataaatacaacatatgtag

SEQ ID NO: 162534 - DNA, 164 bp, Arabidopsis thaliana landsberg
aagctcgttccttgtgttagggtagttgcagccgacgagaacggctagtcttttcttgaccatcccttgttgatccattgagtttctggatatgatttcttaaggtttaagaggtaatttaaacaactttctaggcaaaatgttttggggtttcttgtgtacgt

SEQ ID NO: 162535 - DNA, 65 bp, Arabidopsis thaliana landsberg
acttcaattaagctattgggagatcgagttttgataaagatcaaggaggcagaggaaaagacttt

SEQ ID NO: 162536 - DNA, 357 bp, Arabidopsis thaliana landsberg
cctcttctgtagctgcctggatcaagtcaagaggtcgagtagaatgatgcctcttctgtagctgcctcgatcgagacaatggatcgagtagagtccttttaagctccttttgcacctgaaaacacaccataacatgcaatgtgaatgcaagatgatcctagatgtctaagtatgcaaaacaagttaaaatggtgcaaaatgatatgatacaatgagcaaatgcaaagctaaatgatgataaacatacaccttaaatgagtaaaatacagtgttatcaactcccccaaacttatctcttgcttgccctcaagcaaacaaaaaatcttatgttgaaggagaggtttgaaggtggggatt

SEQ ID NO: 162537 - DNA, 181 bp, Arabidopsis thaliana landsberg
attgatgagtgctccaggttcgagtcaatccgactattggaaaatctagatggcaaaccaacagacttgaggatatcctagtttccaactcaaccactaagtctggagctaatctcactgctcttccttttacctcttcaaacggttagtattcatagatcttgactccttgttcatacct

SEQ ID NO: 162538 - DNA, 500 bp, Arabidopsis thaliana landsberg
gaaaataagaaagataataaaaggccgaggcaaccacgaagagctcacaacgaaattcatgctttcagattttcaactggtaagtctaatcgtttttcatgtttaactgaagcagtagattgttctttgtgattttgagttgtggtgttttctctttttcccgttgttaagatgttaagaaaatttctgtccagaattgttgcttcacactatttgctgattcggtttggtttgcattggttttgaaattaaaactgatttcggttcggtttcattggttttgtggaaaaaaactaaaagagtcacgcgatggagaatttggaaagatgtgcgtcgataaaaaaaagcatgaattggaaaagggtttacccccagaatcgctttcactcgctcaacgcgctctttatgcgactcggtacgaaatagagccttctgattggcttaaaaactctaaaaaaactcaataagcccacccgttgctagctcttattattatatga

SEQ ID NO: 162539 - DNA, 235 bp, Arabidopsis thaliana landsberg
aacctggtgtaagagattccgatgtgtaagcataacacctttcggatttcccgtggtaccactggtatacataattgcagctgtatcatctgaatcaatgaattgatttctatagctccctgcagtcatctgtttgttagcatttattcttttagggcacagtaggaaaaaaaaatcagaacctttacgtactggtatcattagatgctgataattttgcacgactctcctgtcc

SEQ ID NO: 162540 - DNA, 305 bp, Arabidopsis thaliana landsberg
aaattaaaatcaagattcaactatggaaaacttgtagctatttttcaaaacctaagttttaggaaactttgccattatattggtgtttatctaaggattagaacatttattttagttaaattaaatcaataaatcgtaaagttgttaattaggaaaaaaagtattaaaatgcaaatatatttgtcattcgaacctctatgcggtggggagggtttacgctcatgtttgaaagtcaaagcagtgttcataataatctcaacgcgggaccagcatgtgatatacgaatgtctatatacattattttc

SEQ ID NO: 162541 - DNA, 220 bp, Arabidopsis thaliana landsberg
gttcaaccgcctttgatctctctagtatctctcaaaagagtctttctctgcaaagggtgaagaagaagatgcagtattgtaatgtaaacaacaaataggactcaaattggtcctagcttgttgccaattcctaatactggatgataaaataggaatccgccgaacaagagccattcaacaacacacacacacacacttgcacatgattcaaatcattagt

SEQ ID NO: 162542 - DNA, 362 bp, Arabidopsis thaliana landsberg
  unsure (1)..(362): unsure at all n locations
cattgataaaggcaattatagggttcatcaggtgggtaacaggtaaaaggtagatacccttgacgatagattccaaaacgggatcaatccactgtcgtgacagagacccccataactctaccactttctaatctcaactttcattgatgaaacatagtagagcagggttaaaacaacaatctaccaaagccaataagcagacaagccaatgtcttggtcgagtgtacaaatctcttgaattcgtagatcagacatccatttgaccgtctattgaacgagagacgtctatgatcgaatctccgcattagcaaaaatgaacagcataagggccnaaagaatccagcaaagttctaaccggtctt

SEQ ID NO: 162543 - DNA, 419 bp, Arabidopsis thaliana landsberg
  unsure (1)..(419): unsure at all n locations
aacaatgtcaaactcgttagaagtaagacctgtgcaggtacaaagttttatttttattgaaagcaatgatgactagtactggaagatcgattactaatgggggtcttcttgtagggccgtatatacgagggtaaagagcctccacaatatgttgccctttttcaacctatggtggtcttaaaggtatttgtatgctgtttacaagatgaggatgaagttgattttagtcgcaagagaatatacagtgattaatatggcttacatggactttttagggtggtttgagctctgggtacaaaagcagtannnnnnnnnnnnnnnnnnnnnnnnnnnnnnnnnngccagaatcaattgcactagttcaagtatctggaaccggagttcacaataataaggctgtgcaagttgaaacggtacgt

SEQ ID NO: 162544 - DNA, 271 bp, Arabidopsis thaliana landsberg
ggatttccttatctaatatatctccatcaattctaattatttaaaaaaagagaaattttaggacattattaatattatactgtattaaaccttaccaaaaaaatatatatactttattaaaggtaaatattttaggtatttaaagtttattaaatattttcacggaaaaaacgtttagaatatttataatatggaaaatctataaaattaaataaacatttgaaagaaaactttttaattgatttgaattataaatcttttaataaagtat

SEQ ID NO: 162545 - DNA, 412 bp, Arabidopsis thaliana landsberg
ttgtatgcagcattggatcaatctttttgcacaaaaattcaagttatttatacaacttattttgcaaccaaactcgcttactgatttagcaattagaaacaacatgcaagatattgcatccaaatgaaagaaaaaaagacgaacacacccgatgactcatggtcgacaacacgatttagaagtgatgtcatgtgatgctaagatgcgatttagatgtttgtaatgatgtgactttattttgacacaagcaaagttgtgaacattaagaaaacatagtgattgagaagcaacgagatgttggctcatcaatcttgtagtcgttcatagcataattacaagcattcttcaccacaacttagtaaaccatatttcataaaaccatcatctatcattttccatttcttcacatctt

SEQ ID NO: 162546 - DNA, 306 bp, Arabidopsis thaliana landsberg
  unsure (1)..(306): unsure at all n locations
cccccccccccccccccccccccccccccccccccccgggaattcttcccccccctctcccatccccacacccccccccccccccgcgggcccccgcgccccctttcccccctgtgttctttccgnccacccaccncccccccccccccctcccctctccccccccccccccccgccttccccccccccccccctcccccctccccctcccccccccccccccccgcccccctcttcccccctccccccctcccccccccccttttttttccccccctttgtttgccncccccccccccccccccc

SEQ ID NO: 162547 - DNA, 132 bp, Arabidopsis thaliana landsberg
caattaatcatatccaaataaattataacaaaataaacataacaaaaatccaaaatgatttgatttaagatcctcttgtaacatgataatgaaaacgcaagagctagagttgagaaagctcctaaagtaatg

SEQ ID NO: 162548 - DNA, 515 bp, Arabidopsis thaliana landsberg
tagcactcactccaccgaaaacgtaaacgttttcctcatcggctgccattgagtggaaactacgaggagtgggtccttcttcgaccggagttagcagtttccactcgtttgtggtcgtgtcaaacgagtagaaaccgttgtattgacgtgaagcgtctcggcctccaaagacatagagggtcgatcctattgacaccatccggacacctaggcaagagagggttggaatgtctccggtggctggagaaatggaccaagtccggctctcgatgtcaaagacgtaaaggtgtttgtcgatgggctgatttggtgtgaactcaccaccaaaagagtaaatcttgtttcctacctgtgctatgtcatgcgagcatcttagccctggaccatctccattttcatccaccttataattaattaataatacttgttagttaggattttttataatatagagtctgcttagtgaactagctcccatggtgatatataaaagattactacctttgtccactttc

SEQ ID NO: 162549 - DNA, 369 bp, Arabidopsis thaliana landsberg
  unsure (1)..(369): unsure at all n locations
ccccccccccccccccccgcccccccccccccccccccccccccccgccaaccccgcccgagcgagccgcccgcgccccccccccccccccccccgccccccgccccgccaaccccccccccccccgcgcccccccaccccccccccccccccccccccccccgccccccgcgannnaaaaaacggggggcgcgcggggaacgcccccaccgcggggttccctcgctntagccccccccccggggggggcccaacaaccccgggaaaaaaaaccgcgggggcggggnagaaaaccccgggggggaaaacacaaaccgccccgcgaacgggccccccccccccccaaccaacccccccgccccccccccc

SEQ ID NO: 162550 - DNA, 126 bp, Arabidopsis thaliana landsberg
gggggggggggggggggggggggggggaggggaggggggggggggggggggggggggggggggggggggggggagggggggggggggggggggtggaggggggggggggggggagggggagggggg

SEQ ID NO: 162551 - DNA, 674 bp, Arabidopsis thaliana landsberg
cttcaactgctgcgtctagctgtccttccttcttcatttgcttcttcttctctagctcagcgcggatcgctgcagtagtagcaatagctttctcaagacgtctctttttcttctcagcaatggcagcaccttcctcagccaatctcttttgttcctcaagttttataaacttcttcttctctagctcagcccgaattgctgcagaagtagcaatagctttctcaagacgtctatttttcttctcagcttgtttaattgggtccactacaccttttacttttttcttcctggcttttctaacaattggctgagcttgtttgcacatcgagctactgctatccatgattgctacaagtctttgtttgccttgcttttgttaactggcttcttcttttagttggttgtttccttttactttgattctaccaaactcactacaccaaggcgcgatgatctcaatgactactacacccactcaggtatgtaggtatacctcattttacggacaatacaatcccaaacagaaacaacaggagataagagaagggagacgttgtaggagtttgcagagttatcctttgaaagcattcgtcctaatttccaacatcccttaacttctcccattttctacaaaagaaaacaatactagattagacttgcgttaacagggatct

SEQ ID NO: 162552 - DNA, 220 bp, Arabidopsis thaliana landsberg
ctctaaaacctatacctataacatagttaaaaccggtaaaaatagggatatatcaactccccatgacttagcttttgtttgccttaaagcaaaacacaaaagccgaacttgtggaagaggtttgaaaacaaaagaactcccaatattctctagtctattgccatgatcattctatcccaatccatatgcgtagcagttctaatcaaatcctaaccaacat

SEQ ID NO: 162553 - DNA, 305 bp, Arabidopsis thaliana landsberg
gacctagattattaaattttttctcattctattccaaaataacaaaatatccagttataacatattatcttgttcaacattcgatctgaatttatcccgatctaattctattactcattcaatctgaacttgtccccatataacatattatttaaatatattatatgcaattgaaaacgtgtaggtgaagacaataacgctcaactaatctgtggaccaaaatagatggcgaaaatctaaataaaattcaaaattcttaaatgagaacaattgcatataagatgtatgattcataataatagagc

SEQ ID NO: 162554 - DNA, 180 bp, Arabidopsis thaliana landsberg
acctaatgtgtagttccaaatcttgatggctccatgggagtcccattcgccgtcgtggacggtgacaccttggatgtggtggccgatggcgtcggggaaaaggtggttctcattcctccaccgcttgtagtgtttatccgctgatcctttcaaaggaacctccgtcgcatatgttcctga

SEQ ID NO: 162555 - DNA, 453 bp, Arabidopsis thaliana landsberg
ttatttttcttaatatgccgccatgctaacggtcctccggttacttctccgagaatcaagctcaattatggaagatatcttgcttatagagaatctggggtggagagagacaatgctaactacaagatcattgtcgttcatggcttcaacagctccaaagacactgaattttccatccctaaggttcactcttattctcaatattaactctcgtacatgtcacatgcccattttcaccattttagatatacagttttgatactttactttgcatttattttgctatatgtaattgaggatattgttttaatttctttggttttttttttggctaaatgagaattcactgtctttggttcttaaaaaaaaagtatttgttaatggtaaacgctaaacgctatttgagtttatgttttttcaagaactgaaaacgttttattgaaaatatacact

SEQ ID NO: 162556 - DNA, 426 bp, Arabidopsis thaliana landsberg
  unsure (1)..(426): unsure at all n locations
ctcaaactctaacatcagaataactggtggcgttccgtgaaactcactatgcctagagctaagattcccagtggcgtgccgtgaaatcttattcctaaacatgcatgctaaacaagttcgataagttcaccttagtatatatgcagattcttattacacacctataaacgaggctcatcaaataatagttctgaaaacaaatacctatggtgggtatatctattatctggaatcaagttctaattagctactctagaactagcaataagaacaactgaagatgaagaatcctacagataacctagcaagggggcaatctactaaatcgtctataaccctaatgagaaaccctaaacctaacaagcaatttanttagacgtgatggatcccacattcaacatgtatgaataagaaggcataaacgaa

SEQ ID NO: 162557 - DNA, 425 bp, Arabidopsis thaliana landsberg
agcagaagccagtttctgaggacttgacaaatacaacacacgttgacatcaacctaccaatgctgctctatttgtccagagagaagcccgcctggttctgagatcccgtacaagaaagcaggagcacatagtttctaagttctgatctatgtgtccagatagaagcagcctggttctgagatcacaacaagaaaacaggagcacaaacaacaacaaagcttgagctcgagtacctaccttaaactgctgcattgaaccaccaatcttatatgtttgcaagtctggtgtgaatgaggataacatttttttgaagatggcatatgttgggaaattctcagacatttcattctttgtttttgttgtcttctctcttgcaaactcgcaactccgtttataagcttgcaaactattaaagataaatgttt

SEQ ID NO: 162558 - DNA, 222 bp, Arabidopsis thaliana landsberg
agaagctgttgttattgctcctcctgcacttccacttcgtcttcttcatactcatacccttcttcctcatcagccgttgcgtcttggtactgttgatactctgacaccaaatcattcatgttgctctctgcctctgtgaactccatctcgtccattccttcacctgtgtaccaatgcaagaaagcttttcttctgaacatcgctgtgaactgttcgctcaca

SEQ ID NO: 162559 - DNA, 291 bp, Arabidopsis thaliana landsberg
ggtacattatggaagtagagagactaagtgtcagctatttgagaatccacctatagctatctcatttctaacttcacacctaaacttgcatcatctcaacatcttccttctacctactctataactctgggtttctcttacttggtccagtctttccactattgaacttcctagactccttcaggcgcgttgtaagtttgtctatttactttcatttgacgagagcatagtgctaggttatctgcgagcgaatacaacataatgacttcagaaaaaaaaccatcggagcaa

SEQ ID NO: 162560 - DNA, 171 bp, Arabidopsis thaliana landsberg
gaggatggggaggaggaagttaaggttgtggaagtgtcgtcgaggggtcttcccgggaaaaagaatgtactaaagaagtcgagagaaagttccggcaagccgggaggcaccaacaagaagccgttttagtttttcacttcaactaataatatttgacggagaaattcttcc

SEQ ID NO: 162561 - DNA, 405 bp, Arabidopsis thaliana landsberg
gtatcatgggatggttctcgttcttacctgaataccatttgtggtaataccacttgaaaggataagctaatccataaagaagattagagacgctgaaattgttggtggctttgaggatctcattagcagagaagaatttgatgggattggatttgccatggcctaattcgatgagatcttttaacaagatgcctcctctctccaattttagcttcttattcctcttcctccacaaccaacccatctctaaacctaaactgtttttttttctgtttttttttttataaaagaaagactttagttttaaatcaaatgagcagagagtattttcaagaactcacacaatgagtttgcaaacgaaatggataataagattagatttttaaggtactcaaattcttgttg

SEQ ID NO: 162562 - DNA, 401 bp, Arabidopsis thaliana landsberg
attaaataaaataatatcatatatttataatcatctttgcaataaaagtttttagtttaactaaaatataagcctacatgcggtatgatttactacctaatagaataattctaaatattcgggtctggttcgggtaggatccagttgggtttgggttagtttggataaaaagtttcagatcctaaaaatacccaaaaaatagaaacgggaattttgtatgtagatagcgggtctccaaacaaaaaaaacttttaaatttgttaagttttaataaatttaattatatttgaatatattttactaaattttgacaaacataacaaataatttttgaatagtttagttattttggatatttaggtccaaaattaattgacatatttagatttataattataatc

SEQ ID NO: 162563 - DNA, 216 bp, Arabidopsis thaliana landsberg
ggttaggatttgattagacttgttaggcatatggacttagtttggatgatcatggcaatatgttagagagtgttgggagttcctttgttttcaaaacctcttccacgggttcggcttttgtgttttgcttgaaggcaagcaaaagctaagtataggggagttgatatatccctatttttactgattttatctttgatttagggttaggattttgag

SEQ ID NO: 162564 - DNA, 144 bp, Arabidopsis thaliana landsberg
tcaaaattatcatgaatcccacatcttaaccaccaattgttctcatttaaagatttcgaattttatttagatttttcaccatctattttggtccacagattagttgactattattgtcttcaccgacccggattattctttttt

SEQ ID NO: 162565 - DNA, 89 bp, Arabidopsis thaliana landsberg
tcaatcaattaagaaacaggcacgattctgataggaggaacagaactgaataacagatcagagatattctctcacccgatgcatcttcg

SEQ ID NO: 162566 - DNA, 212 bp, Arabidopsis thaliana landsberg
ggaaatcttaaacaatggataagaattggatctattgtcacactctctctctctctctctctctctctacaaacatttgcataaacttctactattactactactttccaatcaatacctgggaaaagaacacaaaaccaagctactcttacagagcacaagagaagaagttagataagaaaatgagaaacatacaaatttcttaccggatt

SEQ ID NO: 162567 - DNA, 425 bp, Arabidopsis thaliana landsberg
agttgcattaggtaagtacggaatttaaacggcaagatgtgattacgttaaagtactaaacagaacgaagtgtttccttaaaccccaggcccaatagagagtttaaataaacaaaattggttacagcatcggccaaaagatagtgacatcttatttaacacacaaactacatacagtaggatgtttacgtaagtattacgtcatcgcacacacactaaaccggctccggtgacttctccatgactttatgcggtggtgcaggtgccgggaaattagccaacggcggtccatagtgaaactgcgacgctgattttataccttccctccggccgattttccttccgatgagataaaaggcgatagcgacgatcagaaggagaagaatcgccgggaacgatatgtagattacataacccattgtttta

SEQ ID NO: 162568 - DNA, 175 bp, Arabidopsis thaliana landsberg
attgatgagtgctgcaggttcgagtcaatccgactattggaaaatctatatggcaaaccaacaaacttgaggatatcctaatttccaactcaaccactaaggttggagctaatctcactgctcttccttttacctcttcaaacggttagtattcatagatcttgactccttgttc

SEQ ID NO: 162569 - DNA, 133 bp, Arabidopsis thaliana landsberg
ggggggggggggggggggggaggggggggggggggggggggggggaggggaggggggggggggggggaggggggggggagggaggaaaggggggggggggggggggggggggggggggggggggggggggggg

SEQ ID NO: 162570 - DNA, 131 bp, Arabidopsis thaliana landsberg
aaaaatatataaaaaaataaaaaaataaataaaataaaataaaaaaataaaaaataaaaaaaataaaatttataaataataaaatataataatataataaaaatattaaataaaaaaaaaacgtactattt

SEQ ID NO: 162571 - DNA, 337 bp, Arabidopsis thaliana landsberg
cgccgatcaccgcacttgatgtcgcgttgtggtcatgaatgttatacttggttggtttcgtcaccgttcattgggggatggttaggtaaggaaaacctatcatggttatgaactatactactgaaattgtttcacttagcaattggattcatggatcataacttcaactattgggtttttgtgtgaatatgtgaaaaaaggaaacagttcacgcggtggaattggtgatccgatttccgtcacgtccaaaggagtttgggcaagttcttaacagttctgagtagatctcgttcccaagttttcagaacagctttcggatccaaaatcagaggtaaga

SEQ ID NO: 162572 - DNA, 393 bp, Arabidopsis thaliana landsberg
ttatccttttacctcaaagaaaacatcgaaatcttagagaagaagaaaagaaaaagaagagaaatgacagagaagaaagagatggaagtggtgaaagggctcaacgtggagagatacatgggccgttggtacgagattgcttctttcccatcaaggtttcagccaaagaacggcgtcgacactcgcgccacctacacccttaaccccgacggtaccatacacgtcttgaacgaaacgtggagcaacgggaagaggggttttatcgaaggcagcgcctataaggccgatcctaaaagcgacgaagccaagctcaaagtcaagttctatgtccctcctttcctcccaatcattcccgtcaccggagactactgggtgctctacatcgatcctgac

SEQ ID NO: 162573 - DNA, 182 bp, Arabidopsis thaliana landsberg
aatccataagcgttaaatatccatccaacgaatctagaaactgcaaaacattctcatctcctcccccttttcccagctcagttttcacttctgattctttattcacatccactgattcatctccttcctcgtaaatctccgccatcgaaatttagctccaacacacgcgaatcaacaaatcg

SEQ ID NO: 162574 - DNA, 407 bp, Arabidopsis thaliana landsberg
  unsure (1)..(407): unsure at all n locations
attccngccagaagaggcatatatatatatatatatatatataaaatcaaacaataataagaaagtgattaacaaatttaaattcaactaaatgtctaacatcgtaacaaatataatagaagatcaccaatgatagaaacaaactaatgaaacatcgtgaattcaaacaactaatctcgtttgcatatatcaccattcgattcatttttaaggccgcattgtgaaatcttcaccaaaatctaaaacatcaaatgaatttaagaactaaaaaaacttataaaaataattgaagaaagtttaaaaccccacattttattccaaaatgaagagaattttttaaaacccacatccggctggttcaaccgattcaccgggtcatgggttaatggcgagtttttgtgggtttt

SEQ ID NO: 162575 - DNA, 219 bp, Arabidopsis thaliana landsberg
actcaaatacaaagtagttataaacttatcgtctcaaacacgaaagacaaaaagagatggttgggtctgtgaggaggagtcatcagaaatcaacttaaggcattgagaaacgcttgaattagtgagaggatgagaaatattgagatcatagtcaccatgaaaaagtgaagcttcatagaacccattagcatcagttacacctgttgtttggctgcgaag

SEQ ID NO: 162576 - DNA, 867 bp, Arabidopsis thaliana landsberg
aaacatataaacataaacgccaatcagaacttttttacttgtggcggtttacaatgaagaaaggtttgaagcggtcttgtgttatggtggtggttacattcttagccatggttgatatctcagtttcagttccgttcataatgcttcacggaatcgcatctcaatgttctgataatacaaatgctaactttacacagcttctcactgacctctcaggctctcctggcttttgcttgtaagtcaatccacaaaatagtttattcgttttgataaccgaaagatagggccatgtagaagagttgtgtattcttgctatataagacgtgcaaagtgactacttattcttcttttatatagcatgaacaagatgatgtatttggtttggtctgattctttttttttttttttttttggaaatggaatccagagaaattggaaatggagtaataaattcaatgttcttgccacttacacaacaagcagaaatagcatgtgagaatgtgaagcaaatgaaagagttgagtcaaggatacaacattgttggaagatctcaggttcttttttgaaaaccctaaaatagatttcgtgatctttatttacatattgtttcagttacatggatgttagcttaatgattgaacaggggaacctaatggcttgcggctcgatcgagacctgtgaaagtgggccctctgaacacaactatatatccttgcctggttctcatgctggcaccgccaatctacttcagggttatacttgaagcattcatattacctttaaatatcgagattaatgtctcgaatatagtttcagtctattgatggcgagaacaacattgtatctgtttgacgtccttgctttttt

SEQ ID NO: 162577 - DNA, 714 bp, Arabidopsis thaliana landsberg
catggtattttttctaaaaagagtgtgttacataacaaaataacaagtaatttgttctaaaaaaaatgcgttatataaaaaaaaaaaaacatagaatttggagaaagaagtgtgttacataacaaataacatggaatttaaagaaaagtccagcagatgaaagagagatgcggtggaagtttcgataaaacggagaaatatccagaaattcagcagatgagaagtaagatgcgagagggagatgatacaaatgaatttaagattcggccattgaaggggctaagccacccttctggaaatttgcagatgcaacgcttccatgaagatggaagagagagaatccactcaatcagaaaaagagagaatcaagatggaagattagatctgattggagttgtgggagagataacggttgtggtttgatggtagttgactagtgacggttgtggtctgattgatgttgcggatggtggtggaaagtgaatgggtttaagatagatgatgttgtttacgaagaagaaaagcttaggaaagttgtcttcacaatgaaaggctaaaatcgtcaaaggttagtttgtatatatactcaataaaaaaagacaaaataatgtttttttaccaataacttagtaatattttttaatcatttataattttttatttgaatatatgtttctttttaaagatttatgaaggactactaattcgaaaaca

SEQ ID NO: 162578 - DNA, 232 bp, Arabidopsis thaliana landsberg
atacctgtgggattcagttgcttcttatgcaagagaggttctcggcctcagaatgagactgctcccacatctctacacattgatgtatgaggctcatgtcagcggcaacccaatcgcgcgcccgctcttcttctcatttcctcaagacactaaaacctatgagattgattcccagttcttgattggtaaaagcataatggtttctccagcgctgaagcaaggggcggtagca

SEQ ID NO: 162579 - DNA, 304 bp, Arabidopsis thaliana landsberg
ggttgggtgggttgatcaatgataaaccctagtggaaataaatcttgattttgatcgttagcctcgagttcaagaaccggatcaaaagcggggttttgatctttgttccaagagatcatggagtttaaaaggttcatggcatggtgctgatcgatatcgagaatactactcgggctaaaattgttgctgttgttgttggttaatgaagccgaagaattaaacatacgttggagatattgtagattggctagttgggctgcttcgccttgcatggatgaaaattgtgatgtttgttcgattaggt

SEQ ID NO: 162580 - DNA, 428 bp, Arabidopsis thaliana landsberg
acttcttacgcctagctctacacactcgactcccgcgatctcactctacatcagggatggtggctaccaccaggatctgcctatggcgattgttcaaaagctccctgggcctctctcagctgccacaagagaagacgttgcaatgaaacaagaacaaacaaagaccataatgtctcattccagatgaatcaaatccgtaaaactcaatgaaagaaacttacatgttgatcatgaaaagaagaacagatgcaccttcctcactacaagtccaggtctgtcaaacctacttgacccgccagaaaaccccatgtccttctcttacaggtgagctctccttacctgggtccaaagccttaacttgattccacagatccaatatatgtcgcttaccatgacaaacaatggcgagttccactccatgatgacaa

SEQ ID NO: 162581 - DNA, 655 bp, Arabidopsis thaliana landsberg
tgactcaaatatagccttgaaagaataattctccgctcgaattatcttttcattttggctaaaatctccccattctactcccttgttggcattgaggaaacaccaaagtgacaccaacacgtctttcacgttcctgcacacgtacactaccttgcaaggagacttcttcaagggtagtttaagcgcgtccaaggacatgtgagttgagaacaatctcggagaggatgacgatgatgatgatatgaacttggtcaagtccggttttgagctgttgagatacagatttagctcgaggtacggtacgatctcatgagggttatgagatagcagaggatgatgatgatcttccaaagagtgttttgatcgttgaacgagtgcaaatgtgagtgccttgagccaagtcgtgcccgatttgtagaaagaagcaacaattatatcggtttcttgtgactgaaaactcgagtgtatattggggattgatttgagaacgtcttcgtagtaccaatatccttggaacatgaaaagcttgttcccaaggtaatctatctcccaaggaagtgaagagatcaaaattttggtttcttcgctttgattttcttcttcttcttcttcccacaagttccatggaatatctttctcatccattttttttggt

SEQ ID NO: 162582 - DNA, 316 bp, Arabidopsis thaliana landsberg
tcaataacaagtttagagacaagtgagaacatgtataactacttttatatcctctcgtccaagaaaattgtttctaattggtggtttgtccaaggaaatgtactacctttttgagctgtcaaaggaatttacgaagctgattctgtataaacgccaatttcattaacaaaagaaaaaaaaaaaaaaaaaactgtccacatgaacacaagtaagaaccaacaacagcttcttcaaaatgcttattgcaatctccacttatacgttatctaaaccatcactctgcaattcatctttgttccttgcaggaaccaatctt

SEQ ID NO: 162583 - DNA, 240 bp, Arabidopsis thaliana landsberg
gtaggagcaaagttaagcgggttaaagattccaccagggtaaccaacttcacccttaggtaagctgtattgcttaaagatagggtcttggttcacacttcccgggttcttgatgtcttgccaccgtctgatctcaacgtaatgaaacaatatgaattcgatcacaaacaatgtcgacgacgatgcaaaatactgctctttcccagcatcgtaccactcaggaacatttatgattcctacc

SEQ ID NO: 162584 - DNA, 375 bp, Arabidopsis thaliana landsberg
gcacaattgacaactatagacgacgtatgttattaaaaatctcacattttatttcacggaacttaatcaacaaatttcatatttatacctcacatcgcaggataaaatcaatagaaagcaaaacaaatctttgctattaaattttcaaaagagaaatttcaaacataagacaataagtccaagaccaaaccctagtccgactttcttctcaccggagcctgacttatccgacggtgacgctgccttcttagtggagccggagtcatcggtaaccccaccggatttagatttaggggcaggagcaatcggcgaaagcttgtgctctccgaacatctcaccgggcaacaaaaccatgtcgacaacataaactgcgag

SEQ ID NO: 162585 - DNA, 151 bp, Arabidopsis thaliana landsberg
tgaaggcaaagaagaagaagagtcatagaatctctgcttctcgaagtaatatatttggcgatatttaaccaagaggttcaccgtcttcatcgttggtttcaaggagaattcatgtcttttcactgcaaaagcgcagatgatgacgagcact

SEQ ID NO: 162586 - DNA, 152 bp, Arabidopsis thaliana landsberg
ttattcatcttacgagaaattgctttaacttgttttgtattaaagtaaatacatagaaattaatttatggtaacaaaaatgttacaacaatgaaatataattatatttgaactaattagtattctagacatgaaacatatatatattaaaca

SEQ ID NO: 162587 - DNA, 291 bp, Arabidopsis thaliana landsberg; identical to SEQ ID NO: 80257

SEQ ID NO: 162588 - DNA, 126 bp, Arabidopsis thaliana landsberg
ctgtactgtaagaaagtttcattaatgtaatgtagcacctttattacctttactattcaataaatatgtagcaagaaaacaaaaaagaatacaatttgtgggagaaacaacttttgcgtaggcttt

SEQ ID NO: 162589 - DNA, 163 bp, Arabidopsis thaliana landsberg
atgcaaaatttaaacttatgcatattgatatatctcgatttttactgattttagatatgatcttggtatagcttttagagtctttttgttatttttagaatcttttttagttttttttcaggtttttacacgtttgggatgcatttggagattatggagcatt

SEQ ID NO: 162590 - DNA, 134 bp, Arabidopsis thaliana landsberg
ggggggggggggggggggggggggggggggggggggggggtgggggggggggggggggggggggggggggggggagaaaaagaggggcgggggggggggggagggggggggggggggggggggggggggggggg

SEQ ID NO: 162591 - DNA, 141 bp, Arabidopsis thaliana landsberg
agggagggggggaggggggggggggggggggggggggggggggggggggggggggggagggggggggggggggggggggggggagggcgagggggggggggagggggggaggaggggggggggggggggggggggggaggg

SEQ ID NO: 162592 - DNA, 140 bp, Arabidopsis thaliana landsberg
cccaacactaacaatcaagatgtgatcagaagtcactaagtcaagccaagcaataacaggttttggtgtgttctagcagttctaagtgaacatgcagaaaagagaatttcaagcagaaacagtaaaacactcgaccaaca

SEQ ID NO: 162593 - DNA, 139 bp, Arabidopsis thaliana landsberg
tgtgatgctagcaatcaagatgcaatcagagttcacaaagacaagccaagcaataacaggttttgaggtttctagcagtcctaagtgaacatgcaggaaacaaaaattcaagcagaataataaaaacactcgaccaaca

SEQ ID NO: 162594 - DNA, 201 bp, Arabidopsis thaliana landsberg
tatgttcgtataagctgaacaatcctcctgcatgaatcatatcataagttcttggatacgttgagaatccttcacaccaatcttgatacgtccctatcaatccacgttcgtagataacacctagtgtttgtttctctgcatcgaccgggacaacgttcatgacccatgagggatatttcagcatggaagcagcgaatccgc

SEQ ID NO: 162595 - DNA, 84 bp, Arabidopsis thaliana landsberg
tcacagggctttctttccgcacaactgaagataccttacgggatacttttgaacagtttggcaaccttatacacagtaagcata

SEQ ID NO: 162596 - DNA, 277 bp, Arabidopsis thaliana landsberg
  unsure (1)..(277): unsure at all n locations
acgcttccgagaaagtggatccgccgtagctggaggatccgtcgttacaaaatcatgccatcttctcccaagctgtttcacgcgcgtccannnnnnnnnnnnnnnnnnnnnnnnnnnnngatcgtcttcacctctctcgctatcggtctaaccggtttccttttcggattacaacgatccttttcctggtctcggttatctggcggcctgcctacaacttgccacgaagatgttaaatcgctgggcgcgctggaatagtacgttaaggcgagtaaga

SEQ ID NO: 162597 - DNA, 350 bp, Arabidopsis thaliana landsberg
atcctctccgatcgttggcctcctgtttccgttttactcgacatcgttccgacgacttttgacctggaatcgacgcaggtaacaagatcgtaatctgttttttttgtctaattcggtttttcttcttctatggatcttaatttgataatttttgctttgtttccgagccgattgaattgttgtaacctaggtcttcctgccttttgcaatttcccttcttcgctcttagttgattctaggtttctgttggttaatttctgaagcttccttctgagatttctagatttgtttttcagtattgggcgtttgatagaatataattgtgcttttcgtcgttctatgcaatcgag

SEQ ID NO: 162598 - DNA, 374 bp, Arabidopsis thaliana landsberg
gacatacaaaaatctatcaagaccagctaactctaacggttagtaggtgaaagccggctattatcactaatatcttgcgtacttagttgccctatcggttagtaggtgctaacatggtttcaaaatacaagatcaaagcattaagttcaaattcgattctagtccataagtccctatcactaggcgggtgtgcaacgattatagttctttattcagttgagttaggtcaagcattcaaacgagattttgccaaagaatgaaatacctaaggtcatgtactaggtgatgttccggacatacaagcattaagattcaactcaactagaaagaatagtgtaaacgatcaaacaaaaccatagaaaccgccaacctag

SEQ ID NO: 162599 - DNA, 215 bp, Arabidopsis thaliana landsberg
ggttaggatttgattagacttgctaggcatgtggatttagtttggatgatcatggcaatagtctagagaatgttgggagttcctttgttttcaaaatctcttccacgggttcggcttttgtgttttgcttgagggcaagcaaaagctaagtcttggggagttgatatatcctattttcaccgattttatctatgtgtttggtaatggattttgag

SEQ ID NO: 162600 - DNA, 187 bp, Arabidopsis thaliana landsberg
ctgaggcttactaagagaatcatggcgcggtgaggaaggcgagagacgaaccagcggttgaggaatatgcaaaggaggcgacacacagagcagagatcatgtggtatgagagacttagttgtctttacagaacaattgagactcttggttgcgttaacagcaaagctagagctcttgaaggatcatg

SEQ ID NO: 162601 - DNA, 241 bp, Arabidopsis thaliana landsberg
cgaaaaccaataaccattcagatcctaaagatatgaataatttacaaaaattcttacagccaaataaagtaaaaaaaagaaacaagattttaggtaatttacattgcagatttcaaggcttttctcaggctgtatgagtgagattcatagcttttctcagtctgtccaatatcccatttgcttttctctgcgcccttgaagttccttcacgcgaaagctttgttatcgttccatgagcatt

SEQ ID NO: 162602 - DNA, 285 bp, Arabidopsis thaliana landsberg
attacattatgaatggaatatacagagtctcttatttggattttattactaatccaatggtgacgaagcatacaacacaagaatcttttcttttcttttgtaacatcaacacaagaatctttcattttattttatttgattctacttttccatactaatggttgggtcatcaataaatccattcctcggggagaagtttctccggcgaatcaatcggattttctgcttcaatcttcataggtgttgttgccaaaaaaacgctcttcttcttcgaatcattttctc

SEQ ID NO: 162603 - DNA, 352 bp, Arabidopsis thaliana landsberg
atcacaatgcgtaacttctttgaatttcaaaccctttactagacttaacacttttgtatcccccttaaaactctaaactcttacttttttttttttttttttttcattctcattctcattcccattcattccatacacaatcccaatcccaaatacaagtctccccctaatcctagctaacccaaaaagcgtgggctaggtctacatgaaacactgttcttgtcggctcatacctaacacgttatactaagctcaatcaaaaaagacctcacaatcacacacaaatgatctttgacttgaaataaggctaggctaagggtatgggaaactgccttagatgatgcaaaatttg

SEQ ID NO: 162604 - DNA, 126 bp, Arabidopsis thaliana landsberg
gtgtggagaaaagttttgagtttgcggtcaggcaagaaagttgctaagagaggtgtagattatggaattgaaattgagactagcaagtttgatttggatagtgaaagtgggagtaaacgaaagagg

SEQ ID NO: 162605 - DNA, 375 bp, Arabidopsis thaliana landsberg
cacgaaactgcgaataactcaaccaatttaaatccaaatacacttctgtaaactggaaaatatcgataaaagacttggaaataactctaccaatttcgttatctttgaaaacgatttgatatgacgaaacggattcctcccaaaccccaacgattctgctccttctccttctctctcttttcttcctttataaaacgaaaagtggataactaaagccctaatttcgagtttcttttttttataggtacactctaggatttccaattaacccaactaatttaaccggacgatttaaatacaaaccctaaccaattttccggttcacgggcgttacaatataaaccaacacttctggattttgattcgaatccagaa

SEQ ID NO: 162606 - DNA, 130 bp, Arabidopsis thaliana landsberg
cttttcagcaatcagccgacccaacactttgagtcatttcaccgatatcataaacaatggggttgacagggcaagctactgctccaagagtatataagtactgcagcagccggcgggtacttacgtggag

SEQ ID NO: 162607 - DNA, 679 bp, Arabidopsis thaliana landsberg
cgccttttcgtccatggcctgccttactctaccacgtattggttcttttttcttcttcttctttcctgatgggggggtgtgtcttatacatcttcatttgttctctcatgaaatagagaagaagagcttatggaacatttcagcaaattcggtgatatatcagaggtccatcttgttcttgacaaggataccagaagttgcaggggaatggccttcgtcctttacctgataccggaatctgcaaaaatgtatcttaattcataccaattaagaagttctaagtgcatgcttttcaataagtagcacttatgttcatctccagctgttttagttcagattttaaatcgttaaaaatttggatggtgttgcagggcaatggataaattagataagttacctttccagggccggacgttgcatattttaccagctaagccccgtgcaatgtctgctaaacaagtgtcagtgaccacttctgtctctaacctgtaatatgttgtttttgtggactagctaggatcttcatcagatgttgatcatggatttccccaacagagataactcctctaatctgccaaagtcattcaagaaagagagggaggaacaaaggaaggcgtctgaagcttgtggaaacacaaatgcttggaacagtttcttcatgcgacccgagactgcacct

SEQ ID NO: 162608 - DNA, 574 bp, Arabidopsis thaliana landsberg; identical to SEQ ID NO: 2939

SEQ ID NO: 162609 - DNA, 273 bp, Arabidopsis thaliana landsberg
tacaactacagtagacactctataaattaataatattgggaccatgaaattttattaatttatagtaatattaatttattctatttacgtaaaatataataccatatttttcttaaaatgttaatttatagtgatatgaaatatttacgtaaaatataatactatatttttttaaaaatgtttttaatttaattttccatatgttttgttgtttacatatataattatgttagatttttatttttatttgacttctttaatttatttttcttt

SEQ ID NO: 162610 - DNA, 257 bp, Arabidopsis thaliana landsberg
ccattcctcactaggttcagcatggttccttttttggattatttcatcaattgattcgacatatattaattttgggagatacatattttgtatcattttgcgtgtcggtgttaatatttgatttggcgattaggagttcaaaactgtactggttgatcatttccaccaacgtatgcgctattgcttactccgaacaaccatcctttgctgtatgtactaaatcgcctcctcttgatacgcttctaacgaggtagatc

SEQ ID NO: 162611 - DNA, 267 bp, Arabidopsis thaliana landsberg
ataaaaagaagaagaaactaggggtcaattggtattttataaaatggacatgcatgagttgatgttgcgtcacgtggatcaggaattggagcagcttggaaggtggctaacgtggaagaaggttccactgtcgttatctttggccttggtgctgttggacttgcggtacatttatttcaaattaatataaactatatatgtgatgattttgtttaactttaacaacaaaataatataaagatcttgtagtataaagtaatttgtggg

SEQ ID NO: 162612 - DNA, 122 bp, Arabidopsis thaliana landsberg
tgagaatttatcgtgagtattgattttttacctacagtacataaccaaagcaatgaaattctacttgtatcctgtaatggctgactaaatcaactgcgaatcgtggttcgtcactttcttaa

SEQ ID NO: 162613 - DNA, 89 bp, Arabidopsis thaliana landsberg
agaagtcaacggggcattctgagaattgaactcgggacctctcgcaccttaagcgaaaatcaaaccactagaccaaatgccctgtttta

SEQ ID NO: 162614 - DNA, 379 bp, Arabidopsis thaliana landsberg
gacatacgaaactctatcaagactagctaaccctaacggctagtaggtgaaagccgactattatcactaatatcttgcatactcagtttccctatcggctagtaggtgctaatatggtttcaaaatacaagatcaaagcattaagttcaaatttgattatagtccataagtccctatcactcgagggggggggcgtgtaacagttatagttctttattcagttgagttaggtcaagcattcaaacgagattttgccaaagaatgaaatacctaaggtcaagtactaggtggcgttccagacatacaagcactaagattaaactcaactagaaggaatagtgtaaacgatcaatcaaagtcatagaaaccgccaacctag

SEQ ID NO: 162615 - DNA, 125 bp, Arabidopsis thaliana landsberg
tcttataaggaaatagctatctttttatggccaaataaatacgtcataattttgtatgtaaatagtcacaattttctgatgaaaaaatggttgcaatttttccgtaagaatatcaagtttttttg

SEQ ID NO: 162616 - DNA, 188 bp, Arabidopsis thaliana landsberg
aaagtgtggcggatggtacattgtactgatccggtaagtgtcgcgagcaaaacacctagcaacagaacaggaggtctaaatttggggaatcagaagccagaatacaaattgcttttacacaaggagttgaagttccataagcaaccggtcacatctctgcatctcacgaccgacctaaagcaattact

SEQ ID NO: 162617 - DNA, 128 bp, Arabidopsis thaliana landsberg
gggggggggtgggggtgggggggtgggggggggggggggggggagagggggggaggggggggcagggggaagaggggggaggggggggggaggggggggggggggggagggggggggggggggggggg

SEQ ID NO: 162618 - DNA, 360 bp, Arabidopsis thaliana landsberg; identical to SEQ ID NO: 69192
  unsure (1)..(360): unsure at all n locations

SEQ ID NO: 162619 - DNA, 484 bp, Arabidopsis thaliana landsberg
ggacgaggcatgatgacagaactccttcaggtactaaacccaaccataccaatgtttatatcccaagtttacttgtttttctctatagagattcatgtttgatttgtcttaggctgtgcaggagaatgtgagagagacccatttttttcaaggccatttgttctttgaagactattattttttttttcctaccccctatagcttaaagtctgattcaatcttatctgtatcagaaataggaaaacagaatctaactattgactagctcaaagacgtcagcaaaattatcgtgattcattatataaaatgctcataacttcctctatctgttttctttagctagtagttgtatatcattgagaaagaaaaaaaatccaagtcatcagacggatctataatttttggtttttaactatgtatcaaaaacttattaagctgggaggcaaataataaggtaatgaagatgaaaaacaagactttctat

SEQ ID NO: 162620 - DNA, 151 bp, Arabidopsis thaliana landsberg
gaaaaaataaaaaagataaaataaaaaaaattaaaataaaaataaaaaaaaaaaaataaagtaatatattataaattagaaaaaaaaataaaaaaaaaaatatatagaaaaaaaaaaaaaataaattaaaaaaagaataaaaaaaaaataa

SEQ ID NO: 162621 - DNA, 311 bp, Arabidopsis thaliana landsberg
aggcaaaaagatcaaacttttacactcacaaacatgattaagttagggttttaaagacccacataaacccatgaaatagataacttaaaaaagacgaaatttgggagagaaattgaagaaattagaagcagccgacaaaaatttcacaaggttgaaacgaaacccagaaggaataaataatcagaagcatcaatggagaagaaaatcggaatcagagaaatgattattgactttcacctttgacgcgtcttcgtttttctttgctctcaaaacctaaagctcaagcaaaagaagaagagaggaaatttcaa

SEQ ID NO: 162622 - DNA, 292 bp, Arabidopsis thaliana landsberg
tttctaacaaaagaaaataaactaattacctgaattattcttgagttacaataaaataagcttctcattgtacatcacttctcttctgcttttcttttttttggatgtaagaacatacaatagcattggagttcggaccattacacaaccttgctactttcttccctaccaaaaaaaggttccaactttacaaaaacccttttcaccaccaccaccaaatttagctttgttcatgatctcttctctactttgctatcttcgacttttctccaaaggccgaaccgatacttct

SEQ ID NO: 162623 - DNA, 107 bp, Arabidopsis thaliana landsberg
cccttcactctctcggatctgttgcttgaagattctcttgcttcttgttgtactacctgagaaactttttctgtcgccggagctggaatagtatctattggttcctt

SEQ ID NO: 162624 - DNA, 196 bp, Arabidopsis thaliana landsberg
tgccatcaaagtttaattatctttctaccgtcttttctaatatatctgaattttctttcaattagagatttgattcttcaaacatcattgtatgatctacccacgcacgttctttgttacaaatttgagattaaccctatttgactttcgagaactatctatttggtctcttggcaataaaatctgcaaaaaacgt

SEQ ID NO: 162625 - DNA, 225 bp, Arabidopsis thaliana landsberg
cgatcgacacctacacgatttttggtctccgaatttcttctgcaacataagttctctgttttcctccagaatgctccattatctccaattgcatcccaaacttgtaaattcctgaaaataactataaaagactttagaaataacaaatagactataaaacatatacctaaattataggtaaaagcagtaaaaatagaggtatatcaacagtcttgcaatatgtca

SEQ ID NO: 162626 - DNA, 101 bp, Arabidopsis thaliana landsberg
aacaacaacaacaagacgacgaataatctgtaatgatgatgattcgagttcgaaccggtttggtggtgaaagattagtaatcttttcaaaaccggattggt

SEQ ID NO: 162627 - DNA, 216 bp, Arabidopsis thaliana landsberg
ggttaggatttgattagacttgttaggcatatggacttagtttggatgatcatggcaataggctaaagaatgttgggagttcctttgtttttaaaacctcttccatgggtttggcttttgtgttttgcttgagggcaagcagaagctaagtctaggagagttgatataaccctattttcactgattttatttatgtcttacgtataggattttgag

SEQ ID NO: 162628 - DNA, 271 bp, Arabidopsis thaliana landsberg
atatacaggagaaactgtataaattaataatgattggaccataaatttttattaatttataatgatattaatttattttataaattaataaatattaattaatagaataaattaataaatattaatttatagaatattaacgtaaaacacaatactaaattattttaaaaatattttttcgatttagtatttttttcatattttgttatttgtatattcaattatgttagatctttaattttatttttgactttttaaatttattttctgc

SEQ ID NO: 162629 - DNA, 450 bp, Arabidopsis thaliana landsberg
gatctgcctcttcaaagttttatagctcaccaataaaaacaaatttgattaggttgttatagctatttgtttttcttagggagtaatgttctctagccataatattttcttaaccattggcattgtgtttattcgtaggtttctgactttggaagactctttcttgcttgaaaaccgagcaaccttgagagcaatgtaggttccttagttctcagcaatattgaattcttactgattaggctccatagtgaccattttcttctattgtagggctgagtttggagcaattcttttatatttttatatttgtgatcgaactagcttgatcgggcagtctcaaaaggtgcctccatcaaacttctttgacgaatttccttttcggttgtaaaatttcaaaaaaaatacttgtgcaatatatagttcactagagccgaaattctttctggtgta

SEQ ID NO: 162630 - DNA, 137 bp, Arabidopsis thaliana landsberg
ttgatatacctcgattttcaatgcttttagctatgaattaggtatagtttttagagtcttttgttatttgtagagtcttttctagtctttttcaggtctttaaatgtttggaatgcatttggagattatggagcatt

SEQ ID NO: 162631 - DNA, 148 bp, Arabidopsis thaliana landsberg
ttcgaggaacgccaagcgcaccaataacctacttgtgggttttggtggcccaaggtgaggggttagggtcgatgcgctgtagagccagcaggatggcacatgacagagagtggccacatgtgcgggtcccacagagcgggttattaca

SEQ ID NO: 162632 - DNA, 456 bp, Arabidopsis thaliana landsberg
tttacctcaaaaatcactctttcaactacaaagtcaaaccaaaaataaaaatgacatttatatccaacaatttgttctctgtaaatcaaaagacaagatcctttgtatgtttcttacagcattctatcctgaagatcactgaatatactagaggcaaatgttcccagcttattctttgtttcctcagctaagttagcaatagatgacatatcttgctgcgcctgtgcccaataataaacaaagtcaaataaaaaaaccttataagcagagttaagaaaagctgaagaatttgattctacttcagaactttacctggaaagaaattcggttgatgagatcgcttgcagtgatatcgatgttggaatcatctggtccgtggccaaaaagatcagaacttgaaatagctgctgaaccctgatagatttgtaatcgcattaggcatgtatgaacaacgag

SEQ ID NO: 162633 - DNA, 370 bp, Arabidopsis thaliana landsberg
gacatacaaaactcaggcaagacaagctatccctaacggctagtaggtgaaagccggcaattctaactatacctcgccactcagttgccctaacggctagtaggtgctaacatggtttcgagatacagatcaaagcattaagttcaagttcaattctagtccataagtccctatcactcggcgggtgagcaacagttatagttatttatttagttgagttagttcaagcaattatacaagattctaccaagtataaaatacctaagatcatgtactaggtggagttccaaacatacatgcattaagattaaactcaactagaaagaatagtgtaaacgatcaaacaaaaccatagaaaccgccaacctaa

SEQ ID NO: 162634 - DNA, 409 bp, Arabidopsis thaliana landsberg
agttattagagatagtaatggccgttgatccatgaatggcgtctatcagaccgtcagcgcagttggacaacgagcaatggtctacccacacgtgggagccaccaaaaatcgagacggcgtcaccgtcagacgctgtcctccacccataatgcgacggagagtctctaacgtaagcattcccctttcttttacagtcatggatgttaacaccgtggatgatgatgttggtcacgtactggacggtgatacacgcgccaccagcaatgtggacgctcgctccacggccgtctatagtcttgaaagagttcataatcagctcttcttttagttttatgaccatgtcacgcgcgaagatgatccatagtggctcgtcttggatcaccgcgtgtctaagggttccgggtttagg

SEQ ID NO: 162635 - DNA, 426 bp, Arabidopsis thaliana landsberg
catatataaaaaaaaaaaagttttattataagacgactaaaacattatttgtgtttcacaaatctctcatttatctctatctctctcaaaggtttgtcaacctctctcccctgatataagcaccaaacaaagtctcaaacaaaacaacacaagaaaataaaacacaagaaccacaactaattgcaaatgtgctttaaccacaatcaagaatctcattagttcaattaagtgaactaagaaactcaacccaaatatgttctgctctttttgtcgtctccaccgcaaattcctcagccgcttgctcgtcctttgccttatgcaccgcctcgtgatactcttcgtaagcctgtgaagcctccttgagaagctccgacagactcgtcgttaaagaggtgaactttgaatcaacgtccactttctctgctt

SEQ ID NO: 162636 - DNA, 174 bp, Arabidopsis thaliana landsberg
attcaaagatcttctgctttccacatagatgcgagtctacttcgacgaggctcataagcagatcttctctttagttgatgtgaagatggtctaatcaaagtagtcaaagctcttcgcacccattcaccttcaacaccaccaattctcacaagagaattagtcatcgcagatcga

SEQ ID NO: 162637 - DNA, 448 bp, Arabidopsis thaliana landsberg
aaactcaaaaagtgcaatagtatacttgttgctagctcttattatttgataaagttttgtacttgcatcttttttttcagtcaccggaagttggaatttcctttgtgataggatctaaacaagtatcaaagtctacaaatgttgaattaagcaagttaaagcctttgtgattcccctgtatcttcaacaacctcgtctttaaaactttatccaaagacatgtgtggatagtcatagcaagccacagttacattatacaggaaatgtaccacctaaggctttgcattccaaagaaaatgtcacagtcactttgtttgatatgtttgttctgtggattgttaacattccataaagtcgatatggatcttgcataggcttgcttactcttttgatccagttaattatgctgctgatagaagtaagcaagcgttctttttcaatacgttaaa

SEQ ID NO: 162638 - DNA, 131 bp, Arabidopsis thaliana landsberg
  unsure (1)..(131): unsure at all n locations
ggggggggggaaaacaaccggaaaaaaaaaaatgggggggggggggggggggtggggggggggggggggggggggggggggggggggggggggggggggggggggggggggggggggggggggnggggggg

SEQ ID NO: 162639 - DNA, 496 bp, Arabidopsis thaliana landsberg
cattaataagggcaactctccggctaatcaggtggctaacaggcgaaaggcaaataccctagccaatagattcaaaaccagatcaatccactctcgtgacaatgatcctcattgttttaccacttccacatctcaactctcgttgatgaaacatagcaaagcaggctttgaggaacaatctatcaaagtcaataagcagtctaaacatccaatctcttaggctagaatttacaaatctttggaattcgtagatcagacatccatttgaacgtcttttggacgctggaataccttgggtcgaattccaaactgaactgagtgacataagcattagggccaatgaatcgagaagggatctaacctaatcttaaccaccagactatcatagagattaccctaatctaatccatcctcaagaaccctaattgctactcaaacaacatagctaagaacacaaacccagattttactgaaatcatattaaaatatagagcta

SEQ ID NO: 162640 - DNA, 111 bp, Arabidopsis thaliana landsberg
agacggacagctgaaactgcaattgccaaggatgtttgcattagacaaaaacgaaggtttttggctcgaaaaccaacagaatccgtcctagtctcaaccatatacgatgcc

SEQ ID NO: 162641 - DNA, 419 bp, Arabidopsis thaliana landsberg
cccgaatagctcttcttgcttctttcttggtcacaaacaaaagacaatttgtcaatttgtgtgttttaggtgtagaaaaaggctagaaagctgtcattgttaagcttgtatagactcttttcttgccaatgaccattcgtttttttttccccttacattttgtcctttttgtcgagcgaatcttcaatgctcctaactgaaaacggagtgggctgaagaaaatctcaacaacggctggaggcgatgtaacttgagctatcgaaaaggaatggaactgcgacgaaaccatgtaaataataataatagtgtattgttgttctttggtatattttcacacacactctcttctgtaacttacaaaagaatattcataatcacgtttgaatagctcttagacacaaatgagttgggttataaat

SEQ ID NO: 162642 - DNA, 127 bp, Arabidopsis thaliana landsberg; identical to SEQ ID NO: 62274

SEQ ID NO: 162643 - DNA, 482 bp, Arabidopsis thaliana landsberg
ctctctaacgtgctttggtctgagtctgagtcttagcttcttaacacgatggtatcgcattccacgcgccggcgagttgttgcgtatcgataacaatatgtctaccctaatatgaacatcagccttgcatcgtcgggtattaaaccacgcaccattctgagttcctctcacatttatagtctatggagaacttagaagcctttgtattaaagagtcttaaagtttgaaacttttaaaacgtctgttgattttagaagccacccagatcaagattttcctggaatgcgcattgtgatcccttcgtctcaggtatataaactctgtatctgatagtgtgacctgagatacgtaaagagaactagtcatcgaccttaattatgttttggtttaggtttcgaagatgcatgcccctgtcctttacaaagacggagctttcttcataatggaaattcgaagcgaacacggaacctatgtcccgagta

SEQ ID NO: 162644 - DNA, 146 bp, Arabidopsis thaliana landsberg
ttaatccatccaagacggcagcttttaccgcagcgaaggagaccagcggctctaggaagagatcgccaatatactttcaccgtgagacttgatgtaagagactagtctctcatcttcttctttagtccaagcacctttgttcatgt

SEQ ID NO: 162645 - DNA, 360 bp, Arabidopsis thaliana landsberg
cggttatttcaaagatgtgtctttcagtagctgaacaatttatgcgcacggctctctcattgcttattttgtatgtacatgaacaatgtagtttccaagacaaatcatattatagtacagagagcacaacttcttttgaattggaacatgtagctgttttatacatcatcaatgctgcgttttctccatattgacacaattctgtcactttttagtttaggctatcgatcgagccggtagcttcgtaaaaaagaatctctggtcgaaccttcttttctccacagaacgtgaccacactcttccagttaccaatatcctatggcatcacaacacatagatcaacaatgtcaggcctatcta

SEQ ID NO: 162646 - DNA, 409 bp, Arabidopsis thaliana landsberg
ttaataaatgttagatttttctggatatgatgtaattcaaatttttaaaaactgacatacattactcaatcgatgaagaaaacaaaatatgtgtacaaggtcccacattgcttaaaaaattaggcagtagttcaaagtcatactataaaaaggatcaaaatgattcttaatacgaatgagtagaaattttgatttatcaggcatccaaaattaagaatgttaaccgatttactacggtaatttgtttttgtaaggattaagactttaaaaagtttcaaaatattataaatacttatttttttaaaagtttagctttataaaacgttttaaatatttataattttatattttttatgaagatataaacattataagtatttaaacgttataaaaagtttaaatattataa

SEQ ID NO: 162647 - DNA, 276 bp, Arabidopsis thaliana landsberg
gatacctacgtcaatttctgtctctgaattttttctactgcttaagtggtctgtagcttaaggtgactttgttgctccagaatactccataatctccaaatgcatcccaaacatgtaaagacctgaaaagagtagaaaagactctaaaaaaaacaaaaggactttaaaaactataccttaatcatagctaaaagcagtgaatatcgaggtatatcaactcccccagacttagcttttgcttgccctcaagcaaaacacaaatgccgaacccgtgaa

SEQ ID NO: 162648 - DNA, 347 bp, Arabidopsis thaliana landsberg
atcacagtgcctaacttctttgaattccaaaccctttactagacttaacacttttgtatcccccttagaactctaaactcttactctcttttttttcttttcttttcattctcactctcattcccattcattccatacacaatacaagtctccacctattcctagctaacccaaaaagcatgggctaggtccaaatgaaagactgctcttgtcagctcatacctaacacgttatagaaagttcactcggaaataaacctcacaaacacacacaaatgatctttggcttgaaataaggttaagttcagggtatgggaaactgctctaaaagtgagagtcaacaacttg

SEQ ID NO: 162649 - DNA, 228 bp, Arabidopsis thaliana landsberg
aaatactagattttaacctgcggtataccgccggaataatttattttttaaaattaatatatataaaagtttataaattatatttatctataaaataattttattttatattttacaaatgttattaagtaacgtccttccaaacccgtcctgtaaaaaaaaacccatttattttattaatattgatcttatttatgatatgtttatgaatcattgtctaaatatttt

SEQ ID NO: 162650 - DNA, 221 bp, Arabidopsis thaliana landsberg
ctcaaaatcttatacctaaaacatagataaaattggtgaaaatcgggttatatcaactctcccagacttaccttttgcttgccctcaagcaaaacacaaaaaccgaaccagtggaagaggttttgaaaacaaaggaactcccaacattctctagcctattgccatgatcattcaaactaagtccatatgcctaacaagtctaatcaattcctaaccaacat

SEQ ID NO: 162651 - DNA, 363 bp, Arabidopsis thaliana landsberg
ataaaatattatatattttctgtatatgacgtaattcaaattatttaaaacggatatatattattcaatcgatgaagaaataatatgtatacaatatcccacatcgcttaaaaaaattgaacattggttcagagccatactataaaaagtaccaaaatgattccagtacgaataagcaggaaacttgatttatcaagcgtccaatattaatttagttatccggtttactcggattttttattttaaataatagaaactttacaaagtcttaataattataaaattttccactttttaccaaaagttagatattatagtttaaaaactttatatatatatctttaaattataaaaatcacataa

SEQ ID NO: 162652 - DNA, 352 bp, Arabidopsis thaliana landsberg
tatgaatctaataaccccaaatatgaaaaattttagacaacttttcacaaatcttaaatgaataatacaaaactttaatatacttataaaaaatctttattaaataacacgagattttacatgacactttaagtcactaaaactcttttaaaatcataaaccaataataccccctaaaacataatatcatgtcaaaattttaaagatttgattttgtaattagttaagggagttgcaattatggtagaagaaaattcatttcaaaattgtagtttaatatgtagtaatttcaaagtttaatgactatttttctaaatatttaatatatctattaataaattattttagtcaa

SEQ ID NO: 162653 - DNA, 137 bp, Arabidopsis thaliana landsberg
ttgatatacctcgattttcactacttttagctatgaattaggtatagtttttagagtcttttgttatttgtagagtcttttctagtctttttcaggtgtttacatgtttaggatgcatttgaagattatggagcatt

SEQ ID NO: 162654 - DNA, 174 bp, Arabidopsis thaliana landsberg
accacatgcatcaggagagcaaactgcttcttccttagctcaagcaatctccaacttgcagtgctctctgcttcaagctcagcaatctccttgttcaattcatatataaccttctctgtctctgaccttggcggttgcgcagaaatcagttttcttatcgtctcacactcttct

SEQ ID NO: 162655 - DNA, 374 bp, Arabidopsis thaliana landsberg
  unsure (1)..(374): unsure at all n locations
gcccaaggagaatggaaagaaacggagcttgaatccgtcttcactaacaccattgatttttgttaggttgcagagcctatcaaattcatccaagtggttgagtggatcctccatnnnnnnnnnnnnnnnnnnnnncccctaaatcatcaagatgagaccactcttaatctcgaaattgttgttctggatagcaggaggtacaattcctttcctctgacggtggtcctgtggtgcatctccatcaccaatgtttgcagggccattctgttgattttgttcgtcagccatttcgagtggttgctgaggtataaggttgactgtgtttctcctttctctgagttcacgaactaggcggtcgatgttatcgctgaaaa

SEQ ID NO: 162656 - DNA, 412 bp, Arabidopsis thaliana landsberg
tccttctgtgtctactacatctacaacctgtaaccgcaactattccgagctttatgtgcttctttggagaccaggatcgtctgcttcttcttcttctttatctcttataacatctatcaccggggcattgcagaaaaaacatctctgacagttgagaagatgtctagttatgcagccataacatgatcgatgtgaacacggagcaatcattgcattagcctcccccgcgtagcagatacagcaagtgttgtcttctgtatccgacgtgtctttgttgaatgactcttcttttctttcgggttcttgcgatgaagcccggtttatgagatggctcaagaagttctcaagttgaccaagtttctttacataggcatcatccccgcttacacaaccggcctgaaaatgtttttga

SEQ ID NO: 162657 - DNA, 271 bp, Arabidopsis thaliana landsberg
taataacttaagctatcatcaacaaagagtgttgatatcttgaaagtggtttattatttctctgtgatgacgagtggagcccgaggaaccgtgggctgtagcggtgtgcagtgccagtctttaccgtctttgaccactgagaaatgtttgggaacccatgactcaccagaagcctctctctgtttcagagcctctctctgcttctcctccacaagtatcttagcttctcttgctctttcccaatctttcttcagtattccttcacttactt

SEQ ID NO: 162658 - DNA, 458 bp, Arabidopsis thaliana landsberg
gtgcttcaccagcttctctggcccttaaccttttgttaacgatccctctcagtataacttggatttctcttgcttttgctttcatccttctgttaccttttgttgggagataactacagaaaaagattggcagaaagataatgttaacacgattcatatctttaaggaatagattgcgacactttaagatcaagagtcaagctcagaaggacctatattaaatcagataagttgagtttttcattacctatatccagggatgaaagctttcctaaccgtttgaatgatgagctgtgctagttctgcttggagctcaaatatcctctgcccttctacgcagctgctgccaaaagcagtacgggagatcacatctgcagtcatactcacaagcccgggccaaacatctacctcacatgatgactctttatccgacactaacttgtcccatttgccaacaa

SEQ ID NO: 162659 - DNA, 119 bp, Arabidopsis thaliana landsberg
tttgcattgtatatttcatgaatttgagtgagtgacttgttagaattgcccatatagatagtacataaaatggggtctgtcatctttaccaaaatggttttacttcatctgacatccat

SEQ ID NO: 162660 - DNA, 179 bp, Arabidopsis thaliana landsberg
gattaatgctgcagattcgactcaatccaattattagaaaatccagatggcaaaccaataaacttgaggatatcctggtttccaacacaatccattaaggctggagctaatctcactgctcttccttttacctcttcaaacagttagtattcatagatcttgactccttgttcatacct

SEQ ID NO: 162661 - DNA, 110 bp, Arabidopsis thaliana landsberg
aacgggagacggagaatcagggaccgacgatttagagggagcccgagaaacggcaaccacagggaaggaaggcagaaggcgcgccaaaaacccaaaccggacacggggag

SEQ ID NO: 162662 - DNA, 175 bp, Arabidopsis thaliana landsberg
aaactcaaattctacaacttgataggaaatagtatccggaattgcctgaaaacaacttattgagaaactaacaaaagagataatccagcgtaggtccacctcctggtctaaccgccaaagacgtgacatggttaaggcggaaagcaggaggtttcaaggtcagcgataaaaccac

SEQ ID NO: 162663 - DNA, 1002 bp, Arabidopsis thaliana landsberg
gattgaaatcaatctcttgtgacgtaatggttagttgattaacaatctcttcttcttagattaggtttaaacctaaaagtgtattttttctttcaaatttcttgtaatgaattggttttggtgtgcaggcgattgaaacagaggacatcaagtacgaagaggtgtgtatttatatatgtatgcaacgcatatatagaaaaggctggcgattgattgatgattatatatttatgtgcagagtttcataaagaacactcgaggatttaagttgttcacatgcagatggctaccaacaaacagagagccaagggctttagttttcctttgccatggatatggcatggaatgcagtatcaccatgaatagttgagatcaacccacttcacaaattctatatattataattttttatttttttttacatttttacatctagcttttatctgagacaaggaaatagctaataccgcttaattaatctggtctaagatccaattcttagttaccccaacaataaaaaaaaaaaataacgttcaaggtgaatatgattggattaggtactgctagaaggcttgtgaaggcaggatttgcggtatatggaatggattatgaaggacatggaaaatctgatgggcttagcgcttatatctcaaactttgatcgtcttgttgatgatgtctcaactcactacacagctatttgcggtaacgttgactttgtgatggtaaaagtcaacttattgattgatatttttgtgtgacaaaaaaacgttgtaatggaaaaaactatataattggtgaatcaatatgaattttcttggtcgaacgtgcgatgatgcaagcagctgataatgaatatcttgaaagttgtttttctatttgacatatacttaattatctcttggaatgcaaaattgaaatagagagggaagaaaacaagtggacgatgaggtttatgttaggagagtcaatgggaaaagcagttgaattgttgctaggcagg

SEQ ID NO: 162664 - DNA, 393 bp, Arabidopsis thaliana landsberg
aaggattatttctttcttacaactcttcttattccttgcacacacaagaagaagaaaaaaaaaactcttcttattagtgaatttcataatagggtaaaagaaacatttcatgcaacggaagatggaaatgcaatgagagggttcttgcgacaaacatcgagaccaaaatcttcagctagatcaggttgatccccatttggtccaggatcgacactccagtcaaatcggcctacaaggttggccaatgtaacctctaccaaacccatagcaagatttatcccgggacaaattcttctacctgatccgaatgggatgtatttcaaatcttgtccatgataatccaaagttgaatctaagtgtctctctggtttgaattcttctgcatccggtccc

SEQ ID NO: 162665 - DNA, 385 bp, Arabidopsis thaliana landsberg
atatgttctcaacacttgtattgccagttgcaacatttattacacggactccacatcttgtcactgtgaacctatcatttagacactttgtctgctgattgataggaaagaactcaaatacaactaatccagcccagatatcagggtcatttccttcaccggtacttgggcgcatgttgacatcactaaagacaaacgtatgatcctttcgaacttttggaacaactttccctggtgcccaacaatgaaaatttctttctatcctacaagagcggccttctttgttgctccatctgcaaacacaacttatgccaacatctgtagcatcacagtagtcctcgggaaatgcaacttccaccagcataccaaatcccacaagcgtgtt

SEQ ID NO: 162666 - DNA, 216 bp, Arabidopsis thaliana landsberg
ggttaagatttaattagacttattaggcatatggacttagtttgaatgatcacggcatatgggctagagaatgttgggagttcctttgttttcaaaacctcttccacgggttcggcttttgtgttttgcttgagggcaagcaaaagctaagtctggggagttgatataacacaattttcaccgattttatctatgttttaggtatcggattttgag

SEQ ID NO: 162667 - DNA, 318 bp, Arabidopsis thaliana landsberg
aaaaagcgtacgggataggagttggagagatttcatcacatcatagaacataatacattacatagcgtagatttagggaatggtacaagaacgttttaaactgccttaaccggtgttttgcataccagcagcgatacccttcatggtgaggataaccgtatcttcaagtcccggtgcgtattcactctttggattcagtttcacgagctcagccgctggactagactccatgtagtccttagagagatgtggccggactttgacgtggaagcttgggtcacggatctgcttgagtgtataggcttgacacacgttcaa

SEQ ID NO: 162668 - DNA, 87 bp, Arabidopsis thaliana landsberg
tgaattttcacggccgacctctctctcatcctccgagtattgttggcttcagaccaaatcttctccggcgctgcggcgtttcccccg

SEQ ID NO: 162669 - DNA, 381 bp, Arabidopsis thaliana landsberg
gtcactattatctatatttacacaatttattcgattttttgtatgttgtcttatctcatcggaaattttcaaactagttaaccatcggaaaaaatcaagacgcacggatatataaattacatattcataaatcagacatttgacaatccgatagaaattgtctcataaagagaaaaagaacacagacaataggaaatgaaatgagcagagataattcataagaatgttttagaaaagaaattaagcttcggtgaagcttgggggcttgtaggcaatgaaactgatgcattggacttgacgggtgttgtcgaatccgatgatcctaatgaaggcgcccgggtactccttcttgcattcttcaacttccttcaacacttgagc

SEQ ID NO: 162670 - DNA, 380 bp, Arabidopsis thaliana landsberg
attgagaagaaatcaaatagagaaaatgatgttatcgtttgcgattgcatatacagcgaagagatttgttcatcggagtcttgtggtgagaggtaatgctgcaactgtttctccctctttttcctttttctggagacgagctttctctggtaagactagttattattacagagagaaactgagtagaaatgggctgagtgaattaaagttagatgacgctgttgctctgttcggtgaaatggtcaagtctcgtcccttcccttccatcattgagttcagcaaactgttgagtgcaattgctaagatgaacaagttcgatgtcgtcatctctctgggcgagcagatgcaaaacttgggaatgcctcataatcactatactt

SEQ ID NO: 162671 - DNA, 275 bp, Arabidopsis thaliana landsberg
aatcatatatatgaaagttaggcaactctttccatatgagtgacacatcattacacaaaaaaatgacatgtgtcattctacattaattaaattaaaaaattagcaaaactaattgagaaaaaatcaaaagtcttttgttgtgttaaattctccattaatctttactcttaacaaaatatcttcatttaaaagaaaaaaatacaaaaaatcatgttaatgtattaaacactactttcattttacttttcttattttatttaaaatttttttatcaa

SEQ ID NO: 162672 - DNA, 380 bp, Arabidopsis thaliana landsberg
  unsure (1)..(380): unsure at all n locations
cactaactgcaaaaactcaaccatattaatcaaatccagttctgtaaactggagaataacgatanacgacttgggaataactctaccaaaatttcgttactttttaccacgatttaatataacgaaactgaattctcccaaaccataacgattctgctccttctctttctctatctttttctcctttataaaatgaaaagtggctaactaaatccctaatttcgatgtttccttcttttataggcacactctagggtttccaattaacccaaccaatttaaccggatgatttaaaaacaaactctaaccgattttccggttcacgggcgttacacctagcaaaggacaatctactaaaccatatgaatccctaatgagaa

SEQ ID NO: 162673 - DNA, 149 bp, Arabidopsis thaliana landsberg
gaaaaacatgaacttgttcttaaggacaaaaacattttattcaaatataaaagtctgaaagataagagtggtcgacataagtcaaccgacctaaagccttcctagctcccagttcgtctgtagctttcctagcccgcagttcgtctagc

SEQ ID NO: 162674 - DNA, 151 bp, Arabidopsis thaliana landsberg
gtttcattttttctaactgtaattgttgttgtttatttgccttaaagacatgtttagatcttctttcatttcaaagataaaatagaagtattgtcaaccccaccgaaagcgctttagtggaagctctgaactcatattactacttctgttt

SEQ ID NO: 162675 - DNA, 292 bp, Arabidopsis thaliana landsberg
aatgatattctttattcgtcaagagacacaaaactacttatagaggagttgatattcaaaagtgcatggtttttttttgcatcttaaaacttcaccaatctatatatatacttgttgaagaacccacaagaaaagaccctttctaaaaggttatcttggacccgaggggtaatcgttttcgataagggaattggaataggggatgagccagtcagtgctagcatgaggataggcttgataattaaaatcatgtattggcatctcctccttttgccattcttcccatctctca

SEQ ID NO: 162676 - DNA, 193 bp, Arabidopsis thaliana landsberg
tgaatccgtagcttttgaaaaagccttggctcttaggcctgggctcgggggtcccagttctgaacccgtcggctgtcagcggtctgctcgagatgcttccgcggcgagagcgggtccccgtgtgtcgcccggggcacgcactgtgaaaggctctctcgggatctttttccgggggtaggacaggctgctaggt

SEQ ID NO: 162677 - DNA, 153 bp, Arabidopsis thaliana landsberg
ccgtgatgccactaattgggaacctggatctgttagctcccaagcagtgggaggagccgtgggctctcaccgcgtgcctgttgatgtatgaggcgacttatcataggcagtggcttggttaaggtaacccaccggatccgtagcgagagcgag

SEQ ID NO: 162678 - DNA, 205 bp, Arabidopsis thaliana landsberg
tgatatatccctatttttactgttttagctatgatttaggtataggttttagagtctatttattatttgtagagtcttttctagtcattttcaggtttttcaatgtttgggattcatttggagataatggagcattctggaggaaaacagagaacttatgctgcaaaagaaatctagagactaaaaatcgcgtaggtgtcgattg

SEQ ID NO: 162679 - DNA, 207 bp, Arabidopsis thaliana landsberg
gacggcgtgctttcaccttacttataactttcctctattccattttcttaattcaaatacaaaattgccttaaaaataatcttaaatcattggaaactcttaatcgtataagaaaataacaatagtagaaaataaacctgaggttcccaaaatacaccatgaagagagacggacttgagcgactactcacgattctcaatgtgacat

SEQ ID NO: 162680 - DNA, 322 bp, Arabidopsis thaliana landsberg
atgccagaaagataacaatatcaattataacatactttttttttttgtttatttgtgcaaaaagcacaatgaataagcacgttctgatcagaagcccacaagccatgaactaagtttgtttcttgtctcagtacaactttgttcccacacttctaacaagaagattgcacaccaagggaaagaacaaaataaatgagaagaaagactgcagaattaagcaatacttccgtagtctacccttccatgggacgtcgatggaacattcgggacatgattgttagtcctacgacctacaagatgaaacatatatattaatttccag

SEQ ID NO: 162681 - DNA, 466 bp, Arabidopsis thaliana landsberg
ttcaccataaacatcatgccgctcttcataactgacatcgaaaatccttaactataaaaggtagacacagctggttacatcagtctttctgcatcgattcaaactagaggtgattgcctatcatcaagagaaacagtaagatgcaggatcaagagtatatataacaaaatttacagatcttggaaatctaaggactctagctcttcttatatagtctcaggacactgaaagaagtttgggccagcgttgatcataagagacatccttcaaacacttcaaaaactatatttacatgttcatatagtaactttcagtagtacttttcaatgttctgttttaaccatacacattcagatgagtaagaatagaacctgccaatggtgtgaatttatcattgttgacataagttgttcatctaccagtctcccacgaaacagttgctctacaaaatctgcctgtatccaaa

SEQ ID NO: 162682 - DNA, 213 bp, Arabidopsis thaliana landsberg
gcttttaagcagctaaataactggatggctccggacaaggtttgtgctttgagtagagtttgttttcatcatatatgttattaagttgctaatcattgttctgtttttcggttcaggccaagacttctctatcatcgtttcctgcacccgcggacattgtgtctgcgcctcttggtgttgtgcgagtggtcccggcttgcagccatccttttc

SEQ ID NO: 162683 - DNA, 436 bp, Arabidopsis thaliana landsberg
  unsure (1)..(436): unsure at all n locations
tttttgttttgtagatacgtgtttgtgattttaagcttagaccaatcacattagcagggttaatgggtgtatggagggtgaaatgtggtgatgctaattgagacgagtcagtgactggcgtgaacttcatatccgaagtttcggaagaactctctgttcatcttcagagtggaataatgaaaatagctagaagagctctactcgatgannnnnnnnnnnnnnnnnnnnnnnnnnnnnnnnnnnnnnnnaaaagtgatgagcatctcaagtcttatccacccacttctgctgttgaatccatatcggtagctctttttattatacattgaactatcaaacttcaggggctatcattgaatcatacactaatatggtaacttttggtttgcgcagtctcgggttattaatgcggagaaaagtgttgtctcaaacactg

SEQ ID NO: 162684 - DNA, 371 bp, Arabidopsis thaliana landsberg
tttcaaatccaggcatttgtcttcaaaagaaggagctttgctgagattctggatccgaagcttgaaggagtgttcgatgtgatggaggcagagagaatgataaaggtttctcttttatgctccagcaagtctccaacattacgaccaacaatgtcagaagttgtgaagatgcttgaaggagagactgagatagaagatatcatatcagaccctggagcgtacggtgatgaattgaggtttaagaaaacggcggagatagggtcatcgtctttaccttccgattatctcgtgtcgattacttcgtcctgtgaatctgcttacgatttgtatccacttagtcccgagtccgttgttttctctagaccctagat

SEQ ID NO: 162685 - DNA, 139 bp, Arabidopsis thaliana landsberg
tgtgatgctagcaatcaagatgcaatcagaactcgcagagtcaagccaagcaataacaggttttggggtttctagcagtcgtaagtgatcatgcagaaaacataaattcaaacagaaacagcaaaacactcgaccaaca

SEQ ID NO: 162686 - DNA, 269 bp, Arabidopsis thaliana landsberg
ttacttatatatcaatttgttataaactcactttggataattattgccaaattgctatcctttaaacatccctttattattaaaaggcaagtacaaattgaaattttgtctaatttggcctcaattttgatttcaattttggattttgttctttgctattcaaaatcattaagggtaatttagtcttaacaatctcctaaactttatatgatctgattcaatctaaaccgttcaataaaattggttttcttaaatctaaaccgttcaac

SEQ ID NO: 162687 - DNA, 294 bp, Arabidopsis thaliana landsberg
cgatccaaagaaatatataccaaattcttgataattcatatccaaaaaaagtccataataatcaagcttctttctaatctccatcgatcagaagcttctccattatacatataatattgatctataataacttatctttcaaactcaccggtaaaaaaccagatgtgccaactcacctagttggaaatagggtttggaccactaggaacctcatgagcatcatttccaaactctcttctcctctttctcgccgaagaagaagaagtgccactgcgtctagggtgagctgttgga

SEQ ID NO: 162688 - DNA, 317 bp, Arabidopsis thaliana landsberg
gacacatcaatcccaagacgttatctccatctaaggaaggtgttggcatggccatcgccgttaagagattttacttaacctatgaagaagccttgcaaaagtgatttgtaagaaattaacctctacgagagagactgatcactcatatatgtatgcttaacacggcagccgaggtttgtaggttgacctagagtttctacgacataacctgcatccaagcttggtcaagctcattggttacggttcggatgataattgttgttcattgtttctgaatactttccaaacggaagcttagagcgttacatttataggag

SEQ ID NO: 162689 - DNA, 258 bp, Arabidopsis thaliana landsberg
aacgaattagaatactttcgattaatgaaaatgacagattgatacaacgttcataaaacgcgatatcaacttctcatttacaagagttcaacatgaaactccggcgaacgatgaggaacgattctcagagagaatccaaaaggaaacgataaacaacaaaatccaaatcttcttattcttctgcaaatgatcctcattagctatatatctccgcgtctcgattctttctctaacactctcatcgaccaatcttctctt

SEQ ID NO: 162690 - DNA, 221 bp, Arabidopsis thaliana landsberg
atgttggttaggatttgattagacttgttaggcatatggacttagtttgaataatcatggcaataggctagagaatattgggagttcctttgttttcaaaacctcttccacgggtttggcatttgtgttttgcttgagggcaagcaaaagctaagtctgggggagttgatataacccgtttttcactgattttatctatgttttaggtataggattttgag

SEQ ID NO: 162691 - DNA, 277 bp, Arabidopsis thaliana landsberg; identical to SEQ ID NO: 80428

SEQ ID NO: 162692 - DNA, 413 bp, Arabidopsis thaliana landsberg
gatttaacctgcggtttatcgcaggttaatcagtttatttgattcttatactaaatatttgaataaatttgatatcttaaacttataaatataaattttttaatcaaacataactaaataataattgagattttttttgggttgttatttagtgataagaggaatgtgttaaaatgtgtttaaatttttgtttggttgttatttacttatttttgttgaacggtttagatttaagaaaaccaattttattgaacggtttagattgaatcagatcatataaagtttaggagattgttaagactaaattacccttaatgattttgaatagcaaagaacaaaatccaaaattgaaatcaaaattgaggccaaattagacaaaatttcaatttgtacttgccttttaataataaagg

SEQ ID NO: 162693 - DNA, 292 bp, Arabidopsis thaliana landsberg
gtaaaaagttattattttactaaacgtccagaatccatatacatttgcaaattcactgagttttttccatagaattgatgaaattaaaccaaatcaggatcccaactagaccagaatcgttaatattataacattacagtgaagaagagccagagaaatttctctgcaactgagtcatatcttgagaagcaacatcaattgtaccattgagaaaaccagtgtaccaagaagcagagagctttggcgacctcttgcgaccaggatcgctaaaattgacatggtacattccgaa

SEQ ID NO: 162694 - DNA, 292 bp, Arabidopsis thaliana landsberg
agattaatgtttcttttgtgtcttatggttcttgtaaagctgtttctagtcttacaatctaaaaaaaaaatagaaaaaaatgcaggggtttaagtttgaaacaatttataacttcagataataatgtatgtttatttacaaaccacaaactaccaaactatgtacattcaagaattgcatgaatctatacaagaatactgttgttattcttccaaagacatgaagccaattccacaagtttagtcttcagacaatggagaaattgctggagaccgaacagtttcactgcaca

SEQ ID NO: 162695 - DNA, 112 bp, Arabidopsis thaliana landsberg
tgtaattttattatcattgtgttgcttgaatttgtattaaatttttaatataatagtttgtttgtaatatttgtttttaattctatgttatattttaaatattaatattttg

SEQ ID NO: 162696 - DNA, 420 bp, Arabidopsis thaliana landsberg
cttaagcctgttactttaaaacgtgatatgtacattcaaattagatttaacagaatctcttgtttcttcttctcagataaacagatctattcaactaaaaattttgaaccgggaaatgatcactcctggttttatcttaaccggtttccatgaggcaaagagttttgcttgtaggagaaggcaccttctttcctttcagtctcttaacttaaacgggcaatcaaaaactcttcagtgttctgtaggcaaaagattgtttagcgagaaccggatcgtaacatgaccgttggtgttccatgctcactcaagcttccggtcgataatctcctcatcttttgccagaaactcttgcctcgacccgaggtcaagggacccgagttagactgtctctcgaacctccctgaccccgtgtacatttcc

SEQ ID NO: 162697 - DNA, 147 bp, Arabidopsis thaliana landsberg; identical to SEQ ID NO: 78953

SEQ ID NO: 162698 - DNA, 95 bp, Arabidopsis thaliana landsberg
acgcttcgtgggtatttaaaattgacacagcttcactccccaaaagaagggagttgcaactgagttaatcttaaggatggaagccttctttgttt

SEQ ID NO: 162699 - DNA, 370 bp, Arabidopsis thaliana landsberg
caaggcggtgagaagagccggtaaacgagccgagttctggccctacccggacatgcctcgctacttcacttcctctgaccattacttcaaagataccacccgcgagtttagggagagctacaactactatcgccatggctacaaccttagtgaccgtcacggtaacattcacgtcaccaaccgtggtgacgacaaaatgagcaactttttcaacgacgacaacgtccacgcatgtagccttatgtaatttcctcacttctttttaggtatctatgtgtttatatttgttgtatcatttatagggttgattgaatagcttttatgcataagcgtaagtgagacaagtaaaaaggaacacaatgctttatta

SEQ ID NO: 162700 - DNA, 216 bp, Arabidopsis thaliana landsberg
gtcatgagcgtggaggaaggaacgacattaaaaatgtaagaaagaaagtgtttctgtaagcaacttatctattttggagatggaaataccgattacctaacacatcactctatgtactcacatatgaaacattatgaattccaatttgtgcaatgttggcaatgactctatggctaggaaacactgcttatctctacataactgaaggattgaccc

SEQ ID NO: 162701 - DNA, 256 bp, Arabidopsis thaliana landsberg
cataaccgtcagtcaggcacagctaaagttctgctcagtttgtcctagcaaacaaccaaagagtaaatagtttaaccctgtttatgttgtttgtcgatagagaatctgtgtaatatgattcctatgtctaattgggtatgaattctgtttatcttcctttctctgttggtgaaattgtacgagatatagtttagattaattttggtgtaatcgaacgtgatagagtatttgtgaaagcagtgagattttttttagt

SEQ ID NO: 162702 - DNA, 367 bp, Arabidopsis thaliana landsberg
gtaaaaccttagcatcaatgagggattttgccattttagcaattccatgtatttttatcaatgaaagcaatagtttggaagagtttgtgatgaatgggggatttgctaaaggagtaaaagaatagttagttagtagttgaggaaatgtcaagaaaggacgacaaaaatgaagatacacatgctttggtctctttgattttaaatgaaagagagaacataatttgatgtggggtgaagcgtggtcttttttggagtaaagggttttttaccctgaaagatttcattaaaatcccccccacacacctttggtttttttttaaaaaaaccccccccctttttttttttttgggggctttttctttttttt

SEQ ID NO: 162703 - DNA, 85 bp, Arabidopsis thaliana landsberg
tttttcttttgtttgttttttttattttttttttttttttttttttttttctttttttgcttttttttttttttttttttttttc

SEQ ID NO: 162704 - DNA, 192 bp, Arabidopsis thaliana landsberg
atagaatgcttttaagcgggttctgttgctgaaaacacaccaaaacatgcaatgtgtatgcaagatgatcctaaatgcctaagagtgcaaaataagctaaaatggtgcaaaatgatatgatacaatgaccaaatgcaaagctaaatgatgataaatatacacctaaaatgagtaaaatataaggttatctgc

SEQ ID NO: 162705 - DNA, 125 bp, Arabidopsis thaliana landsberg; identical to SEQ ID NO: 39199
  unsure (1)..(125): unsure at all n locations

SEQ ID NO: 162706 - DNA, 276 bp, Arabidopsis thaliana landsberg; identical to SEQ ID NO: 20984

SEQ ID NO: 162707 - DNA, 216 bp, Arabidopsis thaliana landsberg; identical to SEQ ID NO: 73018

SEQ ID NO: 162708 - DNA, 211 bp, Arabidopsis thaliana landsberg
cataagtccctatcacttggcagggtgtgcaacggttatagttctttattcagttgagctagttcatgcattcaaacgagattttgccaaataatgaaatacctaaggtcaagtactaggtggcgttccggacatacaagcattaagattcaactcaactagaaagaatagtgtaaacgatcaaagaaaaccatagaaaccgccaaactaa

SEQ ID NO: 162709 - DNA, 340 bp, Arabidopsis thaliana landsberg
catctccagcaactcattattaacctaagaacatcaaatcaacttggagttgttggagcatgtggttttgtttttgatcacgtacaagtgtggagtgaaagcgaacgtcatggatcatcactgttaaacaacggcttgattggatagatcaagttagcttttgggtttttgtgtgaatatgtgaaagaaggaaaaggttcaagtggtggaattggtgatccgtttcctgtcacgtttgatggagtttgggccagttcccccggttctgtatagatctcgttcccaagttttcagaacagtttttcgatccaaaatcagaggtaagatcaagcgggaaatc

SEQ ID NO: 162710 - DNA, 223 bp, Arabidopsis thaliana landsberg
ttcgattctagcccataagtccctatcactcggcgggtgtgcaatggttatagttctttattcagttgagctagttcaagcattcatacaagaatttgccaaagaatgaaatacctatggtcaagtactaggtggcgttccggacatacaagcattaagattaaactcaaatagaaagaatagtgtaatcgatcaaacaaaaccatagagacggccaacctag

SEQ ID NO: 162711 - DNA, 357 bp, Arabidopsis thaliana landsberg
cctcctctgtagctgcctggatcaagtaaagaggtcgagtgaaataatgcctcttctatagctgcttggatcgagtgaatggatcgagtaatgtcctttttagctccttttgcacctgaaaacacaccaaaacatgcaatgcgtatgcaagatgatcctagatccctaagtatgcaaaataagctaaaatggtgcaaaacgatatgatacaatgagcaaatgcaaagctaaattattataaacatacacctaaaatgagtaaaatgcagtgttatcaactcccccaaacttatctcttgcttgccctcaagcaaacaaaaaatcttaagttgaaggagaggtttgaaggtggggatt

SEQ ID NO: 162712 - DNA, 223 bp, Arabidopsis thaliana landsberg
  unsure (1)..(223): unsure at all n locations
aaataagagagttggtgaaaaaaaaaaagatagttataaattggaggtaagcaagggaataaagaatgtatggatggcatggaaagttgtgggtgaatgtttcttttaaaaaatgttggtattaattaaataaatgtaaaaaataaggatgatgggagtttgtttaggaaggggagattnttgttaattgtgatcatccgttttatatttttcacatccccaa

SEQ ID NO: 162713 - DNA, 163 bp, Arabidopsis thaliana landsberg
atcatttatattaaattatcggaaagagactctccgctagagagagccattcaggattcgatgtgcttacatgggaaaaagactattacgaacccgagctttcttagctaaaccatctgcttgagtattagaacaacgaggaagaaatctaatacgaaaagaa

SEQ ID NO: 162714 - DNA, 144 bp, Arabidopsis thaliana landsberg
ggtcagattcaataggatcttgagttatgggatgtaagaatgatggaaggggataaaatgaaaaaagtcatcaaataaggctggtagagagaaaataaagatgacatcagtaaatcaaaatgaggtagaagatccctgatttct

SEQ ID NO: 162715 - DNA, 386 bp, Arabidopsis thaliana landsberg
gataattaaatcagagaatagggctgggcatatgagtaacccattcgagttcgggtagaacccgttcgggtttgggattaatgggtatatgatttactacctaatagaataattctaaatattcggttcgggtcgggtccagttgggtttgggtcagtttggataaaaagtttcaggccctaaaaatactcaaaaaaatagaaacgggtattttgtatgtagatagtgcgtctctaaacaaaaaaaacttttaaatttattaagttttaataaatttaattatatttgaatatattttactaaattttgacaaatataacaaataattttgataaacatagcaaacataacaaagtatacaatgtaatttatacaaaatattaatg

SEQ ID NO: 162716 - DNA, 300 bp, Arabidopsis thaliana landsberg
cctcctctgtagctgtctggatcgagtaaactggtcgagcagaatgctctgctgctgctggtttgatagagtagagggtcgagtagattccttgtaagctccttctgcaccttaaaacacaccaaaacatgcaatatgtatgcaagatgatccttaatgcctaagtgtgcaaaataagctaaatgtgatgcaaaataatatgaaaaaatgagtgatcactaaggtaaatgatgataaacacatgcctaaaatgagtaaaatacagtgttatcagctacaagctgctccattggttcaagt

SEQ ID NO: 162717 - DNA, 239 bp, Arabidopsis thaliana landsberg
tcttgttttctttgccaatttcaatttctctcccaatcagaaatttctcaatctctctctttctctcaaatttgcggaaaaggggttccacagccttttgagaagagatcttctatgtctatgcaagaggaacaaaaacccagcctatacgaccaacgttgctatggcagatgttctcaaatctcttgaaagtgtaagttttcttcatctgattcgctcaatttcattttcaatcagaa

SEQ ID NO: 162718 - DNA, 543 bp, Arabidopsis thaliana landsberg; identical to SEQ ID NO: 19742
  unsure (1)..(543): unsure at all n locations

SEQ ID NO: 162719 - DNA, 376 bp, Arabidopsis thaliana landsberg
gacatacgaaactctatcaagaccagctaaccctaacggccagtaggtgaaagccggttattatcactattatcttgcgtactcagttgccttatcggctattaggttctaacatggtttcaaaatacaagatcaaagcattaagttcaaattcgatttctagtccataagttcctatcactaggcgggcgtgcaacggattatagttctttattcagttgagttaggtcaagcattcaaacgagattttgccaaagaatgaaatacctaaggtcatgtactaggtgatgttccggacatacaagcattaagattcaactcaactagaaagaatagtgtaaacgatcaaacaaaaccatagaaaccgccaacctag

SEQ ID NO: 162720 - DNA, 262 bp, Arabidopsis thaliana landsberg
gcagaaaaataaattaaaaaataaataagaacttaacataattgaatatacaaacaacaaaacataagaaaaactaaataaaaaaaaatttttaaaataatttagtattgtattttacgtaaatatttctataaattaatatttattagtttattatataaattaatatttattcatttataaaataaattaatatcaatataaattaataaaattttatggtcccaacattattaatttatagagtttttactatagattt

SEQ ID NO: 162721 - DNA, 82 bp, Arabidopsis thaliana landsberg
ccccccctcccccccccccccctcccccccccccccccccccccccccccctcccccccctccccccccccccccccccccc

SEQ ID NO: 162722 - DNA, 136 bp, Arabidopsis thaliana landsberg
gggggggggggggggagggggggcgggggggggaagaggggggggggggggaaggagagggggggggggaggaggggggagggggggggggggggggggggggggggagggaggggggggggggacgggagggggg

SEQ ID NO: 162723 - DNA, 251 bp, Arabidopsis thaliana landsberg
  unsure (1)..(251): unsure at all n locations
tcccccccccccctttccccccccccccccccccccccccccctcccccccccccccccccccctttctcccccccnccgctgttcccccctccccccccaaccaaaccacccccccccccccccccccccccccctctttccccccccccccccccccccccccccctccccccctccccccctcctcccccccccccttccccccccccccccccctccccccccccccccccctcccccccccccccc

SEQ ID NO: 162724 - DNA, 1215 bp, Arabidopsis thaliana landsberg
atttgacctataactaccatgattgctcgccggtgctgccttgggaaaatttcaggtttgtcatgcttcaagctcatgtctagaggagagttataacaccattttagattaattttcttgtgcactgattgagaagtctcatttataatcattttaatttggtttgcagttatgagaattttgatgtcctacgggcaaaaaagattcttgacgaggatcattacggattatctgatgtaaaagaaagaatattagagtttattgctgtgggaagacttagaggcacttcacaaggtcgtaactttacctttctcattcagctttcattgctaaaactttttgtcatcatcatttataagttctgaaggtgagaatttgtaaaatgtgtcaacagggaagatcatttgtctctctggcccacctggagtaggtaaaactagcattgggcgttcaattgcacgtgctcttgaccgcaagttcttccggttctctgttggaggactatccgatgttgctgagattaaggtatattatatatacatggcaaaactataattcaaatatttataaataatcatatatgattctcttaaacactatttaggggcattgtcaaacatatgttggtgccatgcctggaaagatggtgcaatgtctaaagagtgtgggaacagcaaatcctcttattttgttcgacgagattgataaggtagctagcttgttagtatttgaattggctttttgttttttctattcaaacatatatatatccagttacgcttttgcaataatttgtctgctgttccttggcagcttggtaggtgccacactggcgacccagccagtgcgttgttggaggttatggatccagagcagaatgcaaaatttttagaccactttctcaatgttactattgacttatcaaaggtttttttactcttttgccatggcggttttttctactctttgcaattttttgatccatcacggttcaggaaaactctgtgtattgatattcatgatatgcagttttgtgtttgacgtaaggtctaaactaatttattgcaggttttatttgtatgcactgcaaatgtgatagaaatgatcctgggtcctctgctagacagaatggaggtgattgatctctctgggtatgttactgatgagaaaatgcatattgctagagactatttggtgaaaaagacatgctgagaa

SEQ ID NO: 162725 - DNA, 229 bp, Arabidopsis thaliana landsberg
gccaagaacacagcgagtgacgtcacgtcccttctcgaggcatttctctgggttaggatcattcttcttacatttcaggaacgccatgttttccggcatacacctgattcctatatgcttcgccgaagctgttaaaaccgccgacgtagggatcggattccccgttccgtccaccgccgcattcgcctccatagctcaagattttttccaaatccctaaaatcttatat

SEQ ID NO: 162726 - DNA, 216 bp, Arabidopsis thaliana landsberg
aaggagaaagatgtttttaaggcttgagcagagtcgagacaataaatattaagagcacagaggtttagtagagtagataaattatcaagctgtgcacaatcataatcatcataaacacttcaatcttttttcacagtttttgagcaaaggttatggggattttgagatcgatttggtggcagaaacatcgcgtaacaacccttccccccttcatct

SEQ ID NO: 162727 - DNA, 145 bp, Arabidopsis thaliana landsberg
gtccaggatcaaatcaagaaacccattaaaaaaaaaaatcaggctttggtttcagttgtaagggtttaaggtttcttggggaagaaacgatggagactttttgtgggctccactaggacgaagagcatatggatttacctcgtgg

SEQ ID NO: 162728 - DNA, 208 bp, Arabidopsis thaliana landsberg
tacctcagagcaatctacaatacgtgacatcaataacattcttgctcaccacctacgccaaatatatgaaatccacaaaacaaactttcaactgcggaaactcactcatcgtccccaacgcactgataaatctatcgaagcgacaagtcgattacatcctcggtgtgaatccactgaagatgtcgtacatggttggattcagctccaa

SEQ ID NO: 162729 - DNA, 204 bp, Arabidopsis thaliana landsberg
ccattttaaagatcctttaacgtaggttaaataaccgaattttttggtggtccatccagtattggaaacctaaatgaaatcattaatggttccaagggtttttttaccttttttttttttttaataatggaaccaggaatccgttaaccaacttaagcccattccaatgttccttttccccatccataacttaacccaagaatt

SEQ ID NO: 162730 - DNA, 442 bp, Arabidopsis thaliana landsberg
tactgctacaaacatttcatttgcagagattgagcaaatcaaagttacaaacttacaacaatacaaatgtgtatgtaaaacaaacaaaaggaacaatctttaagcattccttggatcactttctctttttcttttatacaaatcattacataaacattaaccaaactacactgtataaatgtaaaatcatctgtccacttcttggctctctatgaggtatttgaatgatgcagagaggttgttggatccagtggttgcggcggttgtgacagagtcaaagcatggttcagctgttgctctagccttctggctcgccatcttcgtctccatctcacaaactcaaccatcactgaacttccgcatatgcatacaccaaatccagcaaatgttgacagaagaactgacagaactggttgcaacttcacctgttaccaccgagaga

SEQ ID NO: 162731 - DNA, 492 bp, Arabidopsis thaliana landsberg
tgagatacttgagttcttttttaaatatcgtcgatttaaagtgaacgtacatagaggatccatggtcaatttcgcaccaccgatcaaggatcatcaagtttatgctttcataaaacgtggccagagttgagtttagcgataaggttcctagatgataagcgcaagaccaattcatcaaaatcgattcacatctcatgtcatgtcctcggccacataggtaagagaatcgatgcatctatgtaatggacttgacaaaagaaaaaagaaaaaaaaaacaaaatttggcaaattattctaaagaaccaaaattacttcgtaactagtgaaagtccttttaagaattcataacttagaaatttgtaagttatatgcgagcaacggaaacattcggatatttttctagtaaaattaaataattagagttttttttaaagaattaacggctagaggagaaattaaattactatgggtatttttttcagcaaaaaaata

SEQ ID NO: 162732 - DNA, 135 bp, Arabidopsis thaliana landsberg
cctgtggctgataggtgaagccattaacagttagacctccatcaatacaaatggtttgaccatttgaccagtaatatatgaagctgcagggagacacaagaagaccactagtgatgaaacttcattcggctctcc

SEQ ID NO: 162733 - DNA, 126 bp, Arabidopsis thaliana landsberg
tgtgatgcagacagatgagatatgatcagaagttgctaagtcaagccaagcaataacaattttgaggtttttagcagtcccagaaaacatatacaataacagaattactaaaattactcgaccaca

SEQ ID NO: 162734 - DNA, 394 bp, Arabidopsis thaliana landsberg
caaaattgaaatcaaaactaaggttcatgatcacttattctttttgatccttttggaattttggttaatatgtggtgagattcatgtaaattagttttttttgttcttgttgttgttgtgtagtgaaagctagtacagatgatgtgttttatgagctttaaaaccctagagagcagatccaagcttatgtgtttaatggtaacttgttgcttctttcttgatatttttgttgttgttgaagaattagctctgtttacgattcttgatttgttcttgtatgttttttttttttaaacatagtggttagagctttggtgccaatgatgacgctagatgctcttttgaacaaaagtgagaagttgctaagtctgttcttgagtaatttgagaaggta

SEQ ID NO: 162735 - DNA, 426 bp, Arabidopsis thaliana landsberg
  unsure (1)..(426): unsure at all n locations
tactaataaggtttggatcttggtttaccaaaaaacaaaacggtttggatcttgaaaaanaactacgtgttaattagttgtagatataagattaaggtttttttttcctatacttaaataatcaagatttggatcttacaaaaaaaaagactaatatattatttaggatgtactatattcaataactgtttaatttattaaatgtttgttgatttgtaggtgaggaagtgaggaggatcgcttgaataaaacagatctggttctggctattattaattaatgttgctgtatgttcttatcatcttagagagaggttaaagacaggagaaccgtgcatctatctttgtttgttatgtttctgttttcttgtcatgaaaattatgctcatgtatcttatctaaatcaaaaataataatttgatgaatc

SEQ ID NO: 162736 - DNA, 344 bp, Arabidopsis thaliana landsberg
gactggtttaacttgagggtctctattgcggtggcacttagatttggttatcgaacttgttttctatcgataatttattgagtatgtcaatcatctgtaaactgaggaaaccaaactactcaattaccccatccgcatgaattctttatctgattgatttttttgtttactctgctgttgattacttcatcttgttacctattgcttagtttttgcatttctctcatgttactcgacctgatactcgaccactcggttatctggcaacatattgtgctttcgagtaaccctgttacatcttttgtctgttactcgaccacacccagtgtttggcaacaagttgg

SEQ ID NO: 162737 - DNA, 236 bp, Arabidopsis thaliana landsberg
gtttttttatgacagtacatgtattcacgattgtattcctctttgtcttcagccttctctcgtgttgtttcgtgcatcgccttgtggcagtaatctttggggtttctttcttaaagtttttgcaaaatgacggattggcttctactaataccctggaacaagatcttcactgatgcatgtggctgcttttttagcgatagaaactacattcacaagatggaggcaaatctcgatga

SEQ ID NO: 162738 - DNA, 133 bp, Arabidopsis thaliana landsberg
  unsure (1)..(133): unsure at all n locations
tttcaataaaacaaagttttgttcttgtcttcttcacaagagaagagatatgnctctcttactctggttttcttctttctctcaataatccaacaattcaatgacaaaagtgattcttaaaacatatactaac

SEQ ID NO: 162739 - DNA, 267 bp, Arabidopsis thaliana landsberg
ccatcccacacgtcattcctcgttgcacagtgcgaatggacagcataatgacatcccttaatacaagaatattgcccatagttaacgtcgacggttttgcgacaaactccgcaagagaagtcaccaggttcaagggacaaagtgaaagagagtcgatgtgtgtgtcgggtgatctgaatgacacgaggtagatagatacattttatgtgaactgtggctgcaagggagacacgtgtaaaggagagtgctgcgtgtgcttagagacaa

SEQ ID NO: 162740 - DNA, 426 bp, Arabidopsis thaliana landsberg
  unsure (1)..(426): unsure at all n locations
tgttgtgtttattgcttttcaaaagcttaatgagaggccttttattttaatatcaacaaggatcgaacataaatgctcataaaaaaatatctgataacttaagctagtcattacatcaaaagacacgaacactatatgactatttgatccttagacttggttcatctgtgcaaaaaaatctttttactagacgaagagttttgcacttcctctcttccaagcaccacgaagtggcaatccaccgggagagttctggctccttttggagttatcgttcttaggnnnnnnnnnnnnnnnnnnnnnnnnnnnnnnnnnnnnnnnnnnnncagccattgatttctctcctagacgtgttctgagaaactttgaagttttcttaggttgcttgcctgtgtcacctaatcccactccagccgatgaagaatc

SEQ ID NO: 162741 - DNA, 368 bp, Arabidopsis thaliana landsberg
tttgctatcctatatgattattcaattgatattaagaaaaaccacgatatatttatatcttccattgcctgccatcgactcaacggaatgacagcgtctcaacttaactatgagagaatccgattccaacaacagtagctactaggatgccgtgtaggttattgaaaactacatgaaccaattgatgattgtctagtggctctgcttctgctgatccaaaccaaatggtatcaattctgactagatgaacacattctacccactgtaaataacatcaaacgggtgtgaagaaacgttcattcggaatatagtgaactaactttatcacatgtctcagagactactgctctcacgactctggcgatacc

SEQ ID NO: 162742 - DNA, 302 bp, Arabidopsis thaliana landsberg
gtttttttttccgtcatttccacaaccaagttatactgattttttaatgtaaatattttttttcagattgaaaaaaccaattaaacagtcatattttaattaatatgtagtaggaaaaaagagccaatataaaaggattttctgcaaaagaagaaatcaataacttttacgaataaagatggatgcccattataaggctcatcatctaaggccattatctagatgtttgtagggttttaccctttccttgtactcctatataaagaaccctttatctcaatggaataacacactcattttct

SEQ ID NO: 162743 - DNA, 296 bp, Arabidopsis thaliana landsberg
ggaattctctctctttcacatcatcatcatcatcatatgggttcgtgtgtctcctcttctcaaagcaagagctcatccgcctctgattccgtcgtgaagcttgcctctttcatctctaaaccagactccacaccgcccctcaagactgacgtcatgatcacttcctccaccatcaacggcaaccctcccatcgattccggtcgttgggattcaggtttattattacgataactattctttgcgtttagtttagttcatatcggcctttattttattttatatgatttatttttggt

SEQ ID NO: 162744 - DNA, 332 bp, Arabidopsis thaliana landsberg
tcctttttaagctttaatccttattaatatgaaagaaagtgggcagtgttttatttattgtgcatattccttatgctggacaaataggctaaactaatggagtaaagatctaacagattaaatctaaccggatcaaaaacagcaggttgttgttgagtaaataaattgtggctccattaattcccctaagaaaactcagattcgcgaagtccattaatgggatgaaagggaagagagagagagagggagagagagagagagagagagagagagagagagagagagagagagagagagagagagagagagagagatagatagagagagagtga

SEQ ID NO: 162745 - DNA, 434 bp, Arabidopsis thaliana landsberg
tttgagcttttctatggaccaggaaatgatacttcgccttgttcgagagatcttttcacttattatgtctgctaaatcgcaggtccaagcttctttcaccaactgtttgacttctagatcctctttcagtcttctggcatatctaaagatacccttttctttttacttttcaggacaaaagaagtgatgagaggtctgtagtctgagccttcaaagttgaggtactcacatctccctgatgggtaagcttctgtccatgccccattagagacagctctatctaatcgacaatggattaggttctcatgtcttttgcctcgccatgacagggggttatccgaatgttggagatcataaagatcacactctaacatgaaggagcgcatgtcaattaaggagccttcaggtctggttgggccaccagtcttttcagt

SEQ ID NO: 162746 - DNA, 191 bp, Arabidopsis thaliana landsberg
ccttaaattacacaggagatacaacaacatggaagcaaatatggaatcatggattcctacaaagttacaaacacatggaattgtgaaagttcaaacttctgagaagaagactaagtcttcttttattaaaataaaatggtcaatacgatttaaaaaaaaaacaaaggaaataggaatctgaacagaaacat

SEQ ID NO: 162747 - DNA, 93 bp, Arabidopsis thaliana landsberg
agacgcagatttgatcagaagaatcggggcagcaacagcacttgaagtaagagcttgtggtgctcattgggcgtttgctccatgcgtggccgt

SEQ ID NO: 162748 - DNA, 475 bp, Arabidopsis thaliana landsberg
atttctaagctataagaccaccaacagtaatactatatgaacatgttgtctaaccatacgcgacaaagatgccgcacaagtgaaaagcttttgtagtttaaaagaaaattcatacacaaatccagttaatttccccacagttatgtccagaaagctaagaagcaaaattattccagtaaacacttgaaactgattacctcgaaataaaggagtgggagataggcagaaatttacctttcttaatgcgggttttggtaatgacctttttatacagaattccacaattttttcgagatatcaaattgtaattccactattctctcgactcaaggatgatgaaactgttttaagaaagcatatcgaggaagcttttgtccaatctcccatcatgtaacatattagcgaccaagccaatggttgaagcatctccagcaaacccgcaactcctcatttctttgatgaattcagctgatgc

SEQ ID NO: 162749 - DNA, 357 bp, Arabidopsis thaliana landsberg
cctcctctgtagcatcctggatcgagtaaagaggttgagtgaaatgatgcctcgtctatagctgtgtggattgagtgaatggatcgagtagagtcttttttagctccttctgcacctgaaaacacaccaaaacatgcaatgcgaatgcaagatgatcctagatgcctaagtatgcaaaacaagctaaaatagtgcaaaatgatatgatacaatgagcaaatgcaaggctaaatgatgataaacatacacctaaaatgagtaaaatacagtgttatcaactcccccaaacttatctcttgcttgccctcaagcaaacaaaaaatcttaagttgaaggagaggtttgaaggtggggatt

SEQ ID NO: 162750 - DNA, 1857 bp, Arabidopsis thaliana landsberg
aatgaaagtccaaatgaaattcataggcttgcaaaagagaatcacaaacaaagattgagcagaaaatcatcatacagagaacaatctagttttcggatcgacgaatgaaacatcggattaaaagatcgaatcacaaaatcgaaagaaacaaacagcttaaaacataaagaaaaagaagaatcgacgaaagtgtacccacccaatcgctagggtttaacggagatgatctatctctctcgaagcgtctttcaattctcgccagtagtgaaaaccctgaggcttatggtaagagtttcgcttatcctgtccgttgatttatttgagttaatctttaccgtcgatttgattcactcgctgacttttatttagacccggttaaagtaaaccaaccatattgagtagaaaccgaaaccggattaaaatgatcaatcttcttctttacttagcaatggcgaaaaatagttgattaaaattgggcactaattattattttcagtaagtaaaaacctccttgacgcgtgcatgtcctttaaactctcaactccaaattccaacaccaaaaaaaaacatcctctgaaattttctaaaattaatctcttcttgcttgtgttcatcgtcctcgtcctcgtcctcatcatcatcatcctctgaaacgtaaggctaattacaatctcttcgtaaaatgccaatgatgttttttttcctttctttaatgaaatctataattctatatctttctcttgtacgttgcagattgaaaatattggcaagaagtagttaaaacttaaaacccaagaaacagattcttacgttttggaatcatggaatcatcacaagaacaaagtttctttagccccacgaaccaaagctcgagaaacttagcatctaaacctgaaacagaagatccaatcataagactttcttcttcgtcttcctcttcttgttcttccatagaagccgaaccaagacctgatcagaatcacaaccacaacaatgtagagcaatctcctccgacacaagtcatggaaagatcaacaaacaacacaacaacaacgacgacctctacccctaatacacctccttacagaatcccttcacatgttttcgcgagaacaacctctacagctccagaatggagtactatctccaatgaatctcttttcagcatccatatgggtaacaatagcttcaccggtggagattatttcaaatccggcgaactcacgtttcctcagcctccttcaccaataacttctcctttgccttctcctttaccatctacgccccacaacgtgaaccaaggaggagccgtaggagctgcggcggaggtaaaaactccggtggatataggcaagaaagcagctgaaacagataaagcttaccgcgcaagtaaagaagacgaacaaaaagctgcagcaagtataagagaggttatcatggctaatgaagctgctaacaacaacaacaaaaccaataaactagatcgttctgtttctcgtcgctcagaaaatttaagtgtcaagtctttcgcttttccagtgtaagaaataaaaacttttcttgatcacttacctccgtttcatgtgttttcttttctcactttattttgttgttgcatttcgtagaatggggaatgcagacaaaggcgggttacaaggttccacgcctgaaaagaagcagaggaatccttcgcagccagagacaccgaagatttccactgaagctgaaggagatgtaggattgaagaaagaggaagctcctaaaccagtagctcctaaaacagaagcggaccgtgcctctgatcgcaaccccaaatggctctcttgcttcccttgctgtacaacctcttgtgtctaa

SEQ ID NO: 162751 - DNA, 1680 bp, Arabidopsis thaliana landsberg
  unsure (1)..(1680): unsure at all n locations
atgaggaaggaagttttgccgccggtgttatcaaccaccacagtatgtttcgagaagaaaccaataattgctacattactagctctctctctcgtcatgattgtctggaaccttcctccttactaccacaacctcatctccaccgctcgtccctgctccgccgtcaccaccaccaccaccaccaccttactctcctcatcgaacttcacttcggcggagaatttcaccacctctctctcaacgacaactgcagcagcttctcagaagtacgattcaactccctcagatccgaacaaacgcgttttccaaccgttcggaaacgcggcggcgttattcgtactaatgggagcttaccgcggcggtccaacgacgttttccgttatcggactcgcgtcgaaaccgatccacgtttacggaaaaccatggtacaagtgtgagtggatatctaacaatggaacttcgattcgagctaaagcacagaagattctaccagattggggatacggacgagtctacaccgtcgtcgtcgtcaattgcactttcaattcaaaccctaactccgataacaccggaggtaaactcattctcaacgcttactacaacgaatctcccaaactctttgaacgattgactacgttagaagaatcagctggaatctacgacgaatcgaaatactcgccgccgtatcagtacgattacctctattgtggctcgtcactgtacggtaacgtgnnnnnnnnnnnnnnnnnnnnnnnnnnnnnnnaccacgcttggttctttggtgacaaatcgcattttgttttccacgatgctggtggtgtgtcgccggaagttaggaaggttcttgagccgtggattcgagctgggagggtcacggttcagaatattcgggatcagtcgcagtaaggntagtactataatcagtttcttattgttaatgattgcttgcatcggtatcgatacgctgcgaattggaccttcttcttcgatgtcgatgagtatatctatttgccgcatggtaatacactcgaatccgtgctcgatgagttctcggttaacacgcagtttacgattgagcagaatccaatgtctagtgttctttgcataaacgactcttctcaagattatccaaggtactaaacttcaacctctaaaacacttataatgcaattcagaatcgaaaagtttggtcataggactttggaataatgttggatggcttatgagcattgttctgtatttagcttagatgatactattaggatcgaatctagaaattagcttccattttgattcaattcttgtttttgtttgggatatttcaggcaatggggatttgagaaattgttatttaaggattcaaggacgaagatacgacgtgatagaaaatatgcaatccaagcgaagaacgcatttgctacaggagttcatatgtctgaaaacattgtaggcaaaacactacacaagacagagacaaagattcgttattaccattaccacaacaccataactgtgcatgaggagctttgtagagagatgttaccaaattcagccaagaagaaggtgacattgtacaataagcttccgtatgtgtatgatgacaacatgaagaagctagtgaagacgattaaagagtttgagcagaaaaaacttgggacggatgtgaagaatttctcatga

SEQ ID NO: 162752 - DNA, 608 bp, Arabidopsis thaliana landsberg
tctaaatcagaattgagaaaagcatgcttgcttgatttcttatgatatagcattcatgatagacaacttcaatgtttgctgatttgatcatttggttctgcagcttatatatttgcgataaaacgagaaaaggacattgatgcggacgagaagaagaaagttaaaaagggcagcgaggccagacataaaggtgtgaaaaagggtgctgttaacaccgaaatcgagaagaaaggtgcagaagaaactgataaggctaaggaagcagaaactgcaatacaggagaaggaagaaaccaaaccaatccctgaactggatccactgtttgaatttacagatgcagctgatcaatccatgtttcaaactgtggcaactgaacatgtaaaggttgcaaggaaaccaattccagaagatgagcaaaaggagcttttcaagtggatattggaagagaaaaggaagatagaaccaaaagacagaaaagacaaaaaacacattcgtgaagagaaagctattctgaaaacagtcattccgtgccgagaggattccaaaacttctacctgatgatttccggtgattcttcccttccggattgggacaaatttttttccagg

SEQ ID NO: 162753 - DNA, 848 bp, Arabidopsis thaliana landsberg
gaaaatgaccggattaaggagcgggccataaaatctccggtttacgtttttggcgggaaaatcacggatttacgtttttggcgggaaaaccacggatttacggttttggcgggaatatcacgggtttacgtttttggcgggaaaatcacgggttttcgttttttgcgggaaaattacgagtttacgtttttggcgggaaaatcacgggatttacatttttggcggaaaaattacgggtttacgtttttggcgggcaaattatggatttacgtttttggcagaaaaatgtcgggtttacgtttttggcgggaaaattacgggtttacgtttttggcgggaaaattatggatttacgtttttggagggaaaatttcgggtttacgtttttggcgggaaaatctcggatttacgtttttggcggaaaaatcacgggtttacgtttttggcaggaaaattacaggtttacgtttttggcggaaaatcacgggtttacgtttttggcggaaaaatcacgggtttacatttttggagggaaaattacaggtttacgttttttgcgggaaaatcatgggtttacgtttttggcgggaaaattacggtttacgtttttggcggaaaattacgggtttacgttttcggcgggaaaatcatgggtttacgtttttggcgaaaaaattacaggtttacgtttttggcgggaaaattatgggtttacgtttttggcgggaaaatcacgggtttacgtttttggcgggaaaatcacgcgtttatgttttttggtagaaaaattacgagtttactttttctcaatttcatcgcttgtatatttaagaaatttggaaaaatat

SEQ ID NO: 162754 - DNA, 911 bp, Arabidopsis thaliana landsberg
atggatattaacaatgatgacgatgatgatgatgatggtgatgagaagagggaatcaatgagattagatatggaatcaggtaacacaaaatgtatctccgatgacatcaaaacaaattacatgaccgttgggacttattccatcgtcaatcccaacgaaggtcaccatcttcctccttctcacaaactcttcgtcactgtaagcattaactatgaatctatgacaaaataatctatgaatcgtttggttgagtatcacattttatgtacttctctttataggtgtcatctcctaaagggaaaagccatcatcatgcagagaatgtagagtccgggaaattcgtgtacacggcagaagaaaccggcgattacatgacgtgttttgtggctccaggttatagacctaccgcaaaattcgcggttgatttcgagtggaaaagcggtgttgaggctaaagattggaccactatcgccaagagaggccaaataaccgtataactacatgttatctaactatagttattcttttgcatatattgtaaaacacacacatatatatcaaaaccgtataatctatatggaacttagttctaattcataatgtgatatgtttattctcagatgctggaggtggaggtgaggaagctactcgacgtgacagaaactatacatgaagaaatgtttcagctccgagagaggtacaatttaatcaaacttagtaatagaaaagcaattcgatgtttataacgggtaatgtgaaattgtgacagggaacgggaaatgcaagagttaaaccgatcaacgaattcaagaatggcagctctcagtttactgtcgttcgtggtaacaatgtcggtcgcgggtttacaactatggcacctcaagtcattcttggagaggaagaagctcctc

SEQ ID NO: 162755 - DNA, 1250 bp, Arabidopsis thaliana landsberg
atgacagaaaaatctgcagaactcgttcgtttgaacgaactcaaggcttttgtatcgacaaaagcaggtgtgaaaggacttgtcgataccaaaataaccgaagttcctcgaatcttccatatcccttcttcttcaactttatctaacaacaaaccttctgatatctctggcttaaacctcactgtcccaatcattgacctcggagatggtaacacatctgctgcaagaaacgtcctcgtttccaagattaaagaagcagctgagaattggggatttttccaagtaatcaatcatggtattcctttaactgttcttgaagatatcaaacaaggtgttcgaagatttcatgaggaagatccagaggtcaagaaacagtattttgctacagatttcaatacaagatttgcttacaacaccaacttcgatattcattattcttctcctatgaattggaaagactctttcacttgctacacttgtcctcaagatcctctaaagccagaggaaatcccactagcttgcaggtaaaaaagtttagcaattttgatttcgctttattagtgttttgatgattctgagtaaacgatgatattatcttagggatgttgtgattgaatactcgaagcatgtaatggaattaggaggtttactcttccaacttctctcagaagctttaggtttagactctgagattcttaagaacatggattgtctcaagggtttgcttatgctctgccattattatccaccttgtccacaacctgacctaactttgggcataagtaaacacaccgacaattccttcataacaattcttcttcaagatcaaatcggtggtcttcgagttcttcatcaagattcttgggttgatgtaactcctgttcctggagctcttgtcatcagtatcggtgatttcatgcaggcaagctcgattgatgcttccttttaactcaaaacagagtctttctttatcaatacacttgagtcattttgttttgcagctgatcacaaacgataagttcttaagtatggagcatagggtacgggcaaacagagatggaccgcggatttcagttgcttgcttcgttagctcgggagtgtttccaaattccactgtttatggaccgataaaagagcttctttctgatgaaaaccctgcaaagtacagagacatcactataccagaatacactgtaggatacttagcaagcatcttcgatggaaaatcgcatttgtctaagttccggata

SEQ ID NO: 162756 - DNA, 927 bp, Arabidopsis thaliana landsberg
  unsure (1)..(927): unsure at all n locations
atgaaattgatttggtcaccggaaactgcatcaaaggcttacatcgacaccgttaaatcggtaagttcatctcctctgnnnnnnnnnnnnnnnnnnnnnnnnnnnnnnnnnnnnnnagatttcatactttctcacgaagtaaagcttctttcgatccttttcacattactcgaaaacccaattatctagatgtgataaatttttcgtatgctttgggattttgagacataaaccttagatctttgcacgtcttggccctttcttttaacaatttgtaacgttttttttaaaaaaattgggcaacttttgcagtgtgaaaatcttggaacgccgggagcggcggagctagtggcggcgatggcagcaggatggaacgccaatttgattgtggaaacatggtcagaaggagaaactatagccataagcgttggcttaaacatagcgagtcgacacacaaacggaagacacatttgtatagtaccaaacgcaagatcacaaactgcttatcttcaagccatggcagaacaatcttgctcaaacttgccggagacgattattatgaacgaggaaggagaggaattggagcacaagatgcagacgctacaaggaatcgatttcttggtagttgactgggatcagaaggatttcgcagcaaacgttttgagaaacgctgtgtttggtagcagaggagctgttgtggtctgcagaagcggttaccgaagaagcacttcgtgtttcagttggacaaaagcatttagtgaccggaatgttgtgagaacagtgactcttccagtttctggtggtctagaaatcgctcatgttgccgcagcaagaagctctgggaagagtgataataacagcaacaaaagaaaatggatcaagcattttgatcaaagatcaggagaagaacatgttattcgaaagtaa

SEQ ID NO: 162757 - DNA, 781 bp, Arabidopsis thaliana landsberg
acctaattgctaactaactttttaacaatgacaagaatctatcaaactttttatctcattagtaataattgtaacctctgatgttttcaggtggtcttccattgcacgaaagcttccaggaagaacggataatgatgtgaagaatcactggaacacaaagctgaagaagaagctgatgaaaatggggatagacccggtgactcataaaccggtttctcaactccttgcagaattcagaaacattagcggccatggaaatgcatccttcaaaacagaaccatctaacaactctatactcacacaatccaactcagcttgggaaatgatgagaaacacaacaacaaaccatgagagttattacaccaactctccaatgatgtttacaaattcctctgagtaccaaactactccatttcatttctatagccatccaaatcatctgctcaatggaaccacatcttcatgctcttcctcatcatcttctactagtatcactcagccaaaccaagtacctcaaacaccggttactaacttctactggagcgatttccttctctcggacccggttcctcaagtagtgggatcctcagctactagcgacctcacttttacgcagaacgaaaatcatttcaacatcgaagccgaatacatctctcaaaacatcgattcaaaggcctcgggaacatgtcattccgcgagttccttcgttgacgaaatactagataaagaccaagagatgttgtcacagtttcctcaactcttgaatgatttcgattattag

SEQ ID NO: 162758 - DNA, 2477 bp, Arabidopsis thaliana landsberg
atgccgaacgccggtcgaggaggctcccgaaagaggaagacgacgcctaatgttactcagagagtcggcggttcaacgacgcctagacctcgggatctgccggcgcagtacaacttcactctggcgccgacggttcatgttccaacgacgcagccgactcaagctggtgtccgttcaacgtcagccccccacgtacgcgactatccaccgcctctacaactcttccagaactccaccactccacctcagggtggtggtgctccgcctcgatctaaagaggtccacttcaatccaccgccggaagagcctgctcagcaagatcctgagtcgccggaagagccagctaacagcaacccttcgtctcaagggaacaactttcaagaggaagttcctacgacgttgccggagcttcaagaagactcggcggtggctctgcaagatattatgtcagtgccaaacagggagcagtggacttgtgtcttgtctccaattcccaggccaaaaaccgagtggtaagtctctcaatctttaatttgttgtgtaacatagtagccttgtgaatactcgtgtgtgctcttgtgaatacttgtgaatccttgtctttgcttcgatttgaacactcgtgtgtgctcttgtgaatacttgtgaatactcgtgtgtgctttagtgaatacttgtgaatacttgtgtgtactcttgtgaatactcgtgtttccttgtttagttctatacttgtgaatcgtgttctcttgttaatcgattctcttgttaatcgtgttctcttgatgctctattgtggaagttgactttgttctcttgttaattgtgttctgttgctactcatgctcttgttatgttctatagtatgttttgcattcttaattgtgttcttttgcaactcattatttattgttgaacatagttgacttttgaacttagttgtgttctattctattgtgtgcttttgacttttgaactcacactcattctcttcttaattgtgttctatactgttgtgtgctcttgttcagttctatagtgtgtgttatgttgtgaatctgcctcaattctgcctgtgtagtgtgtaacatagtagacttgtgaatctgcctcagttctatagtctgttctcatagctgttgttgcgttttgattatttaacatgtgtacttctttcattgttgcatgtgcttggaggtttactcgcgagagaggatgtaaattggttcgaaagatcacgcggatttttactcaaaagttcaatgctccctactataattggtcctgtgtgccattggataaaaaagaaagattgtttttagagtttgcggtaagcttcttgtatttctccaactttcattagactgtactatttaatctgtcatttgttcactaacttcacactttttttgtagaaaactcaccactgggatcccttaataacagggacagtccaatactacttcaatgagatcgttaagaggcgcttgaaggacatggttagcaccgcaaggagaactcgagagcagcctccatggattggagaaactctgtggggaaccatgtgcgactactgggacactgaagaggcacagaaaaggagtaagacatattccaaagctcgtctctctgaccgtaacggtctcggtcctcacgtccactactctgggccaaagtctttccaaaaaatccaagatgaattggtaagtgtttctgcaatcttcccatgtgttttagtgatgttcgtttaactgtgtgtgatgtttagtctgttgatagtaataaagcttgtgatctgtgtttgcaggaagaaaaaatgggaagacctgtccctcttggtgaggtgttcatctagacacacactaagtcgtatgggacttatgttgatcagaaggcagagaagattgctctggcgtatcagcagaatgtgagagagaagctgtctgaactagaggcggctgcttctgctgtgtctgatggctcttcacgtcctcgggatctcacactagatgagtatacagccatatttcttggggtaagatgttctttgtctttttcagagtgttagagacatttaggatctgtcactaattatcttcctctttatttcttgcagtccacagaaagggatgcaagaggcaatccttatggacttggctgtcttaaagaaactctaggcagtgccaactgccaactccccggagactcaacctttaaagccttagaagaacggctgcaggaagctccgcggcaaattgaagaacaggctgcatataacgagaagcgagatgctgagattgctgcccaagaagccgagacagcccgagtcataactgagcaaaaggacaagctcgagcacttgtcattagtcgagaagtatcatcgccaaaccgatccgcagttcttggacttcattgccacacacatcttccacatccacaaagcgtatcccaattactcccccatctaatgatcca

SEQ ID NO: 162759 - DNA, 1461 bp, Arabidopsis thaliana landsberg
atggtacggacgccgtgttgtagagcagaagggttgaagaaaggagcatggactcaagaagaagaccaaaagcttatcgcctatgttcaacgacatggtgaaggcggttggcgaacccttccggacaaagctggtatgtatttatttttcttcaattattattactatcgctaattaatttggaatatgcaatcagcttttagttgcatctaataatttaatgcttttaatcattatgaaattattataggactcaaaagatgtggcaaaagctgcagattgagatgggcgaattacttaagacctgacattaaacgtggagagtttagccaagacgaggaagattccatcatcaacctccacgccattcatggcaacaagtaagttttaactatataatgatgaccatcgacaggcctaaggacaagaacataggcacacatttttatatattttttcataacatatatatgtcatatgatgtacgactgatttcaaattattaatatgattttaaataaggattacagacgaaaagattctttaatgttattataaaataatttgactggacgcaataatttagctagctaggatgtaaaggtagaaaaaaaatatcctttaataatccacaaaatgtgtattcctaaagtaatggtatctagtgaggatttggtatgtaaatatacacatttgctaataaataatgttttgttgattagatggtcggccatagctcgtaaaataccaagaagaacagacaatgagatcaagaaccattggaacactcacatcaagaaatgtctggtcaagaaaggtattgatccgttgacccacaaataccttctcgatggagccggtaaatcatctgaccattccgcgcatcccgagaaaagcagcgttcatgacgacaaagatgatcagaattcaaataacaaaaagttgtcaggatcatcatcagctcggtttttgaacagagtagcaaacagattcggtcatagaatcaaccacaatgttctgtctgatattattggaagtaatggcctacttactagtcacactactccaactacaagtgtttcagaatgtgagaggtcaacgagttcttcctccacacatacctcttcgaatctccccatcaaccgtagcataaccgttgatgcaacatctctatcctcatccacgttctctgactcccccgacccgtgtttatacgaggaaatagtcggtgacattgaagatatgacgagattttcatcaagatgtttgagtcatgttttatctcatgaagatttattgatgtccgttgagtcttgtttggagaatacttcattcatgagggaaattacaatgatctttcaagaggataaaatcgagacgacgtcgtttaatgatagctacgtgacgccgatcaatgaagttgatgactcctgtgaagggattgacaattattttggatga

SEQ ID NO: 162760 - DNA, 1819 bp, Arabidopsis thaliana landsberg
  unsure (1)..(1819): unsure at all n locations
atggatgagacagagtcgtcatcgtcaaggccaganagagaacagagagaatatgatagcttcagaagaaaggctaatatacctcgagggaggagagcgatgacagagaggtatgagcttatagatgaggatcaggatgacgagtacatgcctgagcatactcgcagagccaccaaactgctaaacaaacccgatgtattgcctgctgaggaatatattaggctcttcaagctgaacgagttctgtagcacgaggtatccttgctcaaccacacttgcacaactcggattgttggaagatgttcagcacctgtaccagagttgtcatctggacactctgatggcttatccgtatgtagcatatgaagatgagacaattcaattcctctccatgctgcaagtggagctctaccaaggtatgacctgtgatgagttggattgtgaaggattgggattcttgcgattctctgtatatggtcatgagtataggttatcaatcaagcgattggaaggattgtttggcttccccagtggaacgggaactaagcccaagtatgacagagaagagttgaaagacttgtggatcaccattggcagctctgtaccgctgaattcttccaggtcaaagagcaatcagatacgcagccctgtcatcaggtacttccagcgttctatagccaatgtgctttactcccgagagatcacagggactgttactaattctgatatggagatgatcgcaatggctctcaagggaactcttcgccaaactaagaatggcatgtctctccaaggtgaaatcaatgacacacctctctctgtacttcttctgatccatctgtgtggatacaagagcaggaccgtcagcaataaccacaagagagcatgaggcgctctgtgcataggaggtgttgatgacaccgattctgaccgcttgtggagtcccgatcacttctgatggactcgagccacgaacaatggatatcgagcatctacgtcactgcgaattcctggagtttgcaatggttgacgacttgcacaggttcatgtttgagcactctacagacaagagagctagcatccttctccccagccctgaggttacacggataatagagggagataacattgatttttggcctgaggttggacgcctttactatgagaacgcttcgccattggatgatgatcttctagaagaagctgcttcggatgggatggatgaagacagagcagtggagttcgacactagcatgtatcactttggtgaacatgtacctccagcgagggagagcaagagcttgactgaagctcataagaacaacagtaaactgcagaagtggtgcttgaagcaggacaagctgctcgccaagtgtttcaagactatcaagcttctgacagataagctgagttgttcctgctccaccactgctattccacagggacagactcctctggagatgccatcgaggagatttgatgagcctgcgcacaggcctgagcttagcgagcagagagtctcacatgtcccggctaggcattcgtcattcgagtctcgagagcacaagcgaagaaggaaggctacactcactcgatctagcagcagatcacgcctcattcactcgaggagatcactcgactgcggtgctggccacaacagaaggagagaggtcgagtatcctcatagcggtgctggccgccacagagctgatgaagtcgagtacccacttgctggagctgatacagaacagggcggctcgtctatggcctgagagcaatcacaggcagccattgacgaccaactccgttcattcttcgac

SEQ ID NO: 162761 - DNA, 1013 bp, Arabidopsis thaliana landsberg
gccgcaacattcgccgactatcaactccaaccactcttcgttgcatttgttcacactcttcatctgaaatcatctccgagcatcctccgttcgtcagggtttacaaagacggtcgtatcgaacgtctttccggcaccgaaacagtcccggcttctctaaacccacgaaacgacgtcgtttcaaaagacgttgtctactcaccggggcataacctctccgttcgtctctttctccctcacaaatcaacacaactcgccgccggtaacaaactccctctacttatctacttccacggcggagcttggataaacgaatcccctttctccccaatctaccacaatttcctcacggaggtagttaaatccgctaactgcctcgccgtctcggttcaataccgccgtgcaccggaagatccggttccggctgcgtatgaagatacatggtctgctattcaatggattttctcacattccgatggatctggtgaagaagattggattaacaaatacgctgatttcgaaaaagtttttctcgccggagatagtgccggtggtaatatatctcatcacatggctatgagagctggtaaagagaagcttaagcctagaatcaaagggactgtgattgtgcatccagcgatttgggggaaagatccggtcgatgagcacgatgtgcaagatagagagatcagagacggagttgcagaagtttgggagaaaattgtgagtccgaatagtgttgatggagcggatgatccgtggtttaatgtggttggatccgggtcggatttttccgggatgggatgtgagaaggttttggttgaggtggctgggaaagatgtgttttggcggcaaggattagcttacgcggagaagctaaagaagagtgggtggaaaggagaggtggaggtgattgaggaagaagatgaagaacattgcttccatctcttaaatccaagttctgaaaatgctcccagcttcatgaagagatttgtggagtttatcactggttaa

SEQ ID NO: 162762 - DNA, 1106 bp, Arabidopsis thaliana landsberg
ggctagagcaaaaaacacaggtcgtgggagtcccattgttccacgtcatcatacgatcacccgtggaaagacgattccgaattgcgagccaagcacaaaaggagaattttggcgttgcgtgagcgaaccaaactccttaccataaatcaagtttttctcgttgattccatttcgcatatttggtcattttaccatagatatcatctataccaactagtcttacattgtatatgtaatgtggtggttgtattacaggttccggggtacattgccgctcaacttctcggatcgaccttagcggctgcagctctacggcttgtgttccatctagacgacgatgtttgtagcctcaaaggcgatgtttatgtgggaacatatccgtcaaactcaaatacgacctcgttcgtaatggagttcatcgctactttcaatctaatgtttgttatatctgctgtcgcaaccgataaacgggccaccgggtcattcgctggaatcgctattggcgcaaccatagtactcgacatccttttctccgggtaactattctaagtctcttttgaaaaatttccatggtgattttgttaaaacataagctaacaatgttttattttcaaggccaatttcgggagcatctatgaatccagcaagaagcttagggcctgcacttatatggggatgttataaggatttatggttatacatagtttcacccgtgatcggggcattatcaggtgcatggacttatggtttgttacgatcgacaaagaaatcatatagtgagattattcgtccaaattgcaataaagtatcttcgagagatcgccaagaagcttcccaagatgagatttgtgttctacgagtggttgatccggctaatcaaaactattttatatgttcatcacctactgatatcaatggcaaatgtaatgttacatgtaagttggcgtgaattatatcgatgtactactcaccacactagttcaatatccatgtattttgttttctcgtttcatattactgtgtatatttttattttatatgcgataagtgataaaaaacaaaaaaacagtattaacacgaaatgttttctcatgctcaactttata

SEQ ID NO: 162763 - DNA, 1160 bp, Arabidopsis thaliana landsberg
gtagtagaacactatgcaagaagagaagagcaaagaagatcacagccgtctgatcaatgtcacggccaaagatctaacggtcagaaaccgacggctcgtcgaggtaccatacacggctacactttcccacgcaatgaacacattggtggctaactccatctcagccctcccagtggctgcacctccaggccactggatcggagccggtggttccatgatcatggaatcagacaaacaaactggagttgtaagaaaacactatatcgggattctcacgatgcttgacatacttgctcatatcgccggtgaagattccaatctctctgatcttgatcgcaagatgagttcacaggtgtcatccatcatcggtcattgcctcgaaggactcagtctctggacactgaatcctaataccagcgtgttagagtgcatggaagtgtttagcaaagggatccatcgagctttagtgccagtggagagcagcatagagagcaataacactattgcaggagttgagttgattgagtctgcctctgcttacaagatgcttactcagatggatctcttgcgtttccttaaagaccatcactttgatgacctcaaaactgttctctcacgctccatctctgatctcggagctgttaatgattccgtttacgccatcacagagagaaccactgtttccaatgccatcaacgttatgaagggtgctctgctcaacgctgtccccatcgttcatgcacctgatatagcacaagaggatcatctgcagctagtcaatgtaggcttcattttacatatatactctggttaatatataatgtttactcattttgtgttttttgagattgcaggggagacatagaaaagtgataggtacgttttcagcaactgatttgaaaggatgtcgcctaccggagttgcaaacgtggctgccactcacagctctggagttcaccgagaaaacttcggggaaggagagggaggtggtgagttgcggtgtggagtcgactatggaggaagctatagagaaagtggtgaccagaggagtgcacagagtatgggtgatggatcaacagggtctgcttcaaggagtcgtctccctcactgatatcatacgctccctaagatctactctttcgtaatcaacgagctctcta

SEQ ID NO: 162764 - DNA, 942 bp, Arabidopsis thaliana landsberg
  unsure (1)..(942): unsure at all n locations
atggtgagaggagatgatcaacttaatggtttgcagggagggaagagagcgttagatattttatgtgtagcgacggagagaacggttagcgcttttgcatatgaggaaataggagaaacatccactgaaggtgataaaaggagggnnnnnnnnnnnnnnnnnnnnnnnnnnnnnnnnnnnnnnnnnnnnnnnnnnnnnnnnnncagcttgagcaaacgactgaagattgatgagtgcaagaatcaagacccggaacaaaaccctaatcgtgttgcttcttctccaagtttgtgccatctagagtccaagaggcctcaaaaagtggtttcaaacaaaccggtaagaaacagaaagccggttatagtgacagatgaagataggacaccgacggaatggctgattgacgtgatgagagaagtgaacggtatggatgcaaagctgatatttgtgaaggttcttcccaatagtgatgtcgacgaacttcagacacgtcttatgatgccctggaagcagatactagatatggacttcttaaacgaggaagagttagaaaaaatagatagacatcacaaaaagattagtgccagtgacaaaggagcggatgtgatcgtggtgaattctaagggtctacagaggaagcttaagctcaagagatgggatatgacttccacttccaactacgtcttaggtttaggatggaacagggtcgtcaccgataacattctacagagaggcactaggcttcggatctggtccttccactccccatacatgctctttttcgccttcgttctttcagatccagatccagctccgactgagtgcctaaatttattggctaaattgtgcgaggagacgacttgtctcgaggctttacaagaggcaaataggatgagctcactcgtctcggacacagagctggacctcgagctccggttgtag

SEQ ID NO: 162765 - DNA, 3325 bp, Arabidopsis thaliana landsberg
atgacactcttcttcttctactctcttctcttccttctcctcctcctccgtatctccaccgcctctctcccggcgacgaactacttcgactccttcttaccatccgacgccgtcgcacttctctccttcaaatccaccgctgatctcgacaacaagcttctatactctctcaccgagccttacgactactgtcaatggcgcggcgtcgattgctctcaagatcgcgtcgttcgtcttatcctcgacggtgttggtctccggggaagtttctcaccggagactcttagtcgtcttgatcagcttcgtgttcttagccttgagaataactcaatctcgggttcgattcctgatctatctcctctcgtcaatctcaaaaccctaaccctaagcaagaatggtttctccggtactctttcttcttcaattctctctcttcgtcggttaacagaacttgatctatcgtttaacaacttctccggtgagattccgtcggggatcaatgctctgagtcgactcagttctttaaatctcgagtttaatcgacttaacggaactctcccgccgttaaatctttcttctctgatttcatttaacgtttccagtaacaacctcaccggtttagttccgttaacaaagactctgttacgattcaacgcgtcttcgttttcgtcaaaccctggactctgcggtgagatcattaaccgatcttgcggtttacattcttcttctccgttctttggttcacctaaaccaaacaccacgtcatcaacatcttctgcttcttcgtctgaagcaccggttattcaaagtgaacagaacggtgaagcagcgatgattgttccaccggtggttaaaaaggttaaaaacggttggttagttcttggtttcaccattggtctcgcttctttgatagttctaggtctctgcctcgtcgtgttctcgttgtttataaaaaaccggagagaagactacgatgacgtgataattacgcaacctaagcgagaagaagaaaacaaagaaatcaagatccaatttcaaaccactgcgccgtcgtcgaaaaagcgaatcccaagaaacggagatttgatattctgcggcgaaggaggaggaggaggagaagcaatgtacacagttgaccagttgatgagagcttcagcagagcttttaggaagaggatcagtaggtacaacgtataaagcggtgatggttaatcaaatgatcgtgacggtgaagagatttgctccgtcgaaaacagcgattactagtgatttagagtttgagaatcagatggagatagttggtggacttaagcatccgaatcttgttccggttaaagcttatttccagtcaaatggagagagacttgtcatctatgagtaccaacctaatggaagtctcttcaatcttattcatggtaatgttcttcatcttcttctcctctgtttctttttctcttgggaacgttagggttttagttgaagtcactgagtcacgtaagagttgttgcttttttaggtctagttaattaagtaattaccatgttggtctcgatcatattgaggtgatactatgatttttacttttgtctccattataaagctgaaacggttggcgcgttgatgggttttggtgcagctcctattattttgaaggaactctagacttgaccacatagagacaatgacggagtttatgattaaaatatgttgtgactttttctttgttgaacaactgtagatataagacagagaatctgttaggaatctgtgctattttcacgtgaaactctagtcatttgtcaggaatttggtgtgttttgtcttaggacttgagctagagtggcttcttggttgcatattactcgtttatgattggaagtgtatataaacaaacatccattactaaacttatcatctgaatcatcatagtaaaagagtcttttcttttttatcttgtggttattgatatgaatagactaactaatgactctgttttatcccttgatctctcaattacgttttcataaaatccaggttcgagaacatcaaaggcaaagccattacattggacatcatgtttgaagatagcagaagatgtagctcaagcattacattacattcaccaatcatcagccaaattccatggaaaccttaagtccactaacatcctccttggtcacgactttgaagcttgtgtcacagattattgtttaagtgtcttaacagactcatctgttcctcccaatgacccggacatctcttcctataaagcaccagagataaggaaatcaacagatagtcgtcccacgtcgaaatgcgatgtttactcgttcggggtcttcctcttagagctattgaccggtaaaaccgcttcgaggcaaccgattatggagccaaacgatatgttggattgggtaagagcaatgaggcaagaagaagaaaggtcaaaggaagagaatgggctagagatgatgactcaaacggcttgtctttgccgtgtaacatcgccagagcaaaggcccactatgaaagaagtgatcaaaatgattcaagagattaaggggagtgttgtgatgactgaagagaacgaaaaattcctctgatcaagtatgtgtttatgaggggttaactggttaagttgggagaaagaaaaagagtattaaaagtgtaaattttcttagcattggaattttcttaatatcgacggattttcgtaataaaagtataacaatattgaatctgttgacagagaaaaaaaaaggctcttgtatatacatacagctttaagcaccttgaaacattgagtgtcggttccacgagtgatcatcctcatcatcatgatgactcttagacatgacgtgcatagtggtctcatcgttctgctttatccactcagagagtttccatggtttctgccatttccatttaaactgaagcagccattgatggtgacttcttttccacttccatagcttgccactctgtcccattttcttcattgctttcatcttcctcgtctcttctaataaagcttctgattctctcaccgagatattgactatacccggcccagtgtatttgagatgctttgttgctcgatgataagtagaagatggagatgatgggtcgtcactagcgttattatctccatagtgctttgatgagcttcttgaacttccctgcaacaagtgaaattttgcatacgtttttaaggagaaattcccaataaagaattttggatcttagtgtggaaatatggattaaatttaaaaaccgagtatgatgatgatgttgaagccagcgcaatggacactgtttgctccctt

SEQ ID NO: 162766 - DNA, 1903 bp, Arabidopsis thaliana landsberg
ttgaaacgtcatttacagattgggcaaaagagacctcaagtgcttagtgaaaaaattgtgtatgatcacaaagtagatcgtgagatggttagtgagattattgtgtaccacgatttgccatttcggtatgttgagtatgaaaaagttagagctagagataaatacttgaatccgaattgtcagcccatctgtagacaaactgctggaaatgatgtgtttaagaggtatgaattggaaaaaggaaagctgaaaaagttttttgaacaattcagaggaagagtttgttgtactgcggatttgtggacagctcgtggcattgtcacagggtatatctgtttgaccgcccattatgttgatgatgagtggaggttgaataataagattctagcgttttgtgatatgaaacctccacatactggtgaagaattagctaataagattcttagttgtttgaaggaatggggtttagaaaaaaaaatcttctctttgactttggataatgctaggaataatgatagtatgcaaagtattcttaagcatcgccttcagatgattagtggtaatggattgttgtgtgatgggaagttttttcatgttagatgctgtgctcatgtgttgaatcttattgtgcaagaaggattatcagtagctactgagcttttggaaaatattagagagagtgtcaggtttgtcaaagcatctgagtctaggaaagatgcatttgcagcatgtgttgaaagtgtagggattaggagtggtgctggattgtctttagacgtccctacacgttggaattcgacttatgacatgcttgctagagccttaaagtttcgtaaagcatttgctagcttgaaagagtgtgacagaaactacaagtcattgccttctgaggatgagtgggatcgtggagagaggatttgtgaccttctaaagccgtttagtactatcactacttacttttcaagtgtcaagtatcctactcctgacgtgtattttctgcaagtgtggaaaattgagcgtcttttgaaagactatgcagtttgtggtgatcttagaatggaagagatggctagtaggatgcaagtaaagtttgataagtattgggatcagtacagtatcattctagctatgggagctattctagatccaaggttgaaggtgcagattcttaaatctgcttataataaggtggattcgagtagttcagaagaaaaggtcaatgttgttgtggaaaatttgaaagatctttacaaagagcacagggaaaaagtttggacttcttccaccttctcaacaacccaaactccacatgaccttcttacagaatcaccactagaggatgatccaaattatgtaagtatttctccattcgttgtttatatcatatcatctttattgtctaactagtgtctatactctatatcatacaggatgtgtttgagcttgagaggagcatacaacctggttctgacaacacaaagtccaatttgcaaaattatttggatgatccaaggctagatttgaggtcttttacagacatggaggttctgagctattggaaaggcgatgggcaacgctatggtgatttagcttctctagcttctgctatacttagcattccaatcactacagtggcagctgagtcatcattcagtattggaggtcgggttttaaaccctttcagaaaccgccttcttccgagaaatgttcaagccttgttatgtactaggaactggttgcgtggttttgcagagttggaaggtaaaaaaagaatagtctaattttttggacttaatttttttcatttggtgatttatatcttctaattgtaggtgacattgaagaatactttgatgatggaattaaaggtactacatcggtagcaagtagctctggagtatga

SEQ ID NO: 162767 - DNA, 639 bp, Arabidopsis thaliana landsberg
atgtttaggatagatttgtatgcatgttgcatatttgcgttgatctcaggtgatttggagctgttgacgagctatctggaagaagcgggcctgatcatgtcaaaccactcgaccccgaggtcgagtaggagcttcaagaactcaacagatcactcgaccccctggttgagtagaggacatcactccttcaccacatcacctgaccatcactcgatcacatcactcgaccctgaggccgacgtgtcttcgccttcattgccagaacactactcgacctcatcactatacctggaagtcgagtatcaccatcaccaccactcgactacatactcgatgacaagcttcagagccttcttcattccgcactcaaccagacactcgagcacaaggaagaaaagaagactccagctattcactcgacctctcactcgaccacctgggtcgagtacagttcttaacccgtcccaatacttcgtcgttttgagtattagggtttcgggatatttggctataagtagcatgtacttctcattttctcagacaagaagtttttatctagttttatttccgcagaccttctgttctagactttttgtaatacggatttctctttatctattcagtattcagtattcagtt

SEQ ID NO: 162768 - DNA, 936 bp, Arabidopsis thaliana landsberg
atgaggctcgtctggtcgccggaaactgcctctaacgcttacatccacaccgttagatcagtaagaatcctcctctaattcagatggcgcattttgtacatcatcttttgttttcttgttcatgtttgttcaccgtcaattcaacttgttgacctaaattgtattttgatcaaagaaatcttcaatatgtatatgaattacaatttttatagttcttataattaatattttcttcgctgtgaagtatatgtggtttttatttagtcgatcttgatgtatcatgtacatatatgaatttagaatcttgatgtaattatttctatatgtgtgtctttgaagtgtaaaagctacagagactcgagcgtggcggagtttttatcggctacggcggcgggatggaacacgaggctgatcgttgagacttggtcacgtggagatccgatcgcaactagcgtcggactcgccgtggcagcgatacacacatgtggaagacacgtgtgcatagttcctgacgaagagtcgaggtcggagtacgaggcggtgatgagaggagccgttacgagtgactcaacggaggttatggtcttagactcggcggaggacgtggtggagagaatctccggcgtggatttcatggtggttgattcgaaacgccacgagttcgtaaacgcgttgggattagcgaaaacgagcaaaatgggcgccgttttggtgtgtaaaaacgccacgctgaaatctatccctgggtttaaatggcaaggtcttttgagacgaggtacacgtgtcgtgagatcggtgttcttacccgtcgggagaggattagagatcgtacacgtgggagccagtggtggtggtaatggtttgaggaagattcctagccgttggattaaacacatagatcctcgatctggagaggaacacttgtttaagcgttag

SEQ ID NO: 162769 - DNA, 771 bp, Arabidopsis thaliana landsberg
atgattaggatagctttgtatacatattgcattcctgagttgttttcaggtgatttggagttgttggcgagcaaagtggaagaagcgagccggaatcagaggacatactcgacttccaggccatgtacatcgagcaccatactcgaccccctggtcgagtaactttggagccattcttcccatctactcgaccccgtggtcgagtaacctcagctcaggccactcgatgacgccactcgacccccaggtcgagtatcacttcgccatccacctgaccacactcgaccgtccactctaccatattactcgacccccaggtcgagtatcatcactcaccaccagtaccatcactcgaccaagcactcgatcacatctttggagtctactcaaatccacactcaaccagacaagctgagcacaaggaagagaagagaagaagaagaagtgtttggaagcagcctggagctccatcggatcacgacgcccatctcggcccattctcactttatgggccgggcgattaggttattggcccgtctactatcattttatttcgttttgtataaatagatgttttagggttttgtcctgagacatcgagtcgaaattgagtctttgcttcagtttaattttcttttttactctagctgcgccgctttttcttctacaacctgtagttcgagatttttccaagttattcagagtccgcatttgatttcacctttcatctactttttatctctttacttatgcaatattatcatttacctg

SEQ ID NO: 162770 - DNA, 1017 bp, Arabidopsis thaliana landsberg
atgggttacgacggcctccgcgacttgaatccttgcataacttgctggacgatttgtgttatggttcttaggaagtacgtctcgtttatcacaaataactcattcaaactacgggtcgtctttgtcgatgagtgggtaatgggatcttcactcgtgatacaaggcatacttaaccttctgcttgtcttattccctatataactcaccctccaatgttgttttcatagggtatccaaattgaagctataatcggaagtcggttttctcaacgttactacaacatgcttgaagagaatcagtggaaagaaataagaacttttggtgttatcgaaaactgtggttttgtccgaacaacaacccacaaatacatgattgagttcatgaatgcaactgagctaaatcattccgacccaagggaaaatgtattatttaacagattcacaccttttgactacattattgaagacaccgctcatactgaaaatttggtcggtaagtaatacgtatctaatgcaaatttcatactttcacaaatcacatgcctgcttttaatctttatttcatactcccagatttggttggtgcactcgtcgaggtcggatgtctgagaaatattacagaagatggttgggagatggacggattcagacttaccttcgagattatggacaaatagtataatttcttttgtttctttacttctaaatttctttcttttcatcatgtatttttcttgagttagcttaagtgtaagactgttttatatgtttcagtaaggagaggttgaaatgtgaggctcttggcgaattggcggttgacttgcataggaaatttcgatcatttcgcaatgacagtattgttattgacaatatatatgttgcactcacatggtggaagatcttcaggtatcatactggccccaaacacgtgaagatccaaaattatgccgggatatcagatgtgactgtcgaccccaatatcgaagaagtgcaagagttaaaaatggtcctcgagtaa

SEQ ID NO: 162771 - DNA, 1467 bp, Arabidopsis thaliana landsberg
atgaatggatccgacaatagcactccttcccgaccacggtcgataactcaaccttcacttgccttctcttccttgcccccattgagtccttctccgtcgtcatcccgtcgcaattcaataccattgatgaacccgtctgcttctatggagagtagagactcttccattagggttaagaagaaatctttattgcctcctttgtgtgtgaagagaagagcacccaaagacgacattgaacctttcaagagacactacaggagtctttcagtggatagttgtttgagtgacttactaaaactgcctccttctccgaataacgtttcctcttcaagatcggttgatggagaacaaaatgcttccgggcttgagtttgataccagtgtttatactgatgatgaattgaataagatagcaaagagtaccaaacttaaagaggttgcatcggatcctaaggaagtcagaaggtaagtaaatttgtgtgactaaattattatttatgcttctttttttcttttctttttttgtattccttttttattattatcatggtttgtgacatttatccatatgtatgctctttcagaatcttgaaaaatcaagagtctgcggcacgttcaaagcagaagaagttacaatatatgattgacttggaactcaaaataaactttcttgagaacaaaaatgcttcaatatttgaaaagatcaagcttttgaaggtgaaacatatcacattagccaccattagcttgtcatgtctaaacggtatttataagaagtttgctttagttttatggttttaatatacatgcagaatgataaaacaatgatgatgaatgagaagaaggaaatcatgattcgaattgaatcgatggagatacaggcacaacttcgggatggtacatcatctttatttatcgatactttagcaagtcttttagtttgattttatggtttaagttttacgctggtaattgcatgaactttcttgacctcccccttattttgggttgaccatgatagtatttacgacgataagatcttctttatgtgcaataatttccatcagtaaaaaaaggggctaaatatattgcataaaaaggaaagttttttgaataagttttagtagatccataaccgtaaaatacggtttttccgctttacctgaaacttaatgtgtaggatgatgtattttttttattgcaacgtataaacaaaataacgcattttgaatgaaactttttacgtgaatcttaaccacaacaccttttaaaaaatctcttgctttttaactgttgaatatttgttttcacttcctttattgttgcagccttgactgaacatttgcacgcagaaagtgaaaggctaaaagctgcattaatttcgaacgaaaaagggaatggaaaagtccaaaagctaggggtgccaacacgtgaagtagtgcagaaccgtcatgaattcgacaaataa

SEQ ID NO: 162772 - DNA, 618 bp, Arabidopsis thaliana landsberg
tttgggtattcgggtcgggttcaggtcgggtcttttgggttcaggtttagaagtttatgacccatttggttatatgtacaattttgggtcggtacacttcagatctgcgtgatttgggtattggttgaagaacccgataaataaccaaaactatttcgggtttgagtactaacccaaaccttgtctaaatatacccaaatatacagaaagtacccataaaaccgggaagacctgaaattataacaagtttttctttaagacaataacataaaataagaagtaaagcttgttttcagcttgttgcataatccaataattaaacaagtcacaaactaaagttattagtgtatatatgttttcatatgtatttatatgttcgggtaataataagtacttacggggatcagattcggtctgggtaatacccgatacctgaagttacttgagaacaaaccccgatcggatattttacaagaatcgaagtagaacaggtttgggttttcgggtcgggttctgtctggttctttcggtttgggtattgtgcccaggcctaatattttcatttattttgtactttgacatatagacacatcaaggcttggcctactactttcgata

SEQ ID NO: 162773 - DNA, 616 bp, Arabidopsis thaliana landsberg
tacataacatcatctcattaaactattctactctcttattcttcgatttcataggtggtctcagattgcagcacgattgcctggtcggaccgataacgagatcaagaatttctggaactcaacaataaagaaaaggctaaagaagatgtccgatacctccaacttaatcaacaactcatcctcatcacccaacacagcaagcgattcctcttctaattccgcatcttctttggatattaaagacattataggaagcttcatgtccttacaagaacaaggcttcgtcaacccttccttgacccacatacaaaccaacaatccatttccaacgggaaacatgatcagccacccgtgcaatgacgattttaccccttatgtagatggtatctatggagtaaacgcaggggtacaaggggaactctacttcccacctttggaatgtgaagaaggtgattggtacaatgcaaatataaacaaccacttagacgagttgaacactaatggatccggaaacgcacctgagggtatgagaccagtggaagaattttgggaccttgaccagttgatgaacactgaggttccttcgttttacttcaacttcaaacaaagcatatga

SEQ ID NO: 162774 - DNA, 2625 bp, Arabidopsis thaliana landsberg
atgttcatcgaaagcttcaaggttgaatctccgaacgtgaagtacaccgagaatgagatccactcagtgtacgactaccaaaccactgagcttgttcatgagaacaaaaacggtgcttttcaatggactgtgaagccaaagactgtgaagtatgagtttaagaccgacactcatgttcccaaacttgggtcagtcatcttattctctaaaatcattttaatgttagataaaatatttttttccgttttcagttaaaatactttttaatagattttttatttattatttgattaacgcagtttttgctttgtctgattaaattttggcagagtaatgctcgttggttggggaggcaacaatggttctacacttaccgctggtgttatcgccaatcgtgagtaagtaaaatattttttcttcttaattgtttgttataataaactgtttcaaaagggaataaagttgtgtgtcctatggtgtgtgggattataatatattcatattcccgcaattggatattgaataatgagcaagttgaatatgttcttatataatgaaacaaaaaatggtggcaggggaatatcttgggctacaaaggagaaagtgcaacaagctaattatttcgggtcattaacccaagcatcttctattcgggtcgggtcatttaatggtgaagaaatctatgctcctttcaaaagtcttctccccatggtacattatacttatttaactattgttgaatgtgacttacaaaagtagaaaacaagatctcttttttatactttttttaattagtggatattttggtcggcaaattaaactttgaaaaacatcagtaaatagagaaaataataaatgattaatgggttatgaaaatgataggtgaatccggaagaaattgtgtttggaggatgggacataagtgacatgaacttagcagacgcaatggcacgagccaaggtcctagacatcgaccttcaaaagcagatgcgtccgttcatggaacacatggttccactccccggaatcttcgacccagatttcatcgcagctaaccaagggtcacgtgctaaccacgtgatcaaaggcaccaagaaacaacaactcgaacaagtcatcaaggacatcaggtaacacaacgtctttactattgtaataaaatattctaaggtaacataacggtttatgtttattagcaaattaaatgtaaattttctctctgctataaaatttccaaaattcattagatgtatcatgatcgtaatttttacaagataatttgataatgaaaatttaaaaaataattagggagttcaaagagaaaaacaaagtggataaagtggtggtactgtggacggcaaacacagaaagatacagcaatgtggtggttggtcttaacgacacgacggagaatctaatgtcatctttggacaaggatgaggctgagatttctccttctactctttacgccattgcttgtgttcttgagaacgttccttttatcaatggaagtccacaaaacactttttgtccctggtaactaaattaaactatatctagatagtattaatgaccttcaattttctatagtaatcacattttgcttatattatacagggcttattgaattagccataaagagaaactgcttgatcggtggtgatgacttcaagagtggtcagaccaagatgaagtctgtcctcgtcgatttccttgttggcgccggaatcaaagtacttaatcctaaataagtatcctaattaaatttattttatatggtaacgttacaaaacgaaattaattgcatttatctatatgtatagccgacgtcgattgtcagttacaaccatcttgggaacaacgatgggatgaacttgtcggcaccgcaaacattccggtcaaaggagatatcgaagagcaatgtcgtcgatgatatggttggtagcaacggaattttgtacgagcctggtgaacaccctgaccacgttgtggtcattaaggtgattaattttactattaattataattatccaatctaacaaatcacattaacataaattatactattggatggtgttgcagtatgtgccatatgtaggagacagcaagagagcaatggatgagtacacatcagagatattcatgggagggaagaacacgattgtgatgcacaacacttgtgaagactctctcttggctgctccaattattttggaccttgttcttcttgctgagctcactactcggatccagttcatgagtgaaaacgaggtttactattatttgcaaaatcgttagatagttcaatgtttatccaaattgatttagttgtgagcttgattttgttggtttcttgcagggaaagtttcattctttccatccggtggctactctcctaagttacctctcaaaggcaccactggtaagcaaaaccgaagcaaaacattgtgccgtttttcaatcctagcgacttcctttaacatcactttcattcaatgaatgcaggttcctcctggcacgccagttgtgaatgctttgtcgaaacagcgtgcaatgcttgagaacgtactcagagcttgtgttggacttgctcctgagaacaacatgattctcgagtacaagtga

SEQ ID NO: 162775 - DNA, 1295 bp, Arabidopsis thaliana landsberg
ggagatctgagaaatggggtttacgttggattggtggtgatgctctatgcgtgtattgtcgttgtacaactcgaagcagcgttggaaacaaagacatgtttccaaaggaagagtccatgttttctaaagaagcaaacttgcccaaagcaatgtccttcgttttcccctcccaatggcagtaccaaggcatgcgtcatcgattgctttaaccctatttgcaaagccacttgccgaagtaaagtaccaatactctttctgtttcataataagtgccgttttaagattttatttcttttcataaaatgtcgtttcatatctaatagagaattttcaaattaaccttcagatttagtcatattattttagcttattaattagagagatagacttacgtataattacattgttcttttaatatgtatgaaaaatgctataacaaaatgttcttaatataacaatataatgtcgtactgaaaataatcattgtaacagataggaagcctaattgcaacggcaaaggatcagcatgcttagatccacgtttcatcggcggagatggcatcgtcttctactttcatggaaaacgcgacgagcattttgcactaatctctgacgttgacttccaagtcaacgcacgtttcattggtcttagacctaatggtcgggccagagattttacgtggatacaatccttaggtctaatcttctgccccaacagcaaaaccttctcactcgaggctacaaaagccgagaaatgggatcaccaagttgaccacctccgtctttcctacgaaggaaaagagatctctttaccaaaaggagatacatcagtgtggagtcctcctctaggagactatataaagatcgagagaacttctgacataaactccgtgttggtcacgttacaagacattgccgagatttggatcaacgtggttccggtgacaaaagaagacgacataatccataaatacgggataccggaggatgactgttttgctcatcttgaggttcagttccggttcttgaagttgtcatcaaacgtggaaggtgttttaggaagaacgtataaagaagatttcaagaatccggcgaaacctggcgttgctatgccggttgttggtggcgaagataaatacagaacagcgtcacttcttgaaacaagttgtaatgcatgtgtttactctggtggctcaagaagtttggacaagattgagccattgttgctgaatcaaaacactgttgattgcaccggtggatccagcagtggtgttggaatcttttgcagaaaataa

SEQ ID NO: 162776 - DNA, 996 bp, Arabidopsis thaliana landsberg
acagtggttcctctcaatacatgggttctaatatccaactttaagctagcttacaatctcctgcgtcgccctgacggaacttttaaccgtcatctcgcagagtttctagaccggaaagtccctgcaaatgccaaccctgttaatggggtcttctcttttgatgtgatcatcgatcgccaaactaatttgcttagcagagtttacagaccagctgatgctggcacttcaccaagtattactgatctacagaatcctgttgatggtgaaatagtgcctgttattgtcttctttcatggtggaagctttgcacattcttctgcaaacagtgctatttatgatactctttgtggtaggcttgttggtttgtgtggtgctgttgttgtctctgtgaattatcgtcgtgcaccagagaatcgatacccttgtgcttatgatgatggatgggctgttttgaaatgggtcaactcgagttcttggcttagaagcaagaaagactcaaaggttcgtattttcttggcgggtgatagctctgggggtaacattgtgcataatgtcgcggtaagagcggttgagtcaaggatcgatgttttggggaacattttgcttaaccctatgtttggagggaccgaaagaacggaatctgagaaacgtttggatgggaagtactttgttacggttagagaccgagattggtattggagagcgtttcttcctgagggtgaagacagagagcatccagcgtgtagcccgtttggcccgagaagcaagagtttagaagggttgagtttccctaagagtcttgtcgttgtagcgggtttagatttgattcaagattggcaattgaagtacgcggaagggctcccgaaaccgggtcaagaggtgaagcttctttacttgaagcaaaacactattggcttctacttattgcctaacaacaatcacttccataccgttatggatgagatagctgcatttgtaaacgcagaatgccaatga

SEQ ID NO: 162777 - DNA, 2649 bp, Arabidopsis thaliana landsberg
  unsure (1)..(2649): unsure at all n locations
tcgttcaatggaaaggactactcgaggtttcggtctcaacagcagcgtggaaaccctcatagcagtgaagggaatactnnnnnnnnnnnnnnnnnnnnnnnnnnctccagacctcaaacgcctatcaaccaagcaagcggtgcttctcctcagcagggaaatcagtcacccaacggcaccgtccaccatgctaatcctctagcttctcggctcacgaaatgactctggatgagttgcttgatagtcttggtcgtgctgggttactgagattagaccctaaccgtcctcccggaactttctggtaagccacttttgtaaacatattccttaagcgttcatagtactagtctcagttatcagtttattgcctaatggaaccttgtgtttgtaggtttgaggatgacccttcagttccagctactgtccggagcatctttgaaagagatttcaaggagcctcatgctaactggtcaatgacaccccaacatgtggttgatcgctggtttgaaacctttgctgtaagtccactaaattatattttgttgtgtaaagctttttagttgctgtaatattaagtctaatttttgctgtcacttgtgtctgttttgtagcaaatgtataattgggataaaacaataaacaagagagttaagactgagtttgaagcaaagctgaaggagaggatgactgatcaagtttgtcggtggaagggaaagtggagagagaagggagatgtagcaatgcctcgctggtttgatcctgtagtgtgggccggtcttattagtttttggcgagatcctaagtcagaactgaagagtatcaatagtaggaatgcaagattacatgatccggatggcctcgggattcataaacacaggtctggccagacctcttacaaagcccgggcccgaaaacatgtaagttattttactctcttactttgtcaattttattacttactcaaagaactaaccaagacttgtttctgttgtagtgtgaactcaccggagaaactactccagattttcttgtgctcttagatgagacacatagaaaacctgatggtagtttcattgatggaaaatcagaggagatctacaatgaagtgtcatctaggattcaagaggagacgtctcagctgtgttccgagaacacaacggagagcacagcttcaggcggtttatctgttcaggccaagaacaagatatatgcttcggtaaatttctctctctctctctcttctatatagtttcagctgtgttttgtcctcatttgtttgtgtctgttgatccggtgacttggctttgatgatgttagtaattttctgctttgtttgtgtgttttgtcaacacatttactatagcgacttggctttgtgtttgtcagtttttttctgcctttgtttgtgtgtgtagtcaacgcaattagaatgcattgtaacttggcattgtgttcaatgttttgtcatgaattggtttttgtttgttgtagttgtatttgtcttggcattgttacttagctgtatttgtcgatggtttcattatgtaattggatttgttattgtcttgatttgtttgtctcagttttggttacattatgtaatagtgacttgtttttgtttttggttttgagtttctcttaggtggctccaaagaagaaagggaggatatatggggctggttcattgcagctagaagccgcatcagctcacatcggtccttcagttcctcgagatgatccgggtgaactctctcaaaagctggctgccgctgaagctctcattgcaaaccaagcagagaagattagtagcttccatgtgtacttcgactaccttgcggagaaagatccagactttgctgccatctttcgagctggatcttctaggacagagcctgaaggctccaaccagccacctgagatgcctgaagctgggatcacaacaactgaagctgttgaagctgaaacagttagggctgaggaggcagttgagactgaggcaaacaacactggatcctctccctctcttgctttctaaaaaaacttgcatccctctattttattttgtttcatctaaaccctaaaacttgcaacattgtgtatatttattttgttagctttctaattttatttgaacaccaaagtttcagtattaataatatgagttaggctatcaattaagtttctaattcagtgttaataccaaaaattaatattagattaacctaagaaaataattaagaatataattaagctaaacagaacagtaatcacgtttatctaataattaagaacgttgcaaaaacctagcaagtccatcgcaaaacttgcgaggtatttgctactacgaactctgcaactcgcaactccctcgcaggtttgctacagaaatattaattgcaaatccctcgcaaattttgcgagggatgtgctactacgaatgctgcaactcgcaactccctcgcaggtttgctacagaaatattaattgcaaatccctcgcaaactttgcgaggaattagcaagacagctcatttgcgacgaatttgcgacgttttatatcccttgcaaattgcgagcgtttagcaagacatttattccgtcgcaaatttgcgagggaattacgactgtttctaatttgcgacgcgcgatt

SEQ ID NO: 162778 - DNA, 1247 bp, Arabidopsis thaliana landsberg
atgagacctgcacaagataatcaaggctcgttccttggtcggattagtattcgtcgcaaccaattcgtcgacgtcaacaacgaacaagaacaagaagatctcgagcttttccaaaaacacatcgccgatcgtttcaccgagcttctttctcctcctcaagcagcagcgtcagatgaaacgaacacggtagcttccgtagccgcgacggagcagattatgtccgtgacttggctacgtaagctaatggatgtttcctctgttgcgaagctgaattcaaagcgattttgttaatgggtcgtgacccgacccagatttctaaaccgccttttgaccggttagttcctgaaatgttagaccggtcgattaaagcgcttgacatttgtaccgccgttgttaacggaatcgattccgttagacattaccagcgtttagctgagatcgctgtaacggctttggagcaacgtccgttaggtgacgggaacgtgaggcgagcgaaacgcgcgttggcgaatctcgtcgtcgcgttgagtctcgaggataaagagaatgtaagcggcggaggtggtggcggcggcggagggaataagacgacggagagatcgtggtcgtttggtcgtcgaagcggtggatcatcggcggcgagtaaaggaggagcaacgattggtcagctcaaatcgtcgtcgtgggcggttgggagaaattggtcggcggcgaagcagatccacgcaatgacagcgaatcttacgccgccacgtggtaacgaagcggcgggattgcctcaaccaatgtttataatgagtacggtgatggttttcgtaatgtgggtgctaacggcggcggttccgtgtcaggagagatcaggattagcgaatcatttaccagtgccgccgaaacatttgaattgggctcagagtttgatcggaatccatgagaagatcggagatgaatggaagaagaaagagaagaaaggatctgctggattaatggaagagatgacgaggatggagaagctaggtcactcgttgatggaattcgcagatggatttcattatccggcggagaaagatgctgctgaatctgcggcggcgcaagtggcggagatggcggagatatgcaggagaatggaggaggagcttgtgccgttacagcaacagatcagagaagtttttcataggatcgtgaggagtcgtgcggagattctcgaggtgttggagcaagccgggaaagtttcggcgccagttgtgtaa

SEQ ID NO: 162779 - DNA, 1908 bp, Arabidopsis thaliana landsberg
atggagatagggtcgtcatccacggtggctggcggaggacagctttcggtgcctccgggattccggtttcatccaacggaggaggagcttctttactattacctcaagaagaaggtttcttatgaaccaattgatttagatgtaattagagaagttgatctcaacaagctggaaccttgggaacttaaaggtaaaatttataatccccttatagttaactcttctttaactataattaccatcacctaatccacacatttaatgaatgactattaattatttcttgatcagtatattagtatatagactatcacaatcaacgtcatatagattttaattatatatagagcgagtgctgtaagattagataaaatctggggaattatgtcgttggcctgcacaagattacaagttagatgtcaaaggacaattatatacatagattgtggtaatattgtctagggagtttgtctgtgatctctatggaaacatgcatctacttgtgtctttttaagtttgaacagttcttctcatatatgctgataaattattttccagtttttatggaaacatgaaaccttatacgtgtgtgtgcgcgttatacaccaagaaagagacaagttgtctattcacttatgtacagaagaccaaagtgtaatgtcttgtagtatatgactacgaatgtatattttgtaatattattttgtactaccctcaaaataagtcaatggtttttcacaatgaagacatataacaacccatcgccgtaagccataaatatatttatttgaaatgtgtgtttaaatatatatatatatatatacttaagactataattaacaattgtattttttcaattatatttataacaaattttgttgttgtgtgtatgtagagaaatgcagaatcgggtcgggtcctcaaaacgagtggtatttctttagccacaaggacaagaaatatcggtttgggacccgaacgatccgggcgacagcaaccgggttatggaaagttgttggtagagccaaatccatacatcgctccagctccaagaagattggaatttgtatgtctcttgtattgtactctggtcgtgctcctcatggccaaaaaaccgaatggatcatgcacgaatatcgcttggacgattgcgaaaacgaaattcaggtacaacatatcacaattaatgtttaactctcgaaatctctaatcataatgcttaaagtggatttatcattaatgtgtaatttgcaggaagatgggtgggttgtatgcagagtgttcaagaagaagaatcatttcagaggatttcaccaagaacaagagcaagatcatcatcatcatcaccaatacataagcaccaacaatgaccatgatcaccatcatcacattgactccaattcaaacaatcattctcctttgatcctacatcctctggatcatcatcaccaccatcatcacattggacgacaaatccacatgccattacatgagtttgcaaacactctgagccatggctcaatgcatctacctcagctctttagccctgactcagctgcagcggcggctgccgcagcagcatcagcccaaccatttgtgtcgccaatcaacactacggacattgaatgttcacagaatctactgaggttgacttctaacaacaactatggtggagactggtcgtttctggacaagcttctcactacaggcaacatgaatcagcaacagcagcagcaagtgcagaaccatcaagcaaaatgttttggtgacttgagtaacaacgataataacgatcaggctgatcatttgggtaacaacaatggtggttcttcttcatctccagttaatcaaaggtttccgtttcactacttgggaaacgacgctaatcttctcaagttcccaaagtag

SEQ ID NO: 162780 - DNA, 2961 bp, Arabidopsis thaliana landsberg
ctcaaagcttccacaaattcatcccaagtttcaaccttttgagtacattcttcaacctttctctttgccacatcatagaggttactctggattttctctagcaagtccttaacttgttcaatcaaatcccctctcttgacatccatcttagctccattgtcacgctgtcactatcctcacctgatcattggccaaatctctaggtccagtttcaattctcaaaggaacacccgttagttcttgatccgcatacttccatccgcaagaatagttgtcgcgtatatctgcttcagcacggattccagccccaagcaaggtggattcaacagcttcacaagcatcacaaagttcttgataatcagcagcgcctttgatgggaacatggattacaacaacttgaacaggtgccactttaggagggaatactaaacctttgtcatctccatgagtcatacacgcggctgtagatgttcaaacatcaagcacctcctcatcagcctcttctttggtagcaaaatcagtgtgtccttcttgccaaaggaactcacggctcctgataaatggggtagggtcgctaaactcccatctaacaacgtaacattagcccactggttaaccttcaaagggaggtccctgtgtcctcttatccaccagctcttgtaacccaagcaacctctggagcaaacccttgagtgtggtctttctccttctcaagagaatcacgtgttacaaacatcgggaaatagtattcatccactttcatcttctcaatctcagcgttgaagaacgttcgtataacgttccaaatattcatcgctgatgcctgatggcttgagaatgtagcatccctttacagactcgtagtattcaaccaattcaccaaatctacaagcctcggaataccacttcccaaaatcttcatctttctttgcagtgattccaagacgagtttctttcaccatctctttcactttcctagaggcttctcgaggaattgcttgacttgtcacacaaccttagagcgtaagccagaaaaataattcagaacaatacaaataaaccccagctattgtgagaagatataataattctttatgggccagtcggtgaatatagttgggcccaaatcatcggatgtggatcttgttttgatttcaacgctttcgtttttttttgtttctgttttccttgattgaggaagcaatctatgcaaagaggtccaaaacactttagcattgaggaagaagaagaagaaagcttcatttttccaggtaataagtcctttgactttcgtcattcacaattgctcatctctatagtttctatgaatgaattgtttgcttacttatacaccatcaagcaggggatacagttgaagcggcatggcaagagtcttcgaatcggattcgggttctggttgttccaatgtactgagtcttgacttaatcagagaatcgttgattaggcaagaagacaccatcgtcttcagcttgatcgagagagctaagtttccactcaattctcctgctttcgaggaatctcgttgtctagattctggaagtttctcttctctcactgagtttttcgtcagagagacagaaatcatccaagctaaggtttgcttcccattttaaaaactgatccttttgctaaaattagatacagagatatcaatgcttcgtttgattcggttttggtatagcattgttttagattgttccatgaaattagcagaaagtaagctacaagtcaacttgattgaggttttaataagcctggattcttgaattagcatgccttttgtttgctatgtgtctcctccattgcaaaagatgataacttggctttgcctgtataatctcattgtgtgataacttcttgttttgatttgagtgcgaatctgccaataaaaggctccgactttatcatatgtatacgagatttccttatgaaaacctcattatatgtggagattggaaatggaggactattgttttctatttttataatgtctgaaagtcttatttcattaatatattcatctcattggtttatattcttaagtttctggatattgagcctatatgtttgttcattggtttacttgaaaaccttatgtgtatgtgtatattatataggtaggaagatatgaatacccggaagagaatcctttcttccttgagaacattcctcactcggtttttcctacgcacaaatatccatcggtatgtatgtagtaaagtcttgagcatttttcttagaactctgaatgctttagtctaacagtacttttcttttctcttgattaggctttgcaccctaaggctctatctgttaacattaacaaacaaatctgggatatttactttaaagaattgcttcctttgtttgtcaaacctggcgatgatggcaactatccatcaactgctgctagtgatctcgcctgtttacaagtaaggagatgattgagtatacataacaaaatcagctctacttttggctaatgatgtctgatctgatatgtttgatcttgtgtaaggctctttcgagaaggattcactacggtaaatttgtagctgaggtcaaattcagagatgctccacaagattacgagcctgcgattcgcgctcaggtaaacttagtgtcacattgtggattctgtttcactgtggttttaaaatgatatgattcacaccataatcgtttgattttcgactgtaggatagagaggctttgatgaagctgttgacgtttgagaaagtagaagaaatggttaagaagagagtgcagaagaaagcagaaacgtttggacaagaagtaaaattcaactctggctatggcgatgagagtaagaagaagtataaagtggatccattgcttgcctctcgcatctacggggaatggcttatccctctcactaagctcgttgaggttgagtatcttctacgtcgtctcgattga

SEQ ID NO: 162781 - DNA, 2582 bp, Arabidopsis thaliana landsberg
  unsure (1)..(2582): unsure at all n locations
atgtttgggcgaggaaaaaagaagcgaaccagtcctaaccttgctcagagagcctccacatccacggctggtcgacgacctcgttctcttccgtcccagtacgatttcacgccggcagcagaacggtcgcctcagctacagacgcctgcatcagaagacgccggtcctcctttacaggcaacggcagctcatgttcggaactatccgccgcctctgcagttgttccagcactctggcagtcgacaacctgaagtgcaaaggtctgcctccgtggaagtgcagaacaatcctgcgaatcaagccgcgtttactcagcaggttcctccggctcctcaacaagaccctccgccttctcagcaagaccctccgccttctgcagttcaagagtctcgggctcacagtcacccatcctctcaaggcaacaacttcgaagaatatccacctctgtcgccggatctccagaaggacacacttcaatccctaaacgatctgcttatgttgccggagagggataagttcgtcactgtcctctctcccattcctcgaccgaatacgacatggtatgatcttcttcttctcatgtttgtgatcccatgttgtgttcaatgttagtttagttgagtaatgagctttgtgagattgattagattgagaaaatgtctgaattgattctttgttgtgtctcgtgttgtgttggtctgaaagtctaaaagtctttgatattatagatgttaaggatgcatctgagaatctattcttttgtttgaagagtcttgttatgtgttttgttcttaggatctaagttaagtattttgttcttagggtttagttgggtaatgatctttgtgagattgattagattgagaaaatgtcactttttttttttttttgtgacgtgttgtgttggtctgaaagtctttgatattatagatgttactttgcagccacaatctattctgttgtttgaagagtcttgttgtgttggtcttattttgttgtttgcgagaacaagtagtttaagttgtgttttgatcttagggtttagttgggtaatgagctttgtgaaattgattagataaagaaaatgtctgaattgtttcttgtntgtcatgaatgcatttgaagagttgtgtgttattggtctttgtttaagtttagttgtagatgattctttatagccacaatatatattttgctagatatgatctgtttgtatgatactttgcagccacaatctatgttttgctagtttaggtctaatatttagatattatctgtcatataacaactgcttgtttttcttgtgtatggagatttacttgggacacaaactcgctacttgttaggaatattactcgagtgtttacaaacaaatttgatggtccctactacagctgaacatgtgtgccacaagtgagacaagagaaatacttcctcgagttttcttttaagtgttctttcagcccttcttatatatatgattacacttcttttttttttttattgacattaccttttgtatttgtagaaaacacaccattgggatcctttgataacatggactattcagtattatttcaatgagatctgtttaaggcgaatgaaaggcatggttagcaccgcaagaactagacgaaagaaaccttaatggattggaaaaaactctatggaaaacaatgactgtgtactgggacactgatgaagctcaagaaagaagtcaaatctattcaaatgcccgtctgtctgaccgtaacggtctcggtccgcacatccacttcttaggccctaaatcgtttcaacagatccaagatgaaatggttagtcactttgtacattcgttcttaatagtttttacactgcagccacattttattctaacttctctaattgtttggttacattacaagaagaggaagtgggtcatcctgtttgtcttggtgatgttttcatcaagacacacacaaaggctgatggttcttttgttgataaaaaggcggagatggttgcaaagaaataccaggagaatgtgctactgaagctgtctgagcttgaggcagaatcttctgctgtttcagatggcacatcaagaacacgggagctcacacccgaagaatatacaaccatcttccttgaggttatgtttcatttctcccaatacttctgctggcttgaatctttttttattttaatctcatctctggttctctattgctttgtagtccaccatgaaagattcaagaggaaatccgtatggagttggaagcctcaaggactcgctggtcaaaggaaagcagaagctagaagactcttcttgttatgttgcattggaagaacaggtgaaggaagctcaacgaaagattgaagaacatgttgcttattctcaaaggcgtgatgctgtgttagctgttcgtgaaactcaggtagctgcgcgtgaagcagagcagaagtgtaggctcgagcacttgtcattggtggagaagtatctcgttcaaacagatccgcacttcctggaattcatggcaagtcaatcatctagagagacaaccacagaccctaacataccatctccatctgcttcatag

SEQ ID NO: 162782 - DNA, 2293 bp, Arabidopsis thaliana landsberg
  unsure (1)..(2293): unsure at all n locations
tgcagagtgaaaggagtgaaagcgagacagattattgatagtagagggaatccgacggtggaggttgatctgattaccgatgatctgtatcgttcggctgttcnnnnnnnnnnnnnnnnnnnnnnnnnnnnagcgcttgagcttagagatggagacaagagcgtctatggtggtaaaggtgtattacaggctattaaaaacatcaatgaacttgtggctccaaaactcattggagttgacgttaggtgagaataagaattcgttcctcaatctaaatgaacatataaacgtcgtgatttggagttggtatgcttagttagatagaaatcttcggagttgttttagctttgtttctctgctctggattactactggtcaatttggtggacttggattcgaatcgtaatgcatgactgttgaatttggaattctagttaaggttattaaggttgtttgttgcatgtagttttaattttgcttcatacttgatactactaagtgttgaagtaggtgtcattgttgaattgttccgtttgtggtttctgattctgaaccgttgggaaactataatcggtgatggatagttgaatgtaatatttttaccttattttctttaaggaaccaagctgatgtcgatgctcttatgctggaactggatgggaccccaaacaagtcgaaactcggggctaatgcgatattaggagtgtcattgagcgtttgcagggcaggtgctggagctaaaggagtgcctttgtacaaacacatccaggaaatatcaggaacaaaggagcttgtcatgccagttcctgcattcaatgtgatcaatggaggcagtcatgctgggaatagtttggctatgcaagagtttatgatactacctgtaggagctacctcattctcggaggccttccagatgggaagtgaaggtcagttagtgataactgggtttaacttgctagaacttaagaaactatggcggctcctaatttttcttgagtttgcaatgaaatgtcagaaaaacagaaaagccttgataagcagcttcctgtttcatatttctcttttggttccaaagttcttctattctttggattatcacaaagaattgtttttctgatagtaatgcatttaatgtactttgttgattacagtttatcatacattgaaggggataatcaaaactaagtatggtcaagatgcttgtaatgtcggagatgaaggagggtttgcgccgaatgttcaagataacagagagggactagttctgctcatagatgcaattgaaaaggccggttacactggaaaggtaatcaagttctctttctttttaatgctaatactttctaaagttgcatgtcatctgtgtttccctaaacaacttctggcagcttcggtgtcaatcttacaccactcacataatatataatttttgcagatcaaaataggaatggatgttgctgcatcagaatttttcatgaaagatggtagatacgatttgaacttcaagaaacagccaaacgatggagctcacgtactgtcagccgagagtcttgctaacctctacagagaattcatcaaggatttcccaattgtctctatcgaagatccttttgaccaggatgattggagctcatgggcttcattgcaatcctctgtggatatccaactcgtgggagatgacttgttagtcactaacccgaagaggatagctgaagctattaagaaacagtcttgcaatgctctactcttgaaggtaaaaataaaagtttttatattattttctcttttctaatctcaattctctagaccattttgacaaaacccccgttattggagaagaatttcaatttgtttgtaattcatggtttcacaggttaaccagattgggacagtcactgagtcaattcaagcagcacttgactcaaaagctgcaggctggggtgtgatggttagtcacaggagtggcgagacagaggataacttcatcgcagatctctctgttggtttagcaagcggacaggtacatcaaatcctctaaacctgtctgtattactctctagtgtttgcttatcattctctgttttgtagatcaaaactggtgctccatgccgaagtgaacgattgtcaaaatacaaccaggtagttaactaatatccaacttatgcttaatactatactctatagaccacatatctgaacccttgagtttgatttatttccattgcagcttctccgtatcgaagaggaactcggcaatgtgcgctacgccggtgaagctttccgatcaccatga

SEQ ID NO: 162783 - DNA, 1642 bp, Arabidopsis thaliana landsberg
atggatacaatggaactaagacaatgccctgctcataattctcctttaaaatatacacgaatctcatcaaaatgcgatgcttgctacggagatcactatgacaacaagcaaggctacaagtgtaatttctgcgagttttgtttccatgaggactgcgtcaacgtcaagattcctgctcgtcataaacaccctctcaatctcatcaaagtgcatgaccaggtgttatgttgtctttgagaaaccaatagaattcctcaaatactttatcaatgttcaaaatgttcttttcgtatatgtatcccttgtgcgagaaaacctctgatctttgaacaaactaaggcccatgaacataaactccttcaagtaccgatgaaactccccttcacttgtcatgcatgtgggttgtgtagtgcagaatacccgtgtctttgtcttcaatgttgtttcataatccaccgagcttgcatcttcttaccacgtgttataaaaatcaaccgccacgaccatcgtatttctcatgtttcttctcttggtcctgggaagtggatttgtagggtatgttatgagcatgttaatggagagtacggagcatattcttgctttgtttgttcttatgtctttcattcaaaatgtgctacaacatgtttaaccatttgggataggagagaacttgaaggagtacccgaagaagatgaaaaagacgaaagcaaaccgttcatagtgatagatcaaaacctaataaaacattttagccatgaacacaatctcaagagttcattatcatcatcaaggctcgaggaaccaagagaacattgctatgcatgcacccttcctttttatgctgaattgtgctacaaatgtacacaatgtgattttattcatgatgcatgcgctaatctccctctcaagaaaagacaccagataagcctacaaatacttactttatgtgacaaaggtcagtttggcatagactttgcaaacttgtttatttgttttgcttgtggacgttattgcaccggtttctcgtatattaagaagtattttcacctttacatcacaattgatgtgcggtgtgcttcaatttctgatgcatttaaacatgaaagtcatccacattggttatttgtaattctggtagacgagagagccggaacaaagtgtgaaggttgtgacttggctcttatgtttcttctacgttgcaagggaaaagatgattgtggtggctacaatttatgtttcacatgcgctactttacccacattggtaagacatagatatgatgatcatcctctctcattatgctatggtgaaaaaaatttgaatgtgacatattgttgcgggatatgcgaagaggaagtatatgcaaagaattggttttacaaatgcaacgattgtagctccactcttcatactaaatgtgtaattaagaatctaatacactcaagaataggagacattttagtgttgggtgacaaggggtcatttgatttgcttccgaataatcgtctctctcggccgatttgctatttatgtaagactcgttctacgggtgatttagtgctaaacgataaggcgaatacaaatatattcatatgctgtttttgtggcttttctaagagttttcttgggaagcccagattct

SEQ ID NO: 162784 - DNA, 1214 bp, Arabidopsis thaliana landsberg
aaaatggttatgtttatgtcaaaacttgaaaccatgtttatgcttgatacttgggtctttttggctctgctttatatgtgtcttctttcctctatgtgtttttctgcttgattctgctggattatgaatatctttcttctgcttgcttctacttgaaaccagggataagtgattgcagatggctgagcgattattacaatctatgtcaagggtggctggccgatgtcatccagattgcgtaaaagcaagtgatgagcaagaagattaccgtaaattctcaaatccttttgaattgactcgttttcatatgaataggttcagtatatgaattgactacaacattttcatcttttgttgttgttgtttggcagatgcatctcaaaatgcagctttggtagctgtgaatctgattagctctgcaaggttaatactgaaactcgacgctgagtttactgagtactcagctcagtttttgatggacaatgctggaaaggaagacgacccgggagaagtggatcaacaacgcaatcaggtcacgaccgaaaactgccttcgctacttggccgaaaacgtttggaccaagaaggaaaatgggcagggaggaatggatcaacaacgccctgtgctcactgtcaaagactgcttggaacttgcttttaaaaaagggctgccgagaagagaacactgggcacatttgggatgtaccttcaaggctcccccatttgcttgtcagatacctcgcgttcctgtgaaaggagaagtggttgaggttaagacttttgatgaagcattcaagctgttggtgcatcaacccattggagcaaaactgcatttgttcagtccgcagattgataatgttggagaggtaaagtgttggtaagttaaatttcaaaatcttaagagattagtgacaaagttttgttctaatcttgttcatctttttttatgtgtgatagggagtttacaaaggcctcacgacaggtaatgaaacacactatgttggacttagagatgtgctaatagcttcagtgcaggagttcgagggagatactgttgctattgtgaagatctgctacaagaagaagctttcatttatcaaagtgtctttgagcgttaggtttctctcagtagcacatgatggtgatgagtctaagctcatagcgccaacaggtctgcttgttgacttctgtgtcccgcgcttatctatcaactaa

SEQ ID NO: 162785 - DNA, 1821 bp, Arabidopsis thaliana landsberg
atgggtgttgttagcatgaagggtggagatggagaacacagttatgcaaataattccgaggcgcaggtatgtacttctctataacatatctatgaaccataattaagcttcggcaattatatattgcatatcaataattcactatactattagatgatctgaatgataatttctctgatctatatttagtagataatgtcccacgctactttaaattatatttttacattttctggttgaaaatgataatatattcaatctatattttggttagatcaagagtcgagttttttttatcgagtttttggtttacaaataataatttttaatttaaagtaaatatagttgtataatagaattctcaaaatttattaaatatgatagtgctcatttcattagtggaattcttacacataatattaaaattgaattgtcaaatgatattatttaccaaaatgttgtttgatattaaaaataatgaaaatttgtttttgtttaattttattgataaactagtatgttttggttataaagatggaggagaaattaatctagatttttttttttttttttctggtatcaaatgtgtgtgtgtgttttttgtttctttcttttgttgattcaaagagcttgaatcaacaaatgttaaaaagtgtgataaaatttcgctttttaacttcttagaaaagtattacttctgatgcaaaaccggaggtgatgaaaagcgtaaacgaaatgatagtgaaaatggattttcctggttgcatcaaagtggctgacttgggatgctcttccggagaaaatacattcttggttatgtccgaaatcgttaacacaatcattacaacataccaacaaaatggtcaaaatctaccggagatcgattgttgcctgaacgatcttccagacaacgacttcaacacaactttcaagttgatcccttccttccacgagaagctgaagatgaatgttaaaggaaattgctatgtctcaggatgcccaggctcattctacacaaggcttttcccaagcaaatctcttcattttgtccattcatctttttgtctccattggctttctaaagttcctgatgggcttgaggaaaataagaagaacgtgtatcttagaagtccatgccctccaaatttgtacgagagttattggaatcagtttaagaaagatttctcaatgtttctaagaatgcgtgcggaagagacaatgcctagtggacgcatggctctcactttagttggcagaaaaactttggaccctttatccaaagagtgtttcaaagattggtcgttggtttctgattccctcctcgatttggtgtctgaggtacttactacagtcacacttctttatttttttggtaacctaaaagttctgatcgtagttataataatatactggaggagtattttgagtgtgcagggagttgtgaaggaatcagatttggaatctttcaacttgccgtattacagtcctgatgaaagtgaggtgaaggaagttatcgagaacgagggctcattcgagatcaaaaattttgagacaatatttggacttctcttttcatacaaaactggtcatagtgaagtgaaagatgatgatgatgatgtggaccattcacgtcgatttgaagtggttaaaacgagggctaatatgacaagatccatcattgaaccgatgcttgttgctcattttggagaagccattattgatcggctctttgacaagtatatatatcatgcatgtcaacgttacgataccttgcgcaacaaaccaaccgttaatttctttgtttcgttgactaggaagtga

SEQ ID NO: 162786 - DNA, 3167 bp, Arabidopsis thaliana landsberg
ccgagaacgaagtttttgagatctacgaggaatgtaaagagaaagctaagaaatttttcaagggttttcaaggacaattaaacctctcttatgaatggatgcttcttggtaatggctggggggctagggaccacataagaggccctgttttgcatgaggatttcgtctgtttgactgctcatttcgtcgatgataactggaagatgaagaaaaggatcttggcctacactaacactactgacccggaaatacctatggatgatggttatgtttaccctttcaggaacgctgttcaggatttcgagattgagaacaaggtctctactcttctactgcctaacagtgaggattttgatgaagaaacgttggatcctttcaggaaatggatagaggagatagggaacaatcagttcaatccacgggtttctctagtctattgttgctctgatcttttccggttaatggttgatgatgtgttgagtgaattaagctcgtcgctgctggaagatgtgcgtatgttggttggatggggaagatgttcagcatccacctggaacgtctcgttgtttcatctgcaacaagctgttgtcttgaagtctgaggatgcattctcaaaggatgagatttacgatgattatgacaaaccatctgatgaagattggattaagattcaaactttttgcaaactcactgattgcatctataaagtagcaaaggagcttttcgaaggagagtattccacatctaacgtctacttccaccttcttgctgagctgaaggtaatgttgaatcaagagcttgcgagtgctgatagtgattactttctctgcaaagctaagcagatattggagaggtttgataagtattggaacaatatgtttctggttttggctactgcttctgtattggaccctcggtttaagatgagttatcttgagttttactgctcaaagaaggaagtcaatgttgaaggttcaaaagctgcaactgttttggactatttacgcaatctgtatgctcgctatgcagctagcgatatctgtccactaccaaaacgtccggatgcttcgatgaacccaaattccagtggtttgtttaagtttctgtttgacgaagaagatgaagatgaagaagaagaggagaaggagaagaagcctgatggatacaaggattttgttttgtttcaagaatttctcaagtatgaaggatcttcaagggagtttcaagaatcagaacttgattcttatctcaaggaaccagttatggagtggaaaaaggacttcaatgcattggaatggtggagagaagagaactcaaagtacccgatcctctccggagtagctcgtgacattctctccattccaatcactcgtggaacatcgcaccgtgcttatgttgctgacaagagagagtgtcctgattttatcgtctccatggaggccaaacttgtgaacgccatgatgtgcagcgagagctggccacgattttgatatgggaaaatatggtaagaatattaaatgctatggcttttgtgaaaactcagtaactcaaaagttctcagttccttccaaactatgtttctggtcaccaaagtaatggttcgaacctgagtttcatgttgtgtgtccttgatcttttattgagaagtagtgtatgttttaatcctctactgtatgctttatctaatttctctatcctacgtttcaaagactattttgatagattgaccagcaagaacttgatggattgcaggattggtaacctttaaaatcatgttaacttatgatctgacaggagaaaacaccacataatgaaactatgttgggctaaaagtaacaaaagcccaataagaaacagtaatagtatcttcttaatctccatttgccgtatttcttcctctagagactgagatcagaaatcacgagaaaatgacgacgatttccgatcttccatacgatttgttaccggagatactctctagacttccgaccaagtctataccgaaactgaaaaccacttgcaaaaaatggtacgctttgttcaaagatccgaaattcgtcgagaagaagttgggtaaagcagcaagggagacggtgtttctgatgaatcatgaggttaattcgattagcgtagatatccatggaattccaaaaggctattcggcatccatggattttacaggtacactcaccatacccgaaggttcagatttggaaatatttcgaatccatcactgcaacggtttgttcttatgcgccacaatgaactgtagactcgtagtttggaacccctgtaccggtcaaatcacatggatcatacctagaactcgttacgatagtgatgatatatatgctctaggatgtggtgacgacaaatcatcttctttacatagctacaaaatcttgaggtgttgcgatgacaatcagaaaaaaccagtgtctgaaatctatgattttagttctagttcatggagggttcttgatggcgtcactgcaaattgtttcatagaatgtaatggcgtggctttgaaggaaagtgcttactggtatgcttcagataaaagagaaactcccaagggtaaattcatactcaggtttgattatgcaacggagagatttgcacgtctatgtcttccccttaattttcagagggatcgtgataataagagtgtggttgtgtctgttgttggagaagagaagcttgctatgttgcagcagttcgaccatagggttcatggtttgaaatattctaagataaaaatatgggtgaccgatactaagatcggtgagggcaaagacttgtcgtggatcaacatcttagtagaggatcttgctggcgatataaacaaagtgaacgagtttcctgttgagaagaggagaaaaaagtggcagtgtgttctgacgcattgtgttcttatacagacacggaagatgaagataggagaagaatctacattgttggagaaggtgtagatgaattcgtctatgatgaagtttcaacggaaacatcacacaattggccatttctcgtcagttatgttccaaatctggttcacattgagaaagatgcacccatagtcgaagtgtaaaggaaaaggaaacggcaaaaggttagtcaaatgaattgccttagcttttatcttgctttttctttcggtcatgttcctt

SEQ ID NO: 162787 - DNA, 1703 bp, Arabidopsis thaliana landsberg
aaaaaaatattattgttattgatggtctctgactctagatgttgtttttttttttatctcatgcaggtatgtagaaaatgaactggctagtgacattagtgtcgttgttgagggatcaagattttgtctgcataaggtatgtaaaatttgtctccaagttcttatgcacatctgtttacttgggattcgatcactcgtggtgcatctggcaatcgtagtgtctagttacgcggatataagactttgcttggtcatacatcagttttgcaagcatcaaatttagatgtatgagttttgcttgagacatgatgattcttgttttatcctctgcagtttcctcttctttcaaaatgtgcatgcctgcaaaagttgctctcaagcacggacaggaacaataccgatgatatcgatatctctggtattcccggtggtccaaccgcattcgagacatgtgccaaattctgttacggtatgacagtaacactaagtgcctacaacgttgtggctaccagatgtgcagctgagtatctaggaatgcatgagactgtcgaaaaaggtaatctcatctacaagattgatgtgttcctaagctcaagtctcttccgtagctggaaagactccatcattgttcttcagacctcagagggtctcttgtctgatgactcagaggagctcgtgaagcgttgtctcggctctattgcttctattggttcgatagactcctcgaaagtcaaatggtcttatacttacaacaggaagaagaagcttgagaaagtgagaaaaccagaagatggtgttccaaaagactggtgggtggaagatttatgcgagcttcacatcgatttgtataaacaagccatcaaagcaatcaagaaccgaggtaaagtcccgagtaacgttattggagaagcattacatgcttatgcaataagaataatagctggttttagcaaagagtccatgcaactcattgatagatctttgattaatacaatcatagagcttctcccggatgagaaaggaaacatttcctctagcttcttgaccaagctacatcgagcatcgatctttcttggatgtgaagaaaccgtgaaagaaaagttaaagaaaagagtcagcgagcagcttgaagagacaacagtgaatgatatcttaatgtatgatttggatatggtgcagagcctagtgaaggagtttatgaaccgtgatccgaaaactcactcgaaagtatccgtggcaaagctcattgatggatacttagctgagaaatcaagagatcctaatctccctcttcagaacttcctctctctcgctgagacactctctagcttcccaagacactctcacgacgtgttatatcgcgcaattgacatgtttctaaaggtaaaacaagattcaaatcctctgtttttcataacgtttcttgatttgttaataatttggaaaattttcaggaacattcggggattagcaagagcgagaagaagagagtatgcgggctaatggattgtaggaaactatccgcggaagcgtgtgaacatgcggtacagaacgaacgtttgccaatgcgggtgattgtgcaagttctcttctttgaacagattagagccaatggttcatcaacaggatatagcactcctgagcttaccactactactctaaacactgaggatgatgaatgggaccatgagaaagagttttga

SEQ ID NO: 162788 - DNA, 1156 bp, Arabidopsis thaliana landsberg
atggaagaagttgaagctgcaaacaaagcagcagtggaaagttgtcatggagtattaaatctcttatcacaacaaaccaatgattccaaatcaataatggttgaaacaagagaagctgtttgcaagttcaagagagtctcctctcttttgtctagagggttaggtcaaaggaagataaagaaactcaacaacaacaactacaagtttagctcttctttgttgccacaacacatgttttttgagagtcctgtttgcagtaataatgctataagtggttgtattccaattctagcaccaaagcctcttcagattgtaccagctggtcctcctccattgatgttgtttaaccagaaaatgtgtcttgataagtcgtttctcgagctgaagccaccctcttcacgagctgttgatccaaaaccttatcagtttattcatacccatcagcaaggagtgtactcaaggagcaaaagtggtttgaatctaaagtttgatgggtctattggtgctagttgttattcaccaagtatatcaaatgggtcaagatcgtttgtttcatctcttagtatggatggtagtgtgacggattacgatagaaagtcttttcatttgattggattacctcaaggttccgatcatatatcgcaacattctaggaggactagttgctctggtagtttaaaatgtggaagtaaaagcaaatgccattgttccaagaaaaggttggttttgttcttccttgagaaaaaagtgttctaagagtttgtttatttcaatgttttggtgtttttttacaggaaattaagggtgaaacgaacgattaaagtaccggcaatcagtaacaagattgcggatatacctccggatgaatattcatggaggaaatacggacaaaagccgataaagggttctcctcatcctaggtaaaataacattacaagaatagtaaaacaatggacttgttctcatgtttggattataatttggttcttatttttgttgtttgcaggggatactataaatgtagcagtgtgcgcggttgtccagcgaggaagcatgttgagcgatgtgtagaagaaaacttcggatgctttatttgtgtacttatgaaggcgagcataaccattcacgaatactctcttctcattcagctcatacc

SEQ ID NO: 162789 - DNA, 1232 bp, Arabidopsis thaliana landsberg
atggattcgatcaacagttttgaatcggaagcaacaaagagttttttgaagccccgatctgaggcatgtttgatagcgaggcgaatagcaagggcttcggccataatcggtgatcgggtgtgcgtcgcaattgaagagatctgtcgattaaagcccgtagatcggtttgagaagatacaacccatccttgcatatttggcatgtaatgaggtcgagatcaggtgctttgctcggtcccaaggaacgttttgtgactacttgtttggactgaagttgagcagattgccattcatgtgctaacatgatagcttgtgtaaggatttcgcgagggttgtcgtggggattttcaaagatttgctgattgcgagccatctataatttccagagaatccaaggatgaagagggcctgaaccaatttcggatggtggtaggtgataagtgtgcattttacatgttttgagcatccatttgttatcactattgcatcatatcaccactgttttataccatttctcatcatttgtcatcactttgcatgtttaggatagttttgcatgcatgttgtatatttgtgttgttttcaggtgatttggagctgttggcgagctaattgaaagaagcggatatgatcatatcaaaccacttgacgccctgttcgagtagatggcttcacgatttcaagacaacactcgaccccctggtcgagtagatggcctcatcacatcacaccaccactcgaccccatggtcgagtatcttcatctccaccacctgaccatcactcgatcacaccactcgaccccttggtcgagtacctccatcacacccactcgatcactcacttgattacatggccgagtcccaccatcatcacacactcaaccgatcactctaccaccaagccgagtaccaccatctccatcactcgacttcatactcgacttcatactcgactgccagcttcactgttttctccattccgcactcaaccagacactcgagcacaaggaagagaagaacactccagcttatcactcgactacctgggtcgagtaccgttcttaatccgtctcaatacttcgtcgttttgagtattagggtttcagaatattttgctataagtagcatgtattttacatttttgtgacctaagttttattccgcatacactgtgttcttgacattttgtaatccagatttctcttaatctattcagtattcagtatttgctt

SEQ ID NO: 162790 - DNA, 1297 bp, Arabidopsis thaliana landsberg
attttaatgaagatcataaacccttaaaccctcattttaatgaagaatcataaacccttaaaccctcattttgatagtcgtctcagtgcaaaatccatttgctttttccaattccttctcttctactagtgctaaagatggtctaaaaggtcagattttcactatctcttacctcattgattcattgggattaaccgaaaaactcgctgaatccatctcgaggaaagtaagcttcgatgaaaggagaaatcctgattctgttctgaatctttttagaagttatggtttcacagattctcagatctcaagtatcattacaaattatccacggttgcttatagtagatgctaagaaatcacttggtcccaagcttcaggttttgcagtctagaggagcttcaagctctgagctcactgagactgtttctaccgttcctaaaatcttgggaaaaaaagggcacaaaactatcagcgtatactatgatttcatcaaagacactttgcttgagaagagttccaagaacgaaaagttatgtcattctttgccacagggtaatctggagaacaagatcagaaatgtatcggttttaagagaattgggaatgcctcacaagttgttattctccttgctcatctccgatagccaacctgtatgtggaaaagaaaaatttgaagaaaccctcaagaaagttgttgagatgggttttgatcctaccacctcaaagtttgtcgaagctctacaagttatttacaaaatgaacgagaaaacaatcgaagaaaaagtccatctctataaaagcttaggctttgatgtgggagatgtatggtcaagttttaaaaagtggccaatctcgctgagagtatcggagaagaagatgttgaactccattgaaacatttctaggcctaggatttagcagagatgagtttgcaatgatagccaagcgctttcctcaatgccttattttatctgcagagacggtgaagaaaaagactgagtttctggtgaagaagatgaattggccactaaaggcagtggtttcaacccctgcggtacttggatacagcctggagaagaggactatcccaaggtgtaatgtaattaaagccctcatgtccaaaggattgctcgaaagtgaactccctccaatatcctctgttttgacaagtactagtgagtcgtttttatatatgtatgttagcaaacatgatgacaagcagcttgtggctgagttgatggctatcttcaccggagatcgtgtttcactcaccgatcagaagacacgcctagaacaatga

SEQ ID NO: 162791 - DNA, 2290 bp, Arabidopsis thaliana landsberg
atgtggaaacagattctaagtaagcttcccaacaaaaagtcttcaaagcacgaacatcgtggacgtgaacacggtggccattcttcttcatcttctcatacttcaggtgcctctacttccaaaagcactgataataatggcgccgcgaaatcgcatgctaagaacgcttctccagccggcaaatccgctgcttctgactcgggttttaaagatgggaatctaaagactagtgggaacaacaacaacaacaacaacaacggagtctttactccttatgaagcattgccgagttttaaagatgttccaaacacggaaaagcaaaacttgttcattaaaaagttgaacttgtgccgtgtagtgtttgatttcacggatcctacaaagaacatcaaggaaaaagatattaagaggcagacattgctggagcttgtggattatgtgaattctcctaatggaaagtttagcgaagtgggtatccaagaagtcgttcggatggtctctgctaacatatttagaacgctaaatcctcaaccacgggaaaataaagttatcgatgccttagacctggaggaggaagaaccttccatggatcttgcgtggcctcacttgcagcttgtctatgagcttttcttgaggtttgttgcttcgcctgaaactgacaccaagctggctaagagatatatagatcaatcttttgtcttgcggttactggatttatttgattccgaggatcctagagaaagagattgcctgaaaaccattctccatcggatctatggtaaatttatggtacaccgacctttcatcaggaaatccattaacaacatcttctataggtttgttttcgaaacagagaaacataatgggattgctgagtttctagaaatcttgggaagtatcatcaatggatttgctcttcccttgaaagacgagcacaaagtgtttcttgttcgagttttgatacctctccacaaaccaaaatgcttgcaaatgtatcatcaacaattgtcttattgtatcacacagtttgtggaaaaggattgcaaacttgctgatacggttataagaggattgttgaaatattggcccgtgacaaacagttccaaagaagtcatgtttctgaacgagttggaggaagtactcgaagcaactcagccaccagaatttcaacggtgcatggtaccactgtttcgccaaatagctcgatgtttgaacagtctgcattttcaggtacctgtcattctccattctttctgaaataatagcacctcacatttgtttttaaactggcgaatgtccccgtgctttgacatttcctgaaaaatgctctgttgctgttagtgttggggttgacatttgcaggccatatcgtttcgacatactttaactgcattagtgtttcacctgtgtatgttagcctattagattgttatataaaaagatcaaatggaagagttgggtttgtggtaatgaaagtatctatgtataggacttgtattctgttctggataatacctgatgcagtttcttagctaaataaggcttatggttacatactttaattgtgttagtgtttcgccagtatatctgtgttaccttaccagcttatgagaagtcgttatagcctaccagttatatcaaatgagcaaatggaagagttgattttgcggtatggaaagtatcaagtttaggactgttgtattcagctctagatgttactcaaggcaatttctaagttaaattgatatattaaggctattgttaagtagaaagttacaaaagaagaaaaagtattgcgttgaagggtatctgttttgactaaacagtgactgcatacgatctttcacgggaaaagatcagtctagtaggttcaggatctttgtttcagtctattcatgctctgtctggttttcgcaggttgcagagagagctttattcttatggaacaccaatcacattgagaatctgataatgcaaaaccgtaaagtcattcttccaattatattcccagcgttggagagaaacgcacagaaacattggaaccaagctgttcatagcttgacactaaacgtgcgaaagatatttcatgaccttgaccctgagttatttaaagaatgcctcgcaaagttcaaggaagatgaatcaaaagcagctgaaaccgaagcaaaacgtgaagccacttggaaacgtttggaagaactcggagtgcgaaaggcttcataaagttagagttgtagagaagaaagagagagaaaaagagcttctgtatcttctattgacatgttgttct

SEQ ID NO: 162792 - DNA, 1172 bp, Arabidopsis thaliana landsberg
atgacggggagatactgcgaccaacacaacggctatgaggagaggaggatgagacgcatagcatgggcatgtcttggcttaatcgtggcggttgcgttcgtggtgttcttggtgtgggctatacttcacccgcacggaccgcgttttgtcctccaagacgtaaccattaacgacttcaacgtttctcagccaaatttcctctcttcaaatctccaggtcactgtatcttctcgcaatccaaacgacaagatcggcattttttatgatcgtctcgacatctacgtcacataccggaaccaagaggtagcgttttgcgttttaatgcaattttcttttgtattatttggtgcaatgtgtatggatcagcaaattttagtatgttgtaacgttaaacccacaaaatatcacccatccttacctatgtctacgaatatttaagaatcaattcgaattcacaatttgttttgggttaaattttatactattagtcatcattctgcagtattcataattgacaaatctgcaatgttgaaaaaccaatacaaccatatgcatatttgtgtaccacttgcagaattatttttcttcttttcttcttcttggaatgtcattctgtattcacgaataattatagaacatttacatgaatacttactgtttaaggaaatagaaatttggcaagctattaaagttgaatgaaatacaagagaaaataaagtcttttataatatgttcatatttactaaaatgttttaagtcttttcaaacatttttttgttttttttttgtttttatcttctaagcatttacgtgttaatgtaataattctaactttagttttccctattatttaggtaacgttggcgaggctcttgccgtcaacgtatcaaggacatctggaagtaacggtgtggtcaccatttctgattggctccgccgtgccggtggctccttacctatcttcggcattgaacgaagacttattcgccgggttggtgcttctcaacatcaaaatagacggttgggttaggtggaaagtgggctcgtgggtctctggcagttatcgcctccacgttaactgtcctgcgttcattaccgtcaccggaaagttaaccggcaccggtccggcgatcaagtaccagcttgttcagcgatgtgctgttgacgtatga

SEQ ID NO: 162793 - DNA, 3536 bp, Arabidopsis thaliana landsberg
atgtctaatttgtatggagattataaccaaaagatcgattacgtcttcaaagtcgtgttgatcggtgattctgccgttggcaaaactcagcttcttgctcggttcgctaggaatgagtttagcgtcgattctaaagccaccattggtgttgaattccagactaaaacgctcgtcattgataacaaaaccgtcaaagctcagatttgggatactgctggccaagaaaggttttgcttttttcttcttcattcattagaagtaatgacaccatgaatatcatttggtatatatcagagaacgttcacaattcatccatttgattgatttatgtcttagcagctagagatgtcattgaattaggcaacacatgttccaatataagtagatatgtatgaacaatgggttgggatctttgatgggcaaatgggcaacatgaatatgtgatgtttgatcatcactttgtttaaggctcttacgtttatcaaagtgtttctttggcagatatagggcggtgacaagtgcatactaccgtggagcagttggggcaatgttggtctacgacatgaccaaacgtcaatcattcgatcacatggctaaatggctggaagagttacgaggacatgcggacaagaacatagtgattatgctaattgggaacaaatgtgatcttggaagcctaagagcagtgccaacagaagacgcacaagagtttgcacaaagagaaaacttgtttttcatggaaacctctgctcttgaagctaccaatgttgaaacagcatttttgtcctgcggacaatagatagatagaattcatccctgaagacaaggaggatatgatggataatgaagtgctcgacttcgatattggtgtaggagttagtagtggcggagatgttgatgacgacgctattgatattgagcaccatgctctcgacgacgatgatatgctcgacagcccaattatgccttgcggtaatggtcttgttggcaattctggaaattactttcccaaccaggaggaggaggcttgtgatctcctggatctcgagccctatgatggtcttgaattcgagtccgaagaagctgccaaggcattctacaactcgtatgcccgtcgcattggctttagtacccgtgtcagttcctgccgccgatcccgccgtgatggagctatcatccagaggcaatttgtctgtgccaaagaaggtttcagaaatatgaatgaaaagcgcaccaaggacagggagatcaagcgtcccaggaccatcactcgagtcggttgcaaagcctccctctctgttaagatgcaggattccggtaaatggcttgtctctggctttgtcaaagaccacaaccatgagcttgttcctcccgaccaagttcactgtctgcgttcccacaggcaaatctctggccctgccaagactttgattgacacacttcaagctgcaggaatgggtccccgcagaatcatgtccgccctcatcaaagagtatggtggcatcagcaaggttggtttcaccgaagtggactgtaggaattatatgaggaacaaccgccagaagagcatagaaggagagattcagcttcttcttgactacttgaggcagatgaatgctgacaacccaaacttcttttattctgttcagggaagcgaagatcagtctgttggtaatgtcttctgggctgatcctaaagctataatggatttcactcactttggagacaccgttacatttgatacaacctacaggtccaacaggtaccgtttgcctttcgcacccttcactggtgtaaatcaccatggccaacccattcttttcggctgtgcctttatcatcaatgaaactgaggcttcatttgtatggcttttcaatacgtggctagccgcaatgtccgcccaccctcctgtctcaatcaccaccgatcatgatgctgttatacgtgcagccatcatgcacgtttttcctggtgcccgccatcgcttttgcaaatggcatattttaaagaaatgtcaggagaagctgtcgcatgtcttcctcaagcatccttcgtttgagtcagatttccacaaatgtgtcaatctgacagagtcggttgaggattttgagacatgctggttttcacttcttgacaagtatgagctaagagatcatgagtggctacaagcaatatactccgatcgccggcagtgggtcccagtatatctccgtgataccttttttgccgacatgtccttaactcatcgtagtgatagtatcaattcatattttgatggttatataaacgcttcaaccaatctaagccagttctttaagctgtatgaaaaagctttggagagtcgtctcgagaaagaagttaaagcagattatgacacaatgaactcacctcctgttctgaagactccatctccaatggagaagcaggcgtctgaactttacacaaggaagttgtttatgagatttcaggaagaactagttggaaccctgactttcatggcatccaaagctgacgatgatggggatcttgttacctaccaggttgcgaaatatggagaggctcacaaggctcatttcgttaagttcaacgttttggagatgagagcaaattgcagttgccagatgtttgagttctctggcatcatttgcagacatatattggcagtcttccgggtcaccaatctccttacacttccaccttactacatcctaaaaagatggaccagaaatgccaaaagcagggttatatttgatgattataatttgcatgcgtatgctaattacctggagtctcataccgtccgatacaacaccttacgtcacaaagcttctaattttgtgcaagaagctggaaaatctctgtatacttgtgatgtcgcagttgttgctctgcaagaagctgccaagactgtgtccctggcaatgaataaggaagttagaagaactatggcgaacaggcattttaaagcgagttctggaactggtggaaaacatcagcaagaagtgctggcgcaacctgagcccgaggtgaggatcattttcttttcgatacttgttttctttttgatataatagcaatcaaatttgttgctctaaaaaatagttatatacgtttgaagtatcgtttgtgcgggtttgccccatacaatacaatcattgctttgtctccttgacggtaccataatgctgattgctctgttaacgtttaactaatgagctcgtgattcacatatgcatgttaagagtatggtcttcattttgccattgtgagcctttgttccgtacaatctgcaaggtcctcaattttgctatgtgcttttactgctgactaattgcatgaccgtatttcctctactttcgcaggacgaaatggacaagaagattaatcagctcagaaacgagctggaattagcaaacaggaaatgcgaagcttacaggactaacctactttcagttttgaaagaaatggaagaccaaaagttacaagtgtccatcaaagtgcagaacatcaaaattagcttgaaggataatctgtga

SEQ ID NO: 162794 - DNA, 1555 bp, Arabidopsis thaliana landsberg
tcgatcatgagaagacgcagcaaaaagatcaaaaccgagaacaacagcaatccagaaacgtcggaagagagaaacaagtttgatgaaatccctcatgacctagtgatcgagatacttgaaagattgcctttgaaatctgtagccaggtttctcacagtatccaagttatgggcaacaactatacgcagtccagatttcagaaaatcttaccggggtggatcttcgtcggagcctcgtaccctaatcgtttccgacctaaattttaaggaaccaaacccaaagttgcatttcttcaggccgtctatatcatcaccgtcttttctatcaagtctgacatgtccgttcacatatcctcggcacgaagagtactattatcatcatgttaatggattgataagcgttggatatggtacagaccaaatcgtaattaaccccacgactggaaaattcataactttaccaagacccaaaacaaggagaaagctcgtaataagttttttcgggtatgattcagtgagtgatcaatacaaagtgttgtgcatgacggaaagactgcgtggccatccagaagaagcatcatctcaacatcaagtgtacacattgggagctaaacagaaatcatggaaaatgattaattgtagcatccctcaccgtccttggtcgtggaacgccgtgtgcataaatggtgttgtgtattacattgctaaaacgggggagggtatgtttcgtcggtgcttaatgagatttgatttgaagtctgacaatttggatctttgcactattttacctgaagagattcaaacaagtctacatgattactttttgatcaactacaaggggaaagtagccatacccaatcaacctaatttctatacatatgatgtgtgggttatgaatcaggaaggtggaaaaattgaatggttgaagaatataactttcactattaaacctcggaagggttttgttcgttatctattcgtcacaggcactactcatacgggtgagtttattttggcaccaacgtcctataccgatgagttttatgtcttccattacaatcccgacatgaatagttttagaaagataagggttcaagcacccggagttaagtttagttttgctcagaaagcttcagttgttttttcggatcacgtagagagtgtttggttgttgtaggagagacatggttttgatacccataatcatcagtatcgaaccttggaagagtttattggcgtttggataatttacacattagaggctctactcatacggctacaggtgagtttattttggcaccacggttctattctaatagcttttatgttatctattacaatcccgacacgaaaagtttaagaaaaaccaaggttgaagtaaacggaggctatgacttcagtttaagaaaaaccaaggttgaagtacacacggaggctatgacttcaagcatcgggaaacaaaagcaatggtttttccggattatgtagagactgttcggatgttgtaggaaacacagtttcatgctttggtaacaaagactgatccatatggtaag

SEQ ID NO: 162795 - DNA, 1003 bp, Arabidopsis thaliana landsberg
atcttcaaaaagatggcgatcgttagccctaatttctgtgcaccgtaccctatcgagttgggaatcgtacggaaggtgatgactttaaccgatggtaacttcgccgtcacggacgttaacggcaatctccttttcaaagtcaaggaacctttgtttagcatcagcgacaaaaggattttattggacgcatacgatactccaatcttgactttgagagaaaatgtaagtatacgtctatcaactacaattctttataacttgcatggagaggcacaattttttcatggtgatacaaaaaaaaaatttcattatgcaaatcatatatacacaaacatgctcttataacttgcatggaggtacactttttcaatacgtctatcaactaattgtaaataatatcaaaatcatcatcactcattcgagtatgttaaatcgtcatagatcatccaataaaatctgatccacaacttttttttcttataacataaaaattgtagaaggtgagcttgcatgataggtggctagtatatagagggaagagtacagaccaaagtgatctattatacacattgaaacgatcttcaatgattcaaataatgaagccaaaactagacatctttttggctcataataaagaaatgaagatttgcgacttccatgttaaaggaagttggatcgaccggtcttgtgtcgtctacgccggcaaatctgatgccattgttgctcaggtaattacactgatcaaattgtctgtaaattgtataaaccggactagctagttatatgatcgtgttaattgagtcattgttgttgttttgttgtttttttcagatgcacaagaaacatacggcacaaagcatattaattgggaagagtaatttttcggttactgtctatccgaatgttgactttgcttttatagtttctctcattgtaatcctcgatgacattaaccgagaagattcagaagactagattaagttatcaactaatttctttttgt

SEQ ID NO: 162796 - DNA, 756 bp, Arabidopsis thaliana landsberg
atgaacatgaagaatctctaccttgcaattttatatctcttggcggcttcaacacttccatttgccattgcttcggacccaagcccccttcaagacttttgtatcggtgtcaacaccccagccaatgcgggtatgtacatgatgattgcaaatcattttcaataaaaaatttcatatcttaataacactttttcttcttggttactattttcagtttttgttaatggaaaattctgcaaggacccaaagctggtcacagcagatgacttctttttctcagggcttcaaactgcaagacccattactagtccagttgggtcgaccgtgacagccgtcaatgttaacaaccttcttgggttaaacactcttggaatctcccttgtccgtattgattatgcagttaacggacagaacccacctcacacccacccacgtgccacagagatcttggttgtcgaacaaggaacacttctcgtagggtttgtcacatcaaacccggataatcgcttattctcaaaagttctcaacgagggtgatgtatttgtgtttcccgagggactcatccattttcaagcaaacattggcaaggcaccagcggttgcattcgccgctctaagcagccaaaaccctggtgtcatcactattgccaacaccgtgtttggggctaacccagccataaacccaactattcttgcaaaggcattccagttgaacccaagggttgtcatggatctacagaccaagttcaagaaataa

SEQ ID NO: 162797 - DNA, 3153 bp, Arabidopsis thaliana landsberg
ttcaaagctttataatccgcttactcttccttggtttctcaagggcagattccacatcataaccccaaatcattttcaaccactcggaacttttctggtatagaggttccgaagaagacggatctttatcgtaaatcctctgttttttctttaatttcttcttcaaactcttcatcttctctatgaagtcttcgtcaataacagtgcttatgtattcatggacgacgaattcgtatgctccgtttatatcatcaacaggattcttacctgttacagatttgaaatccaacataccttgtagcacaaggacctcatctttcgaactccactttaacctttgagaattctccttttttgcatctttctttgattgtttggcactcacgttcttccgcttcttcccagttagcttagcttcaccggaaccaccacaaaccttggaccggttggtattggctttgtccattatcagacggttctctgagagaaaaagagttcgtttttagggagaaaagagttcgtttttaggtttcggctgtttttagggttcggctatagttactatatatcattagtacgtttaacctaacgttttagtaaactctcatgccagggcctttacttgcggaaaccttcttgatggaccaaaagcttctccttcgatgatctccttttcatcgaatatacgcctgcatagtgatgctaagcctttcaattacttaagccattcgtcgtacgcacgagctttcagctccaaatctgatgatttcggaagtattgtagcatctggtgttactgggtctggtgatgggaatgggaatgattgggttgagaaagctaaagatgtggtgcagactagtgtcaatgctgttgctgagactgcaaagaagactaaagatgtctctgatgagatgattcctcatgttcagcagttccttgactctaacccgtatctcaaagatgttatagttcctgttagtctcactgtgactggtactttatttgcttgggttgtgatgcctaggattcttagaaggtttcacacttatgctatgcaaagttccgctaagctgcttcccgttggcttctctaacgaagatgttccttatgagaaaagcttttggggagctttagaggatcctgctcgttacttggtcaccttcattgcttttgcacaaatgtgagtctctctagctttattcctttgacatgtatgttgtagaaaatagatagacttgatgaatgtgatatgctgcagtgctgcaatggtggcgccaacaactatagcagctcaatacttttccccgactgtgaagggagcggttattctctcacttgtgtggttcctgtatcggtggaagaccaatgtgattacccgaatgttgtcggctaagagttttggtgggcttgatagggacaaggtattgactttagacaaagtatcatctgttggtcttttcgctatcggtttgatggcttctgctgaagcatgtggtgtagctgttcaatctatcttgacagttggtggagttggaggtctgtctaatgttctccatttcatattagtcgttttgctctgcttataatgctaattgctaggattcagcagaaaataaaggcctctagaggccaccacaagcatatagtcttatctttttcaggggttgctaacattattagtactgattctatagtatttgctcataacataccaattttgatttgcgttttcaggggtagccaccgcatttgctgccagagatatccttggtaatgtgctgagtggtctgtcaatgcaattctcgcggcctttctctatgggtgatactatcaaagttagctgaacttttttttctgctctcttcttttatttagtgtcatagagcaagcaaatctattggcagttctcactcatatttttctcaagatatagtgtcttccttgtccccactttgcaggctggatccgtagaaggtcaagttattgaaatgggacttacgacaacatctttgttgaatgcagaaaaatttccggttttggtaccaaattcactgttttcgagtcaggttagtttatctgtttcacactattcatcttcttattgcagaagctaatgctctagctttcagaattccacactgagttaacactcgcaatcatttagttatctcatctgtttgaatctgattgctatatacgtgatacatttttcatggagggaaatcaaattgaccctgaagtaacatatataggtgattgtgaataagtcacgtgctcagtggcgagcaatagcatccaagatcccactgcagatcgatgacttggatatgattcctcaaatatcaaatgaaatcaaggaaatgttgaggtccaacacaaaagttttcttaggaaaagaagctccacactgttacttatcgcgagtggaaaaatctttcgctgaacttaccattgggtgcaatctgatacgcatggtacactctctctttagtctctgtaacagtcttctcattttttgaatgatacaactaccactactactgctagggatctttgtcgttaaatatagacaaagtttagtagccaggctaggcttggacattcggatttcgaatcggatatattcggattcggatcattaggataggagaacttattatccgtacggattttatgaattttcggatcgaattcggatcggatattttcggattcggataatttggatagaaaatttattatccgttcggattttactaatctttggtttggtttttgttcggataagtgtcggattcggaccggtttttaaagagctaaaaattgttcaacttaaataaaaattggtttaatctttactaaaatttggttaaattttgcaaaagtatgtatactattaacaaatgtaactaaaagatttccaatttctttattatttaggatattttgttatttattataaaattacaactaaatataaataatatttttggatatatatatttttcagttttcggatatcctctcggatttcggttcggatcggattcgattcgagtaattcggataggagaattcattatccattcggattttgtaactattcggttcaggttcggttccggatcggttttcggatttcggattttatag

SEQ ID NO: 162798 - DNA, 1642 bp, Arabidopsis thaliana landsberg
attaagcagtataatagtaatcaagtgtgtgaattaagttcacctatgaaacattgttgaactgttttaaaactgaagaattacccatatacaggatcacaactgtttgtaaaacgtcaaatcataataacttactcaaactgtttaaacttctgattctgctgttttgttgttatgttaattattgtttgcattccatataaatttctatataagtaaagccttatccttttaacaattattttttgtctttaatgacttcggtctatgaatgtaaaacctaatctcttctcatatttacgaaaaaaatgaaaaaaaaaaaaattagaacctaaatccccataaataagttcccgctaaatgggctgtaacaaatcactgtagcacgtatatataatatattatagaccatgcatatatatatatattcatggacatgagaatatgaatgtatctaatttcctctccccctcaatgttttggaatatttgtaggatccactaataatattcagtaaaccatcgctccaccaaaccactccctattcatttatccagagaattagggttcccatttcatcacgatctcaaatccgtttcccttcagcctagttcggtcctctttaattatccgtgattcttcaaattccttagatcgttatttggtcactttcagtattatactaatttgataatccaaaatgccaaaaatcgtctgcgagaaaagaaaatgtactcaccctcgaccaatgtcccctactagacattactggcaattcccaagcgcccttgccccttcgtcaatttgccgtgtagactcttcgtcaacctttggtcattttaacctacatgtaatgtaactcaaaacaaatttcaatcgaattgaggcactcattttatatagactgaaattgatccaaaaattgcgaaattttgtttttgaattagtatatagcctcacaaatttggtgttaacgttggtacgcattttctttcagcgtcctccgttccctgatttccacatgcttgattacgtagcaactaaaatagtcagcttagtttctgaggacggtgtagatatgttaaaggcttggattcaatcaggtcctgatggaaaagccgctgttttttcaagtgaaaccctttcttctgttcgaatagataagtcccctttttttattcatatggctgaagaatcgtctagtttccacatgttttacaccaaatgcctcaccgcaaaaaatccgtacgccctatatcttcatagtttagtgctggcatttcatatgtttgagctccaagagtcaattgctatattggatggcataaaggacgttttcccacatgctggtctactttacatcgtgctccatagttgcgctggatcaatttcgttggaattttatattcagtacaagcgaaagtactacaaatttagtgaagtcgacttattcgcagataaactaatgttccatatcaacgaggttggtccacgtcgccaagggacatacaaaaaatccttggagttcgaggattatggtgagtgttggtcggaccatcataacctcaatgagtacgagggacagtggtgtaacacatgtatttactattacctgtcccaggaaattgcacacatttcataa

SEQ ID NO: 162799 - DNA, 4562 bp, Arabidopsis thaliana landsberg
acttgttcaagctctcatacttcttctctagcgtttcaaatttcttttccataagaaagttcttttccacctaaggctcgacgtgcttattggctgcttccagatcctgcttcatctcattcttctcctcttttatcatgtcaagctcgtcacacagtgcaacagtccaccatctcttgaaaccgcatccttgaccgggacccttataaaaaaaacaggaggttgattcataggaatacaaaatgaaagaaataaaataaagaacattaactcaagaaaagatgcttacatctgatatttcgtacggacaattgaaaaaaagtttttcggttgtaacaggatcaagagaagtggcaccgacaaccttagcattgcaatcacactcgatcggaacgcccttatcgcgcctcctgttttcgccgtacctcgttcgcatccttatttccatacggttgagctcctacattaacacaaccatgatgtactcgacgttagatgggcaacgatttgtactattcagatgtggagataaatacctcatcaacactagattcgccttgaaaaagagacctctgagccatcatcttcactgcaattagtatggtactaaagcactggttctatatagtcctgtctgccacaaaatgtattaatcaaacgacggcgtatttgtattggctgaataaatttagaagtggctgacttgtcatagcattgcggctgggttttcactgatttgtggctgagttatgtcgtcatacagtatgtcactacttagcgtgttgctttaggttgggtttatcgagattatttattatatcattatcgagataacaaacagcaactttatggggaaccgccagtaatgatttggtccacatgcacaggtacacacgcccgtagttaatattcaaaataattcaaacgagttcgaaattattccttaactaaaccctctaataatcaaataacgtaacggctgagttattcaataagatttcgtgttttggccgagttatgagataccatatgttattatgatatatcaaaccgaccaccaaattgttagttatattattagcttgaagatgtaagtatataattgatttgtgggttttattggtttcgttgttaattgcggatgtgattgaatatacaggaccatttgtttaaatgggtcgaagatggtacatacgaagtggttgtagacagttggccgaaattggccggcttcgacagtgagttaagcgcggccaagtccgaggtttctgtcgagctagaagcattacaggcggtggtgaaagaactgaaagaagaagtgatgaggagcgaaagggaaaaccagaaatggaaattgatgatcaaactttgctgcttttgtcttgcctttattatcattgtcattgtttttggtatcttaatgttcccaaaaatcaacgaacagaggctttttctgggctactagtttgttttatgtttgtatgatttgtttgctactggaatccattatgtgtttgatgtttaactcagcgtatagggttaattggtttttttggttcaagtagtagcttgcaatgaaatggaactttgtcttcggacaagctaatccaatatcgttgactgagttatactggtaatgttgtggctgagttaatcatacgctatggctgagttaatatctgttgtgtcttctgaaatataggttacggctgagttattataatgttgtggctgagttaatcatacgctatggctgagttaatatctgttgtgtcttctgaaatataggttacggctgagttattataatgttttggatgagttaattatacgctatgactgagttaatcatacgctatgtctgagttatgatagaatttaacaagtaacctcaagcgataaacactgactttactgagaaggcgatcgtagataatattagatataaagccatcataacaaaaaaaaaacagagaaacatattgagttcataggaatgagataaagggacgataagtaagagacacaaaagcattcaagacatgaaaccgacatcatccgggccaaattcagtaaacatgtccaccaaatcattccaaactgttgtcgtcatccacctcggcttatccaaaccacgcgcccatccctgtttcagcgcccgcatattgtcccggtacaacgttctagccaccaaattaaactgcgtccacaccgtcagcgtgtgccttgaatcccaggtgtgcatacgctacaaagagagcaaatagtaagaatttggtctacggtttacaggaagtgctttatataaaaactcgatgcttatcgtaaggaggaaaaaccaccttgccttgaaaacaacgggaatcatccggtacgtcggccacgcatggtgaaagttgcactggagtatatcaccaatcgcgacaactagttggtgattgaatttgaaccacgtaacagtggttttgtcgacccatgtacccaatccagggtttagaactgggagatctgcacgatcaggagcggtgagcacggcttcaacatctcttagaaactgtccgtcgatatgaggcaccatgtcgttaagatgtgaggatgagacgtctaaatgatgagttcaagttactgatttatagaaaagaaaagacaggttaaggaatgcgagaggttcgtgtctgttcgtttggcgggaaaaatttccgtactacggctgagtttggcggcaaaatatattgttacggctgagttatacccaagatatgtaactattatacggctgagttgtcaagaattattaaaaaggacaggttaaggaatgcgagaggttccgtgttttggcgggaaaaatttccgtacgacggctgagtttggcggcaaaatatattgttacggctgagttatacccaagacatgtaactattatacggctgagttgtcaagaattattaaaaaggacaggtaaaggaatgtgaaaggtttccgtgtttggcgggaaaatattccgtgctacggctgtgtttggcagcaaaatatattcgttacggctgagttacacgcaagacatgtaactattatacggctaagttgtcaagaattattaaaaaggacaagtaaaggaatgcgaaaggttccgtgtttggcgggaaaatattccgtgctacggctgtgtttggcggcaaaatatattcgttacggctgagttacactcaagacatgtaacaatgttacggcagagttgtcaagaattattaaaaaagacaagtcaaggaatatgaaaggttgcgtgttacggctgagtttggcgataaatcgtccttgttatggctgatttaaacaacattacggctgagttgtcaataaaaacatgaagttcaattcgatttactgactaaccgaggtacggttatctccggcccaattaccagcgttttaatacgcctataaaatcggcttctcccataaacaccagaaggctaaactctcacacacagaagctaacgagttcaaaatatttctttaattttcaacgactcggaatttcaccatgggttacgacggcctccgcgacttgaatccttgcataacttgctggacgattctgtgttatggttcttaggaagtacatctcgtttttcacagataactcattcgaactacgggtcgtctttgtcgatgagtgggtaatgggatcttcactcgtgatacaaggcatacttaaccttgtgcttgtcttattccctatataactcaccctccaatgttgttttcatagggtatccaaattgaagttataatcggaagtcggttttttcaacgttactacgacatgcttgaagagaatcagtggaaagaaatcagaacctttggtgtcatcgaaaaatgtggttttgtccgatcaacaacccacaaatacatgattgagttcatgaaatgcaaatgaggtaactcattccgacccaagggaaactgtattatttaacagattcacaccttttgactacattattgaagacaccgctcatactgaaaatttggtcggtaagtaatacgtatctaatgcaaatttcatactttcacaaatcacatgcctgtttttaatctttatttcatactcccagatttggttggtgcactcatcgaggtcggatgtctgagaaatattacagaagatggttgggagatggacggattcagacttaccttcgagattatggcaaatagtataatttcttttgtttctttacttctaaatttctttcttttcatcatgtatttttcttgagttagcttaagtgtacgactgttttatatgtttcagtaaggagaggttgaaatgtgaggctcttggcgaattggcggttgacttgcataggaaatttcgatcttttcgcaatgacagtattgttattgacaatatatttgttgcactcacatggtggaagatcttcaggtatcatactggccccaaacacgtgaagatccaaaattatgccgggatatcagatgtgactgtcgaccccaatatcgaagaagtgcaagagttaaaaatggtcctcgagtaa

SEQ ID NO: 162800 - DNA, 1186 bp, Arabidopsis thaliana landsberg
  unsure (1)..(1186): unsure at all n locations
atgggagaagttaagggatgttggaaattaggacgaatgctttcaaaggataactctgcaaactcctacaacgtctcccttctcttatctcctgttgtttctgtttgggattgtattgtccgtaaaatgaggtatacctacatacctgagtgggtgtagtagtcattgagatcatcgcgccttggtgtagtgagtttggtagaatcaaagtaaaaggaaacaaccaactaaaagaagaagccagttaacaaaagcaaggcaaacaaagacttgtagcaatcatggatagcagtagctcgatgtgcaaacaagctcagccaattgttagaaaagccaggaagaaaaaagtaaaaggtgtagtggacccaattaaacaagctgagaagaaaaatagacgtcttgagaaagctattgctacttctgcagcaattcgggctgagctagagaagaagaagtttataaaacttgaggaacaaaagagattggctgaggaaggtgctgccattgctgagaagaaaaagagacgtcttgagaaagctattgctactactgcagcgatccgcgctgagctagagaagaagaagcaaatgaagaaggaaggacagctagacgcagcagttgaagaagattcagcatatgctgcaaagaagaagcaggagagagaggaactggagcgtatcaaacaagcagagaggaaaaagagacgtattgagaaatccatcgctacttctgcagccatcagggctgagctagagaagaagaagcttagaaaacttgaggaacaaaggcgattggatgaggaaggtgccgccatagcagaggctgttgctctgcacgtcttacttggcgaagattgtgatgactcataccgaaacacgctaaaccaagaaacaggtttcaagccatgggactatactaccaaaatcaatctttntagtggtggaataaacatattctttcctcccaacggtgctcaagctacgcngttcatgataacaacagaacaagagacagtaactggtcgtcagtctcatatgagcctttcgcaaggggatgggataacaacaacaacaacaacatgggaatatcagctgatttgtttgctactcaagctgtgtcgtcactacagatctctgagaatactgacgttgacgcaattgtcttcaatgggatgttcagaagatga

SEQ ID NO: 162801 - DNA, 3282 bp, Arabidopsis thaliana landsberg
atggtgaccagattcgaaaggaataagcaagttgtggtgatgctcgacccttacactcgacctgctagtcgagtatgagtgcctgcaaaacaaaaacaagcaaatgaagaaacaagtgagtaaccggaaagaaagaaatagaacttgatcttaataactcagaaatcctaaatgtaacaagaaaaacacccaaatggcaacggcgccaaattgatacgaaggttttctgtgtcaattccctaaatgcatcttatgtcattgcagcatttaaggtgtcaatccaaatgggtgtaattgctatcaatcaggatatgatcagagaatactaagtcaagccaagtgtgaataagtttggtgtgtttctactaaacctaagcaacaggttaacatgcaaatcaaataacaagaacagaaagtaaaccaagcactaggtgaagcactcggtcgagcaatcgagtaaacaggtcgagtaaaatactaaaaacaccaattttgcacgaaacgaataaagtacgaaaaacacgagttttgcacaaataaatgacacagagctcttaagaatggggtaattggtcttagtggactcctcaatccattagctaactaacaaactcaatcaagctatccctagacaatagattcaaaaccaaatcaagccacttccgtgtgagtgattctcataactttagaacttcctaatctcaatttccattgatgaaacataataaagcaggctttaaacaccaatctattaaagtcaataagcagtctaatcatccaattccttgggctagaatctacaaatctctgaaattagttggttcagacatttcatcaaacatcttttggatggagaaagtctgaaatcaattttcaattgatcagaaagaaaatagcattaagaactcctaaaacagaagggaatcatgcatataaacacttagctagctaaagaagagaggaatccacctaaacctaacccattctcaagaactctgaagaacactactcaagaacactcaagaacatcatagaacaaaacccagaaaattcataaaactcagaaatcattataaacttagcaaaagatagatctcaatgagataaacaagtttgcagaagaaatcaaatccaaattctcaacagaacaaccagaaaatgcaaaagaaaatcaaagaaccctaaaaaccagcggacaaaacgaagatcctctgggcaaaaacataagaggtctatttataggccatcctaggttgccctaattgggaataagacaaaaaagataagtcggcgcaggagccgtcggccctaggcgaactagaaaagccgagtggcttggtcttggtcacacagctcggctctaggccgagtggcttggtcgagtagcttctcttcatccttaagtgcacaactcggcctccagccgagtgccttggtcgagtaggctccttgttcttcacgtgtgctccactcggcctccagccgagtacataggccgagtatacttcaaatccttccttaggtcccccgaactcgagtctgtccatcccttgtgctagaaacctccaagttgagtccaaaagtacctaattcatctgcaaaacactccaaatgcaagtatgctatgcaatgcaatgcaaaatgtgcaaaagaaggaaaagagactaagaatgcataaaaagagacttgaaactaagctaaatgcatgaaaaacaagggcttaaaaaggttaaaatctagtgttatcaacatgacatcaagtcatattcgactataaaacactaaccaaccttcttcttgcttttcaaagctttcatggtgtagccaaagtccatatgagtctttggctttgtgtcttctaacaaggataaactacttaggcttacaagatcgggttgcggtttaagttcttacactcaatcatacacatgacatcaagtcatattcgactataaaacactaaccaagcttcttcttgcttctcaaagctttcatggtgtagccaaagtccgtatgagtctttggctttgtatcttctaacaaggatacaatacttacgcctttaagatccggttgcggtttaagttcttatactcaatcatacacaaatccgctagatgtaacaaagtgttgagaaagcttctcctagagttaagagaaaagaaaagaatgattagaaaaaggaagttgaattcgatcttgcagcttagaacttttaacttggacattgatttcatctggtctatcttgtgttttggctctgagtccccactttcaaacctcacttccagcttattcttgattgtttgcttgagggcaagcaaagactaagtttgggggagttgataagtgtgtattttgcatgttttgagcatccatttctcatcattttagcatcatatcatcactgttttataccatttcacattatttgtcaccactttgcatgtttaggatagttttgcatgcctgttgcatatttgcgttgatttcaggtgatttggagctgttgacgagctatctggaagaagcggacctgatcacgacaaaccactcgaccaagaggtcgagcaggagcttcaagatcccaagagaccactcgacccccaggtcgagcataggacatcaccacttcacttcaccactcgaccacgaggtcgagtgccctcatctccttcaccagaacatcactcgatcacttcactcgaccatgaggtcgagtttcttcatctccatcaccagaacatcactcgagcacttcactcgaccatgaagtcgagtgtcttcacctccatcatcagacaatcactcgacctcatcagtcaacctggaagtcgagtatctcctgaccaacactcgatcacatcactcgaccccgaggtcgattgtcttcaccttcattgccaaaccactactcgacctcgtcactctacctggaagtcgagtatcaccatcaccaccactcgactgcatactcgatgaaaagcttcagagccttcttcattccgcactcaaccagacactcgagcacgaggaagaaaagaagactccagctattcactcgatctctcactcgaccacatgggtcgagtacagttcttaacccgtcccaatacttcgtcgttttgagtattagggtttcgggatatttggctataagtagcatgtacttcacattttcgaaaagaagttttttatctagttttatttccgcagaccttgtgtgctagaccttttgtaatccggatttctctttatctatttagtattcagtattcagct

SEQ ID NO: 162802 - DNA, 1665 bp, Arabidopsis thaliana landsberg
atgccttacgagaaagagctcgctgctgctaagaaagccgtctctctagctgctcgtctcagccaggttagtaaccacatatgtctaatttattgacaaaacttttactaatgacagttttttttcatgaactgtgtgttgatcaggaagtgcagaagtctctgttgcaatcagatgtccggtcaaaatctgataaaagtccggttacagctgctgattatggttaaatcaatcccattctgttgtcaatcggtttttattcgtgtaacaaaactggtcaaccaggtccaatcaaaccagtcctaagttgaccaaacctatcgataaatatgcaggatcccaagctgtgatcagtcatgtactagagagagaacttcaccctgaaccactatacttggttgctgaagaggtacttacagtctcttattaccagtcaaaaacacaccaccgaacttaatctttctctgttacatatcttttgcagaatgcagaagatctgcacaagaatggcgccgaggaatttctagaaagcattactaagcttgtgaacaatgctctagcttctgatgattcctacgccaactcttctctttcaatggatgatgtaaggaaggcgatagaccacgggaggtcacaaggcggttccagtggccgccattggattcttgatcctgttgatggaaccagagggtgagaagtcttgaaactcattacagaacaatcttctcctttttgctctaacctgcagattctgattaataggtttgtaaaaggagaggaatacgctgtggcattagctttgcttgtggaaggcaaagtagtgctcggtgtcatggcttgcccgaaacttgagaatcacaagtcttcttcttcaggatgccttttctttgctacagtgggagaaggagcttatgtgcaatcgcttgaaggcgactctcatcctccacagaaggtattataattatcagagcatttgatgtcccttaggcttgttctctcgttttgtgttcttaaaacagagtggagaaagtgtgctaataggtgcaagtgagcaacattgagaatcctgaagaagcaacctttgtggaatcatcccacaaaccaatccccatccatagctccattgccaatgtacagaataacatattttatgtgtgtagttggcatcaagcctaacctaaccaatgtattaatcttttcactaaaacttactctcttacggtaagcagaaacttgggatcaaagctccacctctaagaatccatagtcaagtgaagtacgcagctctggctcgaggagatgcagagatatacttgcgtttcactcttaaagggtaccgagagttcatatggaaccatgctgctggtgcaatcatcacaacaggtatgcaaatatttattcatggcacctattacggaaaacaaacaaaacaattacactagtgaccaaaagctgtgagcaataagccaataacctcgtgtagaagctggaggtgtagtttgcgatgctgacgggaatcctctggacttctcgagaggaaatcatcttgaacacaaaacagggatcgtggtcagcaccaagaaccttatgccacggctcttgaaagccattagagaatccatagaagaggagatgcttctctctgagacacaactgaaactgtaa

SEQ ID NO: 162803 - DNA, 1325 bp, Arabidopsis thaliana landsberg
  unsure (1)..(1325): unsure at all n locations
atggaaaagcaatatgaaaagaagatccaatggacgatcaagaatttctcctctttggaatcggataaagtttattctgataatttcgtagttggnnnnnnnnnnnnnnnnnnntatttgttctctaatgttttcgttcatttttggtttacgtgattttgtcctttgcttgcaggcgtcttggggcctatcccaagggaaatgctgaaaatgttaatgtaagtttgtctctgtttctggaagttgctgattctgaatctttgcctaatggttggaaaagacacataaaatatcgcctaaccgttgttaatcaaatctaggagaaactctccgcacagaaaggtgattctttatacattcgctagattagtttttaatgggaacaaaagttcaaatttagagttttncttgtcataaatgggacttgtgttgctgcgagattctatgtatgtgttgtgcaattctgattttgactacgcttttgtgacttaccagtaatacaaaaatggtttgattagaagtctcccaacttaagtcctttgagttgtgcaattcttgtttaatcatctgagttgtgcaatttttgttttgacttaagttttatgtttcgtgactttacagtagaaacaccaccatactggtttgatcagaagtctcgctactggggttcaccagcaatgcttccccttaccgaacttcttgacctaaatggtggttttctggtgaatggagaagtcaaaattgttgctgaggttggtgttcgtgaagttgttggcaaatcagatgtgttagtggaaactttattagttcatgaaagcatcaatgtcaatgggtttcaaattcttccttcacaggtaagaaaagtactcgtagctatataattcactttcttgtacaagctgcatgaatgtatgtagggttttactttattagtccatgtatcccttgcaggtagaatctgtgaacaatctctttgaaaagcacccagacattgcatcaaacttccgtctggagaacccacatctaagaacaacatacttgaatagcctactatgcttgactgagattctaagccagtcccctgagaacatttccaatgatgatttggccaacgcatattctacgctatcttatgtgacaaaagccgggtttaagttagattggttggagaagaaactgaaagatgttggtgagactcgtattcaagaaattcgggaagagttgaaagacatgaagcaaaagtgtgtagacatggaggctctcctcgaattcttaagatgatgttggttgatgacttgagttgttgtaagccgtttaatgtttgg

SEQ ID NO: 162804 - DNA, 1808 bp, Arabidopsis thaliana landsberg
atgtgtaacaaagagagaaggaaaaaaagacatttgtaaacaaaagtggtcatgctttacttgccaacaaaaataatagtactacattattaagttgcttggaccaaagataccattacatcagcgcatttttctctataataattgttaaacatatattagttcctgagtttcttcttctttcattttctttaaatcaattctagtcttttggttccaagacttataggctaaataatggtgcttctacttgtgattgtgggatttataagctattatgtctacaagtccataacaccgccgccaccgattccactgccggaaaatgtttccgagatatctccaagaatcaagctcaatgatgggagacatttagcgtataaggaattagggtttccgaaagacaaagccaaaaacaaaataataatcgtccacggaaatggaaactccaaagacgtcgatttatacatcacacaggtacacaaggattgaattaagaacgaaattaaataaagaaagagaccgcaactattttaatacttttttggtggtttatttttacaattaatgattgttatgtataatgaataatactatttgcaatgataacgctcctctggctttcaggaaatgattgatgaattcaagatatactttttgttcttcgatagagctggttatggagaaagcgatcctaatccaacacgaacgctgaaaacagatacatacgatatcgaagaacttgctgacaaattgcaagtcggtccaaagttccacgttataggcatgtcacttggagcttaccctgtttacggttgcctcaaatacattcctaataggtaaatatatcaatcggttatctcttaagaacattatcaaaaaattgaaatattatttgtgatggtcacttctcaatacttatcaaaacaagttcttacgtaaaagacatttgctttatccatttgtgataagaattctcttgtttcatcctcatcgtttaattaccataagtccataagtgacgttatactataagaccaagtgaccgacttagatatttcacttatacaaataagattataatgtagtggtttgtatattagccttaattgtttttcttataacatcgataggcttagtggagcttcgttggttgttccgttagtgaatttttggtggagccgtgtgcctcaaaacttattgaatgcagcgatgaagaaattgccaattggatttcaattgacacttcgagtcgcacactactctccatggttgttatattggtggatgactcagaaatggttcccgaatagtcgaaatcccaaagatactatgaccgagcgcgacctagaactcgcggaaaagcataccaaacactcttatatcaaggtatatatattcgaacttttatgatccactctctttttttttttttttgaaagaagtaaacattcatgcatgaatgctattattactataggagtctgctttacgacaaggtggatatgtgaccacacaacaagacatcatagcgggttacgggaattgggaatttgatccaaccgaattgaagaatccgttttcggatagtaacaaagggtcggttcatatgtggtgtgcactcgaagacaaacaaatttcacgcgatgttttacactatatatgcgataaactgccatggataaagctccatgaggtccctgatggtggacattatattatccatgagaagcggcattttgaagccattatcaaagccgcttgtagtgactagtagaagatacattataacaaaaaaaaactctaaa

SEQ ID NO: 162805 - DNA, 728 bp, Arabidopsis thaliana landsberg
atgtttaggatagttttgcatgcatgttgcatatttgtgttgttttcaggtgatttggagctgtcgacgagctaactggaagaagcgtacctgatcatgacaaaccactcgacccagaggtcgagtaggagcttcaagatctcaagagaccattcgacccccaagtcgagtagaagacaccaccactctatcacatcagtcgacccctaggtcgagtgtcttcatcttcatctcttgaccaccactggatcacctcactcgacccccaggtcgagtgacttcatctccatcttctgaccatcactcgatcacatcactcgcccccaggtcaagtgacttcatcccattgccagacatctactcgacctcatcactcgacctggatgtcgagtatcaccatcaccaccactcgactgcatactcgatgacaagcttcagagccatcttcattccgcactcaaccagacactcgagcacaaggaagaaaagaagactccagctattcactcgacctctcactcgaccacatgggtcgagtacagttcttagcccgtcccaatacttcatcgttttgagtattagggtttcgggatatttggctataagtagcatgtacttcacattttcgacgaaaaaaagtttttatctagttttattccgcagaccttgtgtgctagacctttgtaatccggatttctctttatctattcagtattcagtattcagtt

SEQ ID NO: 162806 - DNA, 717 bp, Arabidopsis thaliana landsberg
acgaatttacgttttcggcggaaaaattacgggtttacgtttttggcagaaaaatcacaggtttacatgtttacgtttttggcgagaaaatcacaggtttacaggtttacgtttttggcgggaaaataacaggtttacgttttttggcgggaaaattacgggtatacgtttttgcgggaaaatcacgggtttacgttttttggcggaaaaattacgggtttacatttttggcgggaaaatcacgggtttacgttttaggcgggaaaattacggtttacgttttagacgggaaaattacgggtttacgtttttgacggaaaaatcacagattttggtttttggcgggaaaatcatggatttacgtttttggcgggaaaattacgggtttacatttctgggggaaaatcacggatttatgttttttggcgaaaaaattacggatttacgtttttggcgggaaaatcacggatttacgtttttagcgggaaaattacggtttacgtttgtggcggaaaaatcacgggtttttgtttttggcgggaaaattacgggtttacgtttttggcgggaaaatcacggatttacttttttggcgttaaaatcacgggtttacgtttttggcgggaaaatcacgggtttatgttttttgtggaaaaattacgagtttactttttctcaatttcatcccttgtatatttaagaaatttggagaaatat

SEQ ID NO: 162807 - DNA, 963 bp, Arabidopsis thaliana landsberg
atgaagttctttcacggtcttgagttgataaatccctccataaccggatggtatgtcggtctcagggttgtgaagtccttcgtgggtcatctcaatgctttgtctaagatagttggcttggttttggcagacgagcatgtaagctaattgaattattgtgtattctttgtctagatcttttattttcagaaccgtattgaacaattgttgcatgtatacttcctagggtgtatccgactactataatgaatttattgatgttggcgattggataaccatcatgcgttttggagtttatccgaactcgaattttgttagggtaacatctcataagttcaagatttgtttcttcaaagacaccgttgttaggaagacaactgctgtggttgcgaatcctcattacgctttgacatatttctcttcaattatcgatgatgagatcgatacgtctgttctaatcggcaaagtcccgtttaatttactgttaatttcttatgttcttcgaaaatcatctaatctatttgaataaatttcaatcatatttagtgatgttctatttttcgttgtatactagactttgttggggcgattcatgatgtaagagaggtggagaataataggcctacacaaaacgatgtcaatgatttaaggatttgtttcaaaactcaagaacaaagagttagattattttataaatataatgaaattgttgttctttagtaaaaaagatcaatttttcttttttcatatgtagcaactgtgtgttggaatgcttggcttggggaaaacaagctcttgatttttgtcagaattatcacagtcgtggtggtggtgttattgtggccgtgcttggatggtggaaattggaccattattttgatggtccaaaaaatgtgcaaatttgcacatgttcatttaactttatgaaaatcgcgaaaagaaacacgtggtttttatgaccta

SEQ ID NO: 162808 - DNA, 912 bp, Arabidopsis thaliana landsberg
gcaggtatctctcgtgattcaattcacaagagacgtgccactggtggtaagcaaaaaatgtggaggaagaagcgaaagtaagctttttaatcttcccctgcttaaatattgaatcatagagtagattggaatcaaaatgaatcatgagcttgtcttgttctttaattttggttgtttctacatgcttgataactttgtataacttctggttgaagcaaaattgatgatcacataaactaactttggttatctcttataaaggtatgagcttggaagacaaccagctaacactaagctgtcaagtaacaagacggtgaggaggatccgtgtgcgtggtgggaatgtaaagtggcgagctttgaggctcgatactggaaacttctcgtggggaagtgaagctgtgacccgcaagactaggatcttggatgtggcgtacaatgcatcaaacaatgagcttgttcgtacacaaactcttgtgaagagtgctattgttcaagttgatgctgctccattcaagcaagggtatctccaacactatggagttgatattggtcgcaagaagaaaggagaggccgttaccactgaggaagtgaagaagagcaatcatgttcaaaggaagctggagatgcgacaagaaggcagagcacttgactcgcaccttgaagagcagtttagcagtggaaggttacttgcatgtatcgcatcaagacccggacaatgtggtcgtgctgatgggtaaacaaaaaaatcttttggattgaaatcatcacatctttaatcagtgttttctctgagttaagaaggctgatcttggtgtattgtgtaatttgaaacaggtacatattagaaggtaaagagctcgaattctacatgaagaaacttcaaaagaagaagggcaagaatgctggtgct

SEQ ID NO: 162809 - DNA, 3176 bp, Arabidopsis thaliana landsberg
atggcggcttcacgcctgaaaatcctgaagaacaaaaaggatacacagattaagcaactgaggagagaattagctcatttgcttgaatccggccaaacccaaacagctaaaattcgggtaagtaaaaagcaataaaattttcatttgttttgtatgaaatctgtgattttgaattcatggattgtcaggtggagcatgtggtaagagaagaaaagacagtagctgcttatgagctcgttggtatatattgtgaacttcttgttgctcgtttgggtgtcattgactctcaaaagtaagtttctttgaacaacccttgtttgttttttcttcattgtgttgatcattgtttgtgatcttacttcaggacatgtcctaatgatcttaaggaagctgtcgcaagtgtcttatacgcttctcaaaggttaacagatgttggggagctctcagatattgttaagcatttctctgcaaagtatggtaaagattttgtttcagctgctattggtttgcaaccggattctggtgtgagtcgtttggtaagttgttttactgcgtgttctcttactttactccgctgtttgtagaagagagctatgattgtttattgagactctctctttattttgcttagttagtagagaaattgtctgttaaagctcctgatggtccaacaaagatcaaaattttgacggagattgctacgcagcataatgtaacttgggaagcagagtctttggttgaatcagatccaaaggaaaccatgtcggcggttagtaatacattttcagctaaatattactttcactcgtctctttctctagtatacgtttcctcattagcagtttcaatttctttgagcagagtggagcaagttcatctgtgtctcagccagcaactggaataaagtcggagtcttcaagaatccagaacaatcaacctccagtatttcaagctgcagctactgtcaatgtgtcgcagaattcatatgcaactgatgggagatcttcaagccgcatgacatctactgatttcaacgttgggaagacacctgatcactatcatcaagacccaaaaccttctggttagtttttctataagaagcgttttccgttggatgtttgttggtgttgagtgttagaaaaaaactaatcgtcttttttaatacaggagatagagttgacggtagagaacacagggatcacaatccaggtcatggggatacatctccattcgaaacgaaatttgttgatgcaacgagtgctgcacgtgctgctgctgaatctgcggaaagagcgagttttgctgcacgtagagctgctgagctttcaagtaaagaaagaatgatgatgatgcagaattcaacagagtcgcggaactcatcctcgtatgagaatcttagaagcaatcccccacatagtcgtactagtagctcaaatatgcaaggcggaggttttggtaaagaagagttattaaaaagcaataacaggcaagtagatcaatctactactactactagagcagagtcatctaagaagactgttgatgagctatcagaaaatacttcatggaggagaggtcattctcgggagaactcattggagatgaggccgaatgattcctttgctaaaataggtagagagaaacagcagccaggtatggatgatataaaccttagcagttcagcagatgttctaaataagaaacaatcaagccgagcttcatcgcattcaccgtcaagcaatttttccgatgataatgatgtcactgccttggaccatatcgattcaccaagtatctttgaggaaaacaaatttcagagcactgttggagatagagagagctacaatgacagtcctgttgttgttgttgctccggcttttgatgactatagctcgttttttgacaaacctcaattcgacacagaagatgcttatcatgatgaaccagaacaaggattaggattttcattgcttggcagtagcagcaaaacatcggatcatatgcctacagagataagttcatggagcctcgaaggacacaaggatctgggaaaactcagctcagcctcaacctcacaggttcttgaaaaggagaagccaagttctcctccaacatttgatgatggtcctacaagtcctccagcttctctgcatgagcctgagccgtctgcaaagtttgatgattatgaccgagattctgaaagtgaagaagacaatctaggaagactttccggacgtgcagaaggaaagtcgaagctgacagctcagaagtctcacatgtctgaaggtcctgatgatttaggacgttactttttcccatcagacacagaagaccaaggagatgattccaaaacacaggaagaatctgacgcagagactcctacaggtcttaagtttggacctctagccagtggacttgagaatgaaacgactctcccatcttatggatcgagtccgccaagagacaagacgtcgtctaaatctataaaagagtatcttccaacagaggttgatccgtcaaggtcttcttctctgcagacagcttcttctagcagtattaggaatgaactttacactcagaaagcaagtaactcagacaaaagaccaagctctatacctccagattcatcttctagtgatgatgaatcagaagtggaacttccaaagagagtttctttcagatatcaagagaaaagaactgagtcaagaacccggcccacacatctacattcgggtgtcagccataaggacttggaggaagaaatcccgactcgagcttctaccagaagtcaagataggaggacccacaagaccacccctgcctctgcttctgcttcatattttcacacaatgtccagtgacgatgaagatgagaaagaagtccatagagatactgcacacattcaaaccaggccttatatttccatctcaagaagaacaaagggccaagagagaagaccatccctcgttactgcaaaaattgacaaagtttcttttgatgaagaatctccaccaaagctaagtcctgaggccaagccactgactaagcaacaaggatcagcttcctctttaagctatcttcccaaaactgagaaagtttctcacgatcaagaatctcatccaaagctaggtcttggggccaaaccactgattaagcaacaaggatcagcttcttct

SEQ ID NO: 162810 - DNA, 1014 bp, Arabidopsis thaliana landsberg
tgtgaaaatgtagcagtagtgactggttcaaaccgcgggattggattcgagattgcaagacagcttgcggttcacggattgacggttgttcttacagctagaaacgtgaatgctggtcttgaagcagttaaatctttgaggcaccaagaagaaggtctcaaggtttattttcatcaacttgatgtcacagactcttcgtcgattagagagtttggttgctggcttaagcaaacatttggaggtttagatattctcgtaagatccttatcgattcgtaatcttggaggatagttctaatgttttcttagatttgaattacatgcatttgtgttgctatgtttttcaggtgaataatgcaggtgttaactacaatctcggctcagataatacggttgaatttgctgaaacagttatatctactaactaccaaggaaccaaaaacatgacaaaagctatgatacccttgatgagaccatctcctcatggcgctcgtgtagtcaatgttagttctcggctaggtagagtaaatggaagacgtaatgtaagaaactctttcactcatatctttgattttttttgaaaaaagaaaatctcgttgaaattcatgaattgcagagactggcaaatgtagagttgagagatcagctaagcagtccagatttgctgaccgaggaacttatagacagaactgtctctaaattcatcaaccaagtaaaagacggaacttgggaatcaggcgggtggcctcagacattcactgactactccatgtctaagcttgcagtcaatgcttacacgagactaatggcaaaagaacttgagagacgaggagaggaagagaagatttatgttaacagcttttgccctggttgggtgaagactgcgatgactggctacgccggaaatatgccacctgaagatgcagctgatactggagtttggcttagcctggtcctttccgaagaggcagtaaccggaaaattcttcgcagagagacgtgagatcaacttctga

SEQ ID NO: 162811 - DNA, 3358 bp, Arabidopsis thaliana landsberg
atggttgaattgaaacagagaatcttaacctctctctctagactcggtgatcgcgatacttatcagatagctgtagatgatctcgagaaaatcgtcgtctccgtccccgattcacccgaaatcctccccgtgcttctccattgtcttttcgattcctcctccgatcttaaagctccggtcaagagagaatcaattcgtctcctctcctttctttgcctctcttacaccgatctctccttttcacaattagccaaaatcatctcacacatcgtcaagcgtctcaaggacgccgataacggtgtacgcgacgcttgtcgcgacgcgattggttctctctctgcgcagtttctgaaggagaaggaagtagagaatggaaattatgttgggtcttcgttggtggggctatttgctaaacccttgtttgaagcaatggcggagcagaacaaaagcttacaatctggtgctgccatttgtatggggaagatgattgattcagcaacggagcctcctgttgcagcttttcaaaaactgtgccctagaatctccaagcttttgaatagccccaattacattactaaggcttcactcttacccgttgttggaagcttgtcccaggtttgtgcaatgtggtacattgcttgaattttcagctgcatttaatttggcatcgtctctagttttgtggctacttgtgtttctatgctaagaagattggaatggcatgtttgtgtgaagggatatgcttactattttcactatatatctctagtctgcttggtggtcaagtcaaatctactgggtactctctatggattacatattttgagctatggaattgttgcaggttggagctattgcaccacagagcttggaatcattgctacacagcattcacgagtgccttggatgtacgaattgggttactcgtaaagcagctgctgatgtcttaatctccttggctgtccattctagtagcttggttgcagacaaaacagattccactcttacagctcttgaggcatgtcgttttgataaggtactaatagctatgatattttcttgagatatttctggtagaggaatcattggctaatatctatccaaggttagaaataagattgataccaagaaaagaaatgcagattactcttaatggttattaaaacattgctatttccattctctttccttgtcttcagcaccttatgtatacgctgatcgtgatagctgtgttataattttctgatcaactaaacagagccaaaggtatataagctagattgaaaataaaagcttggatagcagtggcggatatttgttatacactgtgattttcgatgagctgaaagaatttgcttaggcatgttttgctttgctagcatgtaaaaacgataatttagtttgactgagttatatccatatcaccattgcttaagaagggaactgctagactggaattacattgttaatttttccgacattgtttttgcatcattctgaaaagtggctacattttctttgggttgcagataaaacctgttagagaaagcttgtctgaagcactaaacgtctggaagaacattgctggaaaaggtgaatctggaacaatggatgaccagaaggatgtgtcatctgagcaatgtatattggaaaggaatggagaaactgattcagtttcatgtgaggaagcaggactagtgatgcaaggctcttgtgatggtttgagcagtagttcagattctatttcaaaagcagttctcattttgagaaagaaggcacctcggttgactggcaaagatcttaacccagagttttttcagaaactggaaaaaagaggttctggtgatatgccagttgaagttattcttccttctaggcaaaagaattcgtcgaactcaaatacagaggatgaatcagacgccaatacttcagtattaaggagtaggtcaaatggtttgtgcagaactgctggtgtccataccaaacaaagacattttggagattttgcaagagaaaaatgggttgatgaaagaatgaacggaggcgaatcacggttgagagcatttgatggagatcatactgaagtaatccaggcggacacatctgaaaacagagggaactggccaccattacagagacagttattgcacttggagagacaacaaacccacataatgaatatgttgcaggtactgatccgatttcaaataaatatagggattcactttaaaaagtttctctattaaaaggtagcatccttatcattgcaggatttcatgggtggttcacatgacggcatgataagtttggagaaccgtgttagaggtcttgagaggattgtagaagagatgtctagagaaatgtccatacaatcaggtacgtataactgcatgacctgcgctgttaaaacaattctacttgttgcatccatttgaagaaagatatttattatttcgaaaactgtaatttgcttcaggtgcgagaggaaaggcgactgcatcatggagatctgatgtagatggatgggatagtcctaactatggaccttcttctagaaacactcagaccagtacaagaaagatacgtggcactggtccttctgagcaatcaggtaacagcagaagagcttgggacaaaagctctgtagcaattcgactaggtgaaggaccttctgctagaagcgtgtggcaagcatcaaaagatgaagctactcttgaagctattagagtagccggcgaggatggtgcagtccctcgtccaacccgagtggctgttgcccctgaagctgaagccatgggagatgatgataacgaagggcaggaacgtgacccgatatgggtttcatggagtaatgcaatgcactcactccgtgttggtgacattgatgctgcttacgcagaagtcctctgtgctggtgaccagcacttggtcatcaagctgatggacaagacgggaccttctcttgaccagatgtcgaatgagattgccaatgaagctctaaacttcatctctcagtttctgctggatcatagtctctacgacatttgcttatcttggagtcaacaggtacatctcttacagtacattactgggttccaagaatcacacatatgttttgtctttaacctctctttctctctttttgccattccatttgcagctgttggaattggttttacaagacggagcagacacgtttggagttccaatggaactgaagacagagatcttgtacaacttacaagacgcatgttcgactatggatccacctgaagactgggaaggtcctgcgccggaacagctcgtggtgcagttggcatcagtttgggaaatcgatctccaacagttcgacaagtaa

SEQ ID NO: 162812 - DNA, 1376 bp, Arabidopsis thaliana landsberg
tcaaacaacattgctctgtttccgaaacaatccgctatgatattgggcctaatgtattgtatgatcctaggcccaatacttattgggccagtaagcaattggcacaaattgtattcgtagattttttagtgcgatgaggactagatagtaaacttgtgatctcaacaattttccgattcccacagaaatggcttccttctcctcttcgtcgcagtacgatcctctgccgttgaaagacggagagtccagaaactgggcggagcttccgccggaactaacatcttcgattcttctccatctcagcacgattgagatactaagaaacgctcaaattgtatgcagatcgtggcgacgcgtctgcaaagacccatccatgtggcgcaaaatcgacatgagaaacaacggaatctttggttacgactacgacaggatgtgccgtcacgccgttatctcagcgaaggtggtttagtcgaaatcaacatggtacacttcggcaacgattctctctactcctacatcgcccaaaggtttgtttctattcttagaatttttggttggtttcagtaaactttctagggtttagatcagattattaacaggattggagaaggaattgggcgaattagggcaaaatttaacaaagcttgtggtttttattaactggatatgttgccttgggattgtgtgaaggccttgcaagttagaggtcatgttgatgaatctgtggttttgataaagcagtgttctctgagatttaagatgaatatggttatgtggaatgtatatatgcttctgagttgataagattgaccttttatcacaattttctttttttcagatcaagtaatctgagatgccttaggcttgcaatgtgctatccactaactggcaatggatttgtcagtgcagtcatgaagctctcattccttgaggaactcgatatttcacagggctatacacaactggatttgaaagctataggccacgcttgcccactactgaagacattcaagctaaaccgtccttctttcagccggttcgttaaatatgatgatgaacctctagcaattgctgaaaccatgcccgaattacgacacctcgagctttttgggaacggactgaccaacttaagattggaagccattcttgacaactgtgttcacttggtacatcttgatttacgccgctgcttcaacattaaccttctcggggatctcgagaagcgctgttctgagaggatcagagatttgagacgccctgatgactcaaccgctgattccccttttgatgcctcttccgatatatattcagcaggagaagacgactacgacttttactcagatgatagcgatgtatataacccttattatgactaa

SEQ ID NO: 162813 - DNA, 1192 bp, Arabidopsis thaliana landsberg
aataaccgtattgaggccaccgttgatcgtcgccttgctccgttttacgaagaccgattcgttgaaaatgagtggaagacgatcacctctttcttggtccgtaagtcaactgacttagtcagagcaacaaagcatgaatacggcatactgtttatggatcggaccgtcgtcgttcatgccccaccgagatcaccaccagttccagatttcgatttcactcccttcgacttcattttggataaatctgcttacaagaacgttttagtcggtgaggaggaataactctgatgcttcatttattacatctttgtcgtgagagtcttcaagaaggttatatcgcccaacgtcttcgaactcggccttatcttggcagattacgaggtaatttccgtcaaatcattatgtgtatttctcgttcattcgcttaacttgtatattaaactgtctactatcatgttctgtagggatccaattcccgtattgaggccactgttgattgccgccttgctccgttttacgaagaccgattcgttgaaaatgagtggaagacgatcacctctttcttggtccgtaaggcaattgactcagtcaaagcaacaaagcatgaatacggcatactgtttatggatcggaccgtcgtcgttcaggccccaccgagatcaccaccagttccagatttcgatttcactcccttcgactacattttggagaaatctgtttacaagaacgttttagtcggtgaggaggaataactccgatgcttcatttattacatttttgaaattttttgattattatctttgtttctccatcatctagatgtcgttggagcgttggttgatgttggcggattgactacagactattacggtctcaaaatgagtttcaagataaacgatagatagtaagtgttcttttcatttgttttatttacaatgtcactctaaacgctaactgtccttatttctaacgtagcaatgaagtcttggagtgcaaagcccacaatcaacaggcggagtacttggatggttactttcagagtttgggtaaggaaaattttgttgtcgcactcagcttttggcgtttcaccgaattgtctaacccgaagcttgagagccatggtgctatttcaaaggtggttgccaatccggacagagcagaagttgcggatatctcgatggtggttttttag

SEQ ID NO: 162814 - DNA, 1928 bp, Arabidopsis thaliana landsberg
atggatcatcaaaattatcaataccaaaatcctttcgagagacgacccatccttaaatccaaagctcctgctgtgaagtggatcaaagaatggtacttttctgattccatcacttatacgtcttttagattacagattcttaaaagtttctcctttgttttagggtaccacaagatattgttgctacaggtggaaagtgtcatctacacaaatgggtcacaggtgaaattgtgatgttttaatctaattttcatgtttgtgaatgttaaattgtatcattgtgttgttgttattaccagaggatacttttagcagacttaaagaaaaagagaaagagcctgatgttcctgagcctgaacctgaaccaactacagagattttgtttctctgtagttatgatggttgcgggaagactttctttgatgttagtgcattgaggaaacattctcatatccatggagaaagacaatatgtttgtgatcaggaaggatgtggaaaggtttaataatatcctctctttggtttggcttacacactcactttcatgatatattgaagccatcttgttttgttttttgtaacagaaatttctggatagttcaaagttgaagagacattatcttattcatactggagagagaaattatatatgtacttatgaaggatgtggaaaggtgattgattttgatcactctcactagcttagtttatttggtgtataattaggcaattaggcaaagggattgtgttgcgtgttttagtaactttctgtagttgtggatgcaggcattctcgttggattttaaccttaggtctcacatgaagactcattcacaagagaattatcatatatgtccttacagtgggtgtgtgaagagatatgctcatgaatacaagctaaagaaccacgttgctgcctaccatgaaaaggtatcattactcatttgattactcattcgatagagtgtcatgaaaatatgttttttttcttgtgctaagacagagcagctccttagtcagagtctagctccacgttgcttttgtgacttcactttgtgtggttagtttttacgcttgggtgtagtttttcgtagctagaagtaggcgtaaatactatcgttgaggttttagtaatctcattcgatgctaactttctttctggagtagagaagtctaattgattaaaagtcgcattttctactaccttcttactgtatctacactgtattagtaggttgaaagttgtagatgacgcatagacagaactttgcatcggttctatcatgtttacacccttatattatccatatttgtaagaatcttagaacttatctctctcaatttcacaacttgtttaacagaatggtggtggagagactcccaaatatacaccaccagcagagaaagtattaaggactgtcaaaacacctgcaacagtttgtggcccgtcttcggatcggccatacgcatgcccttacgaagggtgtgagaaagcttacatacatgagtacaagcttaagctccacttgaagagagaacatccagggcatttacaagaagagaacgcggatacccccacactgaacaagcacaatggcaatgacaggaatgagatagatgacgggagtgaccaagatgtttacaggaaacacgctagtaatgggaaaggccagacacataaacaacagagcagagctaagccaaacatgaggacaccaccagccaaagttggaaagaaaggttctacctcttcgcctgccaaagcaaggattgcaaaaaaaccatggcaagcaaaagaaacttttgaagaagtagaaagagaagaataagaagatagcgaggagacagaggaagatagagataatgtggaggatggctggaccgttggcgaacacaacgaagattatgaccacgattaacagaccgag

SEQ ID NO: 162815 - DNA, 3859 bp, Arabidopsis thaliana landsberg
atggggcgcgataggatcagcgaattaccagatggtttgctaaatcatatactcatgtaccttcacatcgaagaatctattaggacaagtgttttatctagcagatggagaaacctctggcttaaggtacctggtcttgacgtgaacgtacatgacttccctgctgatggaaacttatttgagagcttgatggacaagtttcttgaggttaaccgcggacgcctacaaaagttcaagttaaactatgaaagtaatttgtattatctaatggacagatttgtgccgtggatcgctacagtcgttgatcgcggtattcagcatctagatgttacggccactgattgtcctccatggaccattgattttatgcctaccaacatttgcaagagcaagacgttggtgtctttaaagctcgtaaatgtagggcttgacactccaaagtttgttgtttctctaccttgtcttaagatcatgcatcttgaagacattttttatagtcctttgattgcggagaagcttatctcaggctgtcctgttcttgaagatcttaccattgtaaggaatcatgaggattttctaaactttctgcgtgtgaggtctcaaactttgaagaacttccgtttaacatttgattggggaatgggtagtaacgatttttcggtcgagattgatgcaccaggacttaagtacatgagttttagagatagtcaatctgatagaatagttgtaaagaatttgagttccttggtcaagatagaccttgatactgaatttaatctcaagtttggcctaggcagtcctttgtttctcttgtactacactaaaacatatattatccgagattgtcttacctatatttctattttcaaacatatcatcatctctcatctaactctatatgtttctatatatattggaagtctccgcctctgatacaacaatccaatttacttttaatttctcacatgtatcattttcattattcttgcatgttctttatccttattccaaaatcggaccggttagaaaattccataacttatatcacttgcaggctgcgtactcctgctcatcgttacaactattgcatgaaattgttttaggtcatttggtgtttgagaaaattgatattttttgcctggatctacatggcaaatcatcctccactgggaaccactaaaccattaccattagaaatttagaatgagattccaatttctgaaccaaagaagaagaagaaattattgaactattgacatcaagtttcttataagcatatggtttgtatgtcattctcttctttccaatagttcaattattattttgtgcaaattcatatatagggataaaaagccaaaaaccaataggctttggctcatggttgcttataatgtttcaatttttggccgacattattattgtagaggtttgcaactttgcataaacttaagagttttttagtaataaaacctctcaactaaagatgaatcctaaaaacaccctcaactatatatttaataagaaatccctcaacttaaaatccgtttaataaatttcgtccatcaacattgtcgtgaaaattggacgaactacggttaaattgacattaaaaaccgacatatatacatttaaacacatgaatagtcaacaaaaacagcaaaatgttcttctcttcgattataaattcccaaactttagctctaaagttttcaaagtgataaatctaaattgatgaaattagtctctgaagtttatgtggtgttaaagtcgattatgagaaattctgaaaaatattacgttataatttgaactgtccaattataacgatactgtagatagagggaaattttcattagcatatttgaagttgaaggattaattactaaatatgaattgataggttttcttacaatatatctttagttgaggaggtttattactaaaaaccctaagctttatgttttaacttgttttggtcctcctcctttaggcccaactaaatgaaaaaactctaatccatcaattgtcacttggctatatatctccggcgataatctgtcgactgtcgacaaatcaaacctacgaaattacgtaagaaatattaatcgaaaatttgggataaaaattgagaaactaatagagcggattatgcggtgagctatcacaacaaacagaacgagatattgttccatatatttcggtaatcttagtttgttgtgatgtagatatgatctccgtagatattctaagatagtgtttgtaatctatttaagcgcttgtaatctcagttctgaacatatagaaaatacatttctcttccattacgatctctgaatctatagaaactagccctaggaatcgatgttgttgttgacttgtgttgttcatgatctagggatgggggagttcgattatatcagtgaattgcctgattgtttgctaactcagatactcttaaaccttcggaccaaagattctgttaagacaagcgtgttatcgaagagatggagaaatctttggttaaacgttcctggactcgaattattcacccttcaattcacatatcctcatcgcgaagaaattttggtaaggtttatggacagatatatggagtttaagtgcaggtcacgcctgcaaaagttcatgataacgtatgtcgattgtaaaggttatcgagatcgattaatggagttgatcggtacactggttgatcgtggacttgaacatttgtatgtttttatgcacacttgtaacagtgttgatttcacacgtctaaacatttacaagagcaatacattggtctctttgaagcttcataacgtagagttaaagaattcagactttgttgtttctctaccttgtctcaagatcttgaaactggagaatatttgtcacggtgaggatggtcctttggtcgtggagaagctcatctcaggatgtcctgttcttgaagatcttgagctgattaggccttttgatattttgacacacaaagttcttctgcttctgcgtgtgagctctcagactctgaaaagctttaccttacattttgcgatctataaggatcgtacagatttttcagttgagattgatgctccaagactcaagtatatgactgttgaacagagtcaatctgatagcattgtggtaaagaacctgagttccttgttcagcatcgacattggtactaaatttaatcctttgagacatgaggatctaaggatgcgtaatattttctatgattttttaaccgggatatctagtgtaaaacatatgagcatctgtttgtggagtctccaggtatgtgtttatataacaatttaatgtattaattctcaatgaaacatatctgatatgcatttattcttcttgcagaggttctctccttattccaaacccggactgattcccaaattccagaacttgtatcatttaaaagcacagatgtggagctcatcaacacacttattggaagcgtttcttgagagctgcccaaatctgaaaaacctcatcttggtaagaagaatctgtgattttggcaaaagaacattgttgaaacatatcgtaaaaactcagcttgttcatttcgcaggaatataatgttgaattggatcgagagcaagtggactttaccaacgtgcctcaatgtttaatatcgacgctggagtatgttgagattaaagaaccgaatgagaaaagtacgattaaactagtgaactactttcttgagaattcagcagtcctcaagaaacttactctacgtttctcatattcttcttctatccacataaagagctacaagaagcttcttacatcaacaaagctttctcccacatgtcaagttatctttggttgttga

SEQ ID NO: 162816 - DNA, 1010 bp, Arabidopsis thaliana landsberg
atgttcgaggattatctttctgcgaaatatccatccttgtccgaaaaagaactctacgtcagaagagctgaagaatatcatctatgggttaaagaatatgtaagtctactgtaattttggttcatgaatgtaactatttgtctgttttcttgtagctagcgtgatttaatttaagatcatattgatattgtttatctatattatgtaggtaacatattggaacagtaattctccatttcctacttgggttcaagagattgtgcaaggacctttgaacaaggttaaaacttggccaatgtatttcacaagaggatatttgtttcatacgcaaacccacggtgctggacgaaagacatgtaactatggggtatgtgttaaaggtgaaaattacgttgattcatctgatgaagcagatttctacggtaccttaactgatgtcatagaactcgagtatgagggcatcgtcaatttgaggatcacactttttaagtgtaagtggtatgacccaaagatcgggagaggaaatcgccgaaaccatggtggcgttgtagatgttctatctacgaggaaatacaataaatacgagccatttattcttggtacgtaattaagtatacttaaaatttctaattcattaataaataatgttgtatatatttttgttgatatatgtataacatgtttgaacagcatctcaagcagatcaagtttgttatattccatatccatatagaaagaaaccaaagaacatttggctcagtgttttaaaggtcaatccaaggggaaacatttctggacaatatgaaaatactgatccgacactgttgcaaaccgaggatgatgaagctgttttgcagattacaattgaagatcttgtaatagactatccggtagcagacgtaaccctaatcatcctcgattacgatattggagatgctgaaccagaagatgaattccaatgtaatttatcgtcctcggatgaagatgaaatagaagacgaagatgaataa

SEQ ID NO: 162817 - DNA, 934 bp, Arabidopsis thaliana landsberg
atggatgatatgaatccattctatcagtcatcgggttttatggacctgttgcaaagtcaacaagaagacatgtctcagtttgcaagtgggtcaactgaagtcccagcttttagtagtcaactgtctgaagaaggaagtgagcttgaaggaagtgaagatgaagtcaaaccgaagcaaagtatatcacgaaagaaatggacagcaaaagaagatattgttctcgttagtgcttggctcaataccagcaaggatcctgtgattggtaatgaccaacaaggtcaatccttttggaaaaggattgcagcatatgttgctgctagtccttcccttgatggtctgccaaagagagaacatgctaagtgtaaacaaagatggggaaaagtcaataaaagtgtcaccaagtttgtgggttgttataagacagcaacaactcataaaactagtggtcagtcagaggatgatgttatgaagctagcttacgagatctacttcaatgataccaagaagaattttactttagatcatgcttggagagaattaaggtatgaccagaaatggtgtgaagctacaagtcgtaaaggagatgaaaatgctaaaagaaggaagtgtggggatggtaatgcaaagttcccaaccaatccatgttgaagatgattcagtcatgagtcgtcctcctggtgtgaaggcagccaaagctaaaggaaggaagtcaaccactgtaaaagaaggaaagaagccagccacggttaaagatgattcaggccagtctgtggaacattttcagaatttgtgggaacttaaggagaaggattgggatcgcaaagaaaaacaaagcaagcatcaacagcttgaaagactactttcaaaaactgagcctctttcggacattgacttgttcctaaaaaataagctaatcacggatctttggtcataa

SEQ ID NO: 162818 - DNA, 2478 bp, Arabidopsis thaliana landsberg
atgcctatcgccggtcgaggtggctcccgaaagcgtaagacgacgccgaacgtcactcagagagccggcaccgtcggatcaagacttgcaaatcttcctccccaatacaacttcactccggcaccggcggttcaagttcctgcgacggagccggctcaaccacagcatcaagctcctccgcctctatctgaagaggtccactacactccgccgccaacaacgccacctcagcaaactcctcctcagtcgcgagattcagacgctccagcaaacagccacccttcgtctcaagggaacaacttccaagaggaagttcctgggacgttgccggagctacaagaagactcggcggtggctctgcaagcgacactctccgtgccaaacagggagcagtggtgttgtgtcttgtctctgattcccaaacctaaaaccgagtggtatgttctcttcctctattttattctagtgtttttagcctgtgtagtgtaactcgtgttatggtctgtagaatggcttgttgtggaacatagttgtgaatgatggttgttggaattggatgtttgttagggtttgtgtaacatagtagaatctgcctttgttctaaactcgtgtgtgatcttgttaagttcttcactgtgtctataatcttgttaagttatttattgtgttctgttgtgaatcatgaacataattgtggaacatttgttgattgttgaacttagcatgtttttggctttgacattgaggatctgtctttgttctatacttgtctataatcttgttaagttctttattgtgttctgttgtgaatcatgaacataattgtggaacatttgttgattattgaacttagcatgttttcggcttcgacattgaggatctgtctttgttctatacttgtctataatcttgttaagttctttgtgttctgttgtgaatcatgaacataattgtggaacatttgttgattgttgaacttagcatgttttcggctttgacaatgaggatctgtctttgttctatacttgtctatacttcttctttactgtctatgatcttgttatgttgactattgtgttctgtgtgtgatcttgtcggcttatacttgtctagaatcttgtagaatctgcctttgttcaattatatagtctgctgtagttgtagtgttttggattttaaacatgtttactttctgtctgtgttgcatgtgtttggaggtttactcgcgacagaggatctaaattggttagaaagatcacacggatttttactcaaaagttcaatgctccctactataattggtcctgtgtgccattggataaaagagaaagattgtttttagagtttgcggtaagcttcttgtatttctccaactttcattagactgtactatttaatctgtcatttgttcactaacttcacactttttttgtagaaaactcaccactgggatcccttaataacagggacagtccaatactacttcaatgagatcgttaagaggcgcttgaaggacatggttagcaccgcaaggagaactcgagagcagcctccatggattggagaaactctgtggagaaccgtgtgcgactactgggacacagaagaggcacataaaaggagtaagacctattccaaagctcgtctctctgactgtaacggtctcggtcttcacgtccactactctgggccaaagtctttccaaaaaatccaagatgaattggtaagtgtttctgcaatcttcccatgtgttttagtgatgttcgtttaactgtgtgtgatgtttagtctgttgatagtaataaagcttgtgatctgtgtttgcaggaagaaaaaatgggaagacctgtccctcttggtgaggtgttcatccagacacacactaagtcgtatgggacttatgttgatcagaaggcagagaagattgctctggcgtatgagcagaatgtgagagagaagctgtctgaactagaggcggctgcttcacgtcctcgggatctcacactggatgagtatgcagccatatttctcgaggtaagatgttctttgtctttttcagagtcttagagacatttaggatctgtcactaattatcttcctctttatttcttgcagtccacagaaaaggatgcaagaggcaatccttatggacttggctgtcttaaagaaactctaggcagtgccaaccgccaactccccggagactcaacctttaaagccttagaagaacggctgcaggaagctcagcggcaaattgaagaacaggctgcatataacgagaagcgagatgctgaaattgctgcccgagaagccgagacagcccgagtcacagctgagcaaaaggacaagctcgagcacttgtccttagtcgagaagtatctccgccaaaccgatccgcagttcttggacttcattgccacacactcttccacatccacagagcgtatccgaattactcccccatctaatgatccatag

SEQ ID NO: 162819 - DNA, 1727 bp, Arabidopsis thaliana landsberg
atggctatttctaaaataacccttgccatcatcgttttacttctcgggctcactgagaaattatctgccttgtcgagtagttgtaattttccggcagtttttaactttggagattcaaattctgacaccggagctatctctgcggccattggagaggttcctccaccgaatggagttgcattttttggaagatccgccggaagacactccgatggacgtctcattatagatttcattagtaagtatctttgattttcaattttatccttttgtaaattctactaactatattcattagcaacttaattctacattgattttagagtataagataagagaaattttgtgttgccaatttgttaacacttagcttaacactttgctctatatatagagttgcagaaatttctattttagagtcgattatagagtagggttagagaaatattttgcatttttacttagagtagggttggagatgcccttagtatatttcaaacacatatttgcttctagttattgaatcgattttgacgatatatttgttatgattttcggcagccgaaaatcttactttgccgtatttaacaccatacttggattcggttggagccaattaccggcatggtgctaattttgcgactggtggttcttgcatccgccccacacttgcttgttttagcccattccatcttgggactcaagtgtcccaattcattcactttaagactcgtaccttgtctctctacaagcgaaccaacggtaagttcatccggttaagtcatacaaattaccaaaccgggatttaaaactgaagctagtcttatacttgtttttaatgagaactttgttgatatttgttttttggccgtaggaaaagctccattctgcaaagaagtcctgcacggcaccaaagatttgtcaaaagctctttatgcatttgatatcggccagaacgatctcgccattgggttccaaaacatgacagaggaacaactcatagtcaactatacccttaatcatagaaaacctcaccattgccttaaaagtaagtatcttaaaattatcggagactttggtataaaacaatctctaacaatgatttattttattagttgttatacaaagaaggagcaagattcttctcaattcataacaccggaccgactggctgtttaccgtatcttctgaaagcttttcccgctataccgcgagatccctacggttgtttgaagcctctgaacaatgtggcaattgagttcaacaaacaactcaagaacaaaatcactcaactaaagaaagagttaccttcttctttctttacttatgtttgatgtctactcagccaaatacaacttgatcaccaaagcaaaggctctaggtatgcattaaaccaattaaacggttcgatttattggttccggttagactaaagacgtcttattgacttccggttttatcaaatctataatgcaggttttattgatccttttgactattgttgcgttggggctatcggacgcggaatgggatgtgggaaaacaatatttctaaatgggacggaactctatagttcttcctgcgaaaaccgtcaaaatttcataagttgggatggcatacattacaccgaaaccgcgaatatgctagtcgcaaaccgaatcctcgatggttcgatatcggatccacctctccctacccaaaaagcatgtaaactcactaaaaaataa

SEQ ID NO: 162820 - DNA, 4822 bp, Arabidopsis thaliana landsberg
atggattctactttatcggaagtaaaaatcgtttctcaatgctttgttaaacccaaaaccatccctgaaaaatggaaagagccataccatttatcaccgttggatcttgtgatgctctctatgcattacctccaaaatggtcttctctttctcaaatctgatgatgcaaccaaaacaaaagatttcatggagacttggctacaaaagcttagagattctctagctgaaacccttgtccatttttatccgctcgcgggtcgtctctcgactttaaaaaccgataatccgagatcctactctgtgtttgtggattgtaatgacagtcccggagctggatttatccatgccaaatcggatctaagtgtaagagatattgttggatccaactatgttcctttggttgttcaatctttctttgaccatcacaaagctgtgaaccatgatggacacaccatgagcctcttatcagtccaggtttgttatcatccctttttggaggatttttaggtttatagatttagttagatataccatatatggaaactaaattaaatacttcggtttggtttaatacggtttcagaaacttgtatggtcaatatctgacatgcatttgtattaccgaacattgagtattttcggcttcaacatgcagttttagttcagatttagattctcagatatatggttctgtttgccaaattaaacggataggctcacttgtgtttgtgtaggtgacagaattggtagatggaattttcataggactatctatgaaccatgcgatgggagacggtactgcattctggaagttctttaccgcttggtccgaaatcttccaaggacaagagagcaacaaaaacgatgacttgtgtcttaagaatccaccagtcttaaagcgttacatccctgaaggatacggtcctctattcagccttccatatagccatccagatgaatttatcagaacctacgaatctccaatcctcaaggagagaatgttctgtttctcatcagaaaccataaaattgcttaaaacaaaggtcaaccaaatatgtggaacaacatccatctcatctttccaatcgctaaccgcggttatatggagatgcataacaagggcgaggagattacctctcgatcgagaaacaagttgtagagttgctgctgacaacagaggaagaatgtatccaccgcttcacaaggattacttcggaaactgcctctctgctttgagaacggctgcaaaagctggtgaactattggagaatgatcttggatttgctgctttgaaagtgcatcaagcagtagctgaacatacgagtgaaaaggtatctcaaatgattgatcaatggctaaagtctccttatatttaccatattgatcggctatttgaaccgatgagcgttatgatgggaagctcgccgaggtttaataagtatggttgtgaatttgggatgggaaaaggagtgacgcttagaagtggctatgcgcataagttcgatggaaaggtatctgcttacccgggaagagaaggagggggaagtatagatttggaggtatgtcttgttccagagtttatggaagctttggaatcagatgaagagttcatgtcccttgtttcactttgagaatttaccaatttcttccaagtttctcaacatttttattttgcacctgatttttcaaaaagaaaagttggaaggtaaagttacaaccctataatcgatatatataatttcgactttgaaatctaaaagtcaaagaaatgttgcacctgttttttataaatttatataaaatacaagttttatattgtatctcaatattgttagtaagatgatataaatattttaaaagggttacaatttgttcccttttgataaactttaattacaaatactattttattttagatagtaattcacaagacctaatagattcttagtttacgatatatatcttaatcatcatattgatattaatatattaattttatccacgctatattagtatatttgttggttatgttgacgactccatagattactcattagttcaaaactaaaatcagagtaggatgataccaatctcaacaaaatattataccatcactagaatcatatccaaaattcatacgttaaaatagttgaactattctctttttatatctttctcctaatacagttaagtaataattagaaaaagagttagaactcacctgtaaaagaattcagatcgaacgggtcactaaccgaatattctaaaacttctctaactaccaaataattcatcaaaattcaatcgttcattataaaaatattttaatctgacctgtgaaatgttttattgcctgagcaatctaaatctgaaatcggttatcatacctgctataatcgtcttgctattaaatggtgacatgcgagtttggtcacggcaccgttgccattcaatacctcaatcttagctatcataattttgttcccttcaatgatcaaatattatataatactagtatatagtatattttctgttatttaattaaaacttgtcttttgaaagttagaagagcagagataacatgacaacaaaaccggagtggacaatcgatctattagcgttgaaattaaacaaagactgacaacgtgcccactatttgtattactcgtattaattactacagatttgtcgacgtcagtgttaatttctatgataatataataacaagtggcattgatataataactaagagtatacagaggaaatactttattgatcaattattacaagaaaccaaagtgctattacccaaacactaacttgcattctctccacctctgcaaacaatgagtttgtactttgaaggacacgagcatcacgtatcaatcattaaacatcgtgatggtttggaatgtgatgcttgcgatcgatcgtttggggatgtcatctcatgcggtgaatgcaagtttactgttcacaggaaatgtgtatttatgttcgacatacaagagatattcgaccacccttctcatgatggacattgtctcaagcttcttacgactggagctcctgatcacaccgaccaaaaatgtcatctctgcggtaaaaagaccaagcgtcttctttatcattgctctgattgtaaactcaatgtggatattgattgcataattgattacatatgtgctcgatcccctctgaaattgccgtggcacgaccaccctctaatcaaggttgatcgcggagctaatatgccttgcgacttttgtaataccagcggcatagactattgttgccctcgttgcaggttcatgattcatgagggatgtgcctccgtatttgactcaccagagattactcacccttctcatgtcagacaccctcttaagcttctcagcaatggagctccagattacacaaacttaaaatgtcatatatgtggagatgccactgggaacttactatatcattgtgatatttgtaagttcaacttgaatatgcgttgtgcgattcgagaacccataccagttgctctttcaaatatgaaggtccatgagcatacactcacactcatgccaagattgatctcctttgtttgtgatgcttgtgggatgaaaggcgaccgtgctccctatgcatgtgttcaatgcgatttcatgatcttccatcaagagtgtgctaaattacctcgtatcattcatgtcaaccaccatgaccaccgcgtttcgtacaagtatcctcttggtccaggagaatggagatgtggagtttgttgggaagaaattgattggtcatatggggcttattcatgctctctttgtcctaattatgctatgcattcactgtgtgcaacaaggaaagatgtatgggatggaagagagcttgatggagtacttgaagaagttgaagatattgagccatttaagaggaatgatgataacaccatcactcatttcactcatgaacataacttgagcaaagatggtattactttgaagaagagcatcttgtgtgtagcatgtgtttgtcccatcggtaccgacacattctacaactgttcagaatcatcttgcagtttcgttctccacgaaacgtgtgctaatatttcaaagaagatacgacattttctgagcccagaacctctcactctttgcttccaaagcgctatcaacgatgaccatacatgcagagcttgtcatcaagttattttcggaggattcttctactctatgaaaactatcgatgcaaattttgacatacaatgcagttcgattactttgccttttatccatggaagtcatgatcatcccttactctacataaaagaagaagaagttaacgataaaacttgcatgagctgcgacagcgaccgtgctgcagtcttcctgggttgtatcaaatgtaattactttttggattttcgttgtgctactatgccaccaacggtaatgcttccaaggtatgatgatcatccacttactctttgctatggtgaagtaaatgcaagcggcagatattggtgtcatatttgcgaaagaagaataaatccaaagaattggttctacacttgttacgattgcggtgtcacattgcatactttgtgtgtacttggagatataaggaatgccaaagaaggaggaacagccggacaatttgaattgctacctaacaatagatctacacgaccattttgcaactactgtcatagtcgttgccctggttcattcattattaagatttattacctcacccaagtatattgttctttttattgtgcctcatatgataatcaggtattaagaatgcatttcaaggctggtgac

SEQ ID NO: 162821 - DNA, 1348 bp, Arabidopsis thaliana landsberg
aagatggacccgtcgtcaagctccagagcacggtcaatgccaccgccggtgcctatggagggattgcaggaagcagggccttctccttttctaacaaagacgttcgagatggttggtgatccaaacacaaaccacattgtgtcttggaacaggggaggcatcagttttgtcgtgtgggatccacattccttctcggccactattctgcctctatacttcaagcacaacaacttctccagctttgtcagacaacttaacacttatgtgagtatctctgtttctccactaaacgaccttactgtattttttgttttttttttcactatagtgttcccttaatcttatgtcttggaggaactcaacaatgccttcggcctttaattactgcaaaaggttaaacaatgtgtctatttgtgaattacttgttcactggatagtttagtactaagtaattatgctcaataataataatggctggcgaaacaagctagctagtagtgaaagagaagaagtttcttcgcaagttctggaaacctttatttatatcaaaataaaaaagttctggaaacttttatccatatcaacctgcaataaaatattcaattattccatccaacaaaatataaaattgaagataatgttgctttccttttacagcgcagtagagtggcaggttcttcgtctgttatatataacatgtttacgtcgcaaaccaaaaaaaaacttatattatgatattcgattacttatttatctgcagggattcagaaagatcgaggcagagagatgggagtttatgaatgaaggtttcttgatgggtcagagggaccttctcaaaagcatcaagcgacgaacctcctcttcttcccctccttcgcttaactactctcagtctcagcccgaggctcatgacccaggcgtcgagcttccgcagctccgagaagagaggcatgtcctaatgatggagatctcgacgctcagacaggaggagcaaagagcgagaggctacgtccaagccatggagcagaggattaatggagcagagaagaaacagaggcatatgatgtccttcttgatgcgtgcggtggagaatccttcccttctgcagcagattttcgagcagaagagagaccgagaggaggccgcgatgattgatcaggctggcttgatcaaaatggaagaggtggagcacctgtcggagctggaggctctggcgcttgagatgcaaggatatggacggcaacggactgatggtgtggagagggagcttgacgacgggttttgggaagagttactcatgaacaatgaaaactccgacgaagaagaggcgaatgtgaagcaagattag

SEQ ID NO: 162822 - DNA, 2584 bp, Arabidopsis thaliana landsberg
gttaggcaaatcgattctctcaatggctctttcatttcgaatttgttcgtcgtctccgttaatctgcagagccactctctcaaacggcgacaacagtcgtaactaccatacgactgatgccgcttttatccgacgcgccgccgatttgtccgaaatgtccgccggacttacttcacctcaccctaatttcggctgtgtaatcgccacttcttccggtaaagtcgccggagaaggatatctatacgctcaaggtactaaaccggcggaagcgttggctgttgaagctgccggagagttttctagaggcgccactgcttatttaaacatggagcctggtgattgtcatggtgaccacactgctgtatctgctcttgttcaggtttttgcttctttctcttagatttttctgtgaataagccataagccaatgattgtgtgatattaggaaacaatttgaccaaattgagattgtatagattaggcaggaattgaacgagttgttgttggaataaggcatcctttgcaacatcttagaggctctgcgattcgtgaattaagaagtcatggtatcgaagttaatgttcttggagaagactttgagagtaaagttcttgaggtatctatgtcttcttactcttcaatttgaagttaattgttaggattctgttaactaaatgttcaagttcttataggatgctcggaaatcgtgtcttcttgtgaatgctcctttgattcatagagcttgttctcgagttccgttctctgttcttaagtatgccatgactcttgatggtaactatttcaacctccatttcatatgtttgtaggatagctgttttagctaacgttttttttgtttattgataggtaagattgcagcgagtagtggacatgcagcatggataagtagtaaactctctagaacccgagtgttcgagttgcgaggaggaagtgatgctgtgatagttggaggaaacacagtacgccaagatggtaaatattgtatcttaaatctcgcatctttacggatgcttacaacatattgaatagatatgtgaaagttgtgcaattttgtaactgcagatcctcgattgactgcaagacacggacagggtcacacccctacacgaattgtgatgactcagagtcttgatcttcctgagaaagctaatctatgggatgtctcggaagtatctaccatagttgttacccaaaggggtgcaagaaagagtttccagaaattgcttgcgtccaagggtgttgaagttgtggagtttgacatgttgaatccaagagaagttatggaatatttccatctccgtggatatctttctatactatgggagtgtgggggaacattagctgcatctgctatatcatccagtgtcatccacaaggtacccattatactatatccatacttatttgtagtcatcttatgtttttgtctggctaaatctcattttcttacacttctttctctcaatgtaattcatttttcaggttgttgctttcgttgctccaaaaattatcggtgggagtaaagcaccttcccctgtgggtgaccttgggatggtagagatgacacaagcattgaatttaattgatgtttgttatgagcaggtaatttttttgctttatgaattaacattcactgtgacaagttaaccatgttactgaatctggcctcttagttccgtgggtttaatctaaatccttgaactacaggttggtcccgacatgcttgtcagcggatttcttcagcccataccagacctcttacctgttatcccatcagaggatgcaactgtcgagattgaccccagtgttgacccctttgaacctagtatcatattcttctacaaaacatgggacctctatggaagtttctcaaatttttctccacatccaattcgaatgccctatggcgaggagaatgatgattacatgacctggtccagtgtggaacattactatcaggtaccacacaacagtccatgtaaaatggtatcttgctctttcaaaacaacataatctcttgatccttcacccaaaaactttaaaggcaaacaagtttgttggggtcgaaaatccaaaggcatatgattgcgttgagaaaattagaacagctagaagtccagaggaggcagctctgataggcagatcaacactgagacagaaacctgaactggtatgaataaaagttgaattgtccagtttcgagcatcaaagcagttttcactcgtttgttgatctctcgagaatcgagatcgttattcaggggatcaataatactgcattctcgctttaatgattgttttaggttcggaatgattgggaagatgtgaagatagaagtaatgtacaaggctttaaaatgcaagttctcaacttatcctcacttgaaatcaatgttgctctcgacaattggaacagttctcgtggaggcttcaccgcacgatctattctggggaggtggccgtgaaggagaagggcttaactatcttggtcgactgcttatgcagcttcgttctgagtatctgggcgaatcctctgtttcagctgaaaagacttcttcggcctga

SEQ ID NO: 162823 - DNA, 1247 bp, Arabidopsis thaliana landsberg
atgtattacctcttttggatcaggttaacaagattcaatgaaggtgaagttcctgtatatcatgtccctggagtatctaatatatttatgcacgtcggccgtccaagtggtgaaatgcatgtagattggctttcagagaaagactaccaaagcgcacatgcatatgttttaagaaattgtgactattttaaaccgtttgagaggtatttttaatcactcgttgtttgtaaattttcactaagatcactttgataaatttttcctcgtttgtaaatgtagtatgttcgaagattatctttctgccaaatatccatgcttgcccgaaaaagaactctacgcgagaagagcggaagaatatcatctatgggttaaagaatatgtaagtctacatcaattttggttcattcgaaaggtgatcatttaatatatactaattgatattgtttatctattatgtaggtaacatactggaacactacttctccatttcctacttgggttcaagagattgtgcaaggacctttgaacaaggttaaaacttggccaatgtatttcacaagaggatatttgtttcatacgcaaaatcacggcgctggacgaaagacatgtaactatggggtctgtgttaaaggtgaaaattacgctgattcatcagatgaagcggatttctaaggtaccttaactgatattatagaactcgagtatgagggtatcgtcaatttgaggatcacactttttaagtgtaagtggtatgacccaaagatcgggagaggcactcgacgaagccatagtggcgttgtagacattctatctacgaggaaatacaataaatacgagccatttattcttggtacgtaattattcttaagtccaaaatacgtttcttttttaattattaataatctatctttgatatatgtatacaggatctcaagcagatcaagtttgttatattccgtatccatatacgaagaaaccaaagaacatttgcgctcaatgttctaaaagtcaatccgaggggaaacatttctggagaatatgaaaacaatgatccaacttttttgcaaacagaaaatgatgatgctgttttactcactacaattgaagatcttgtactagaaaatccggtagaaggcttaaacccaataatccttgattacgatgttggggatgctgaacaagaagacgaattccgatgtaatttatcgtcctcggacgaagatgaagtagaatatgaagagtaataa

SEQ ID NO: 162824 - DNA, 672 bp, Arabidopsis thaliana landsberg
atgtttaggatagatttgcatgcatgttgcatatttgtgttgattttaggtgatttaaagctgttgacgagctatctggaagaagcggacctgatcatgtcaaaccattcgaacccgaggtcgagtaggagcttcaagatctcaagagaccactcgacccccaggtcgagtaaaagaaatcaccacttcgcctcaccactcgaccacgaggttgagtgtcctcatctccatcacctgaccatcactcgatcacatcactcgacccctaggtcgagtgtcttcacctccattatcagaccaccactcgatctcaccactctgccttgcagtcgagtatcaccatcatcaccactcgactgcgtactcgatgacaagcttcagagccttcttcattccgcactcaaccagacactcgagcacaaggaagacaagaagactccaactattcactcgacctcccactcgaccacatgggtcgagtacagtttttaatccgtcccagtactgcgtcgtttaaagtattagggtttcagaatatttggctataagtagcatgtacttcacattttcgtagacaagttttatttatctagttttattctgcagaccttgtgttctagaccttttgtaatccggatttctctttatctattcagtattcagtattcagct

SEQ ID NO: 162825 - DNA, 2078 bp, Arabidopsis thaliana landsberg
atgtacacatttggttgttcagatatccttatgttactatagaattttagagtaatcttttgaaattataaacatgaatatttatgtagttttgtgttagtttcttaacacaagaaggagtatacaattatgatggacggaagtttgagcatgcattgaaacatggaagaagagagactttgtatatcgttacacttgggtggtttgtggacagtgtctgtagaaatggtgtgtatgtctttaaccgagtttgcacattttttttttgtcatttgaaattattaacgctcaaaggagccattcttggggaatgttgttttcaaacgtgatatgatgcggttcggtacgaatttttcgtgccaaattatccgctttactatttgcactacgagtttgcaaattctttgtttattatttctcatgaaatttatcatactagttgtgattgtgttgtagttaagttgagtgagtctttctacgcggtcaaaaatcccggagagactaaggtgaatgaagatggattaaagtcggtttacgcggtagaaaaactacatagagaaggagttcaaggaatagagttcacaggaagcaaggccttggccttgtcaggctattcagtttttatcgatcctgatatttcagaagaagtgagacgccgggttagtcctaaacaccttatcagttttaaacgtatgtagcaacgcccgtggatcaacagctacattccaagtcttgtaggttttacaggtggctgttgaaggaggtgccaaggttattaatcaatggttcattggatgtaatgcaagtcatgttgtatgtgaagctggttctgttttgagatatcttggtcactcgagcaatcttgttacagtaagctaatgagaactcttctattgttacaaataccgcaaattatcagttggttgcatgtgtaatatgtcgtctgtttcagccactctggattcagaaaacattggaagagaaaccaacgcaaaatctagttcaaatgtcagctgatttggccagagatcttaggacaatgcttgagaatcttgggaaggtatcttttgtctgtagataagtattcatgaagtctttagtcctttaatcttgtgctcctacaggaatctcgcagggaatgtgttcttgaagatgcatctatgttaacaaataggacgagaccactcaaagaaaggcagaagattgtggaatccgccaaagagactgtcacaaatcgccacgcaaaggcaattcatctttttctatgtttcatcttcgaaaaccgagcaatcgctaaaccgaactatattttctttgttcataaaacagatggggaagactctgatccagccgttaaatctgagcagccttctagattctatctcttggacaatatctgaaccaacttcaacagctagtgttatcatagatagtttcagcaacaacgacgatatcgaaagaaaatctttatctgccttctttgatgctaaatctaatgattcattcactcactccatgagactgctcacagaaaggttcctatgttctacttcatctctgtaacttgagatccaagctactcttttaagtttataaagctcatgttgtttattgttattatggcatgatagtgagagaatggaattggtatacaaaaaccattttataacattacttcttccaatcgattggtatggtgagatgggaccttcttccaggtcgtatttcagtgaaaccggttttacatgtcagcagattctccaaaacatctatgcattctatcaggtagcaatgtcctcatatgtgccagtatctcgttgaggaaaccattttcaaagtagttttgtgtgttgtatgtactgtcgcaggaaaacatgtcagaggaagaactcaaagcagcaattcacaccaactcgaggcacagtgaaaagctccgagcagcggtctcggtgatgaaaggcgggaagaatgtattcaaacgtattcagtttctcggatccgagaaaggtttggagatgctaaaacgtgttagtagcttcaactgtagtaatgtctatgagcttatcatcaaggcataa

SEQ ID NO: 162826 - DNA, 1725 bp, Arabidopsis thaliana landsberg
  unsure (1)..(1725): unsure at all n locations
ctaccagattcacagcccagcgacgcgatgccagaggttccacagccgattgaatcgaaatctcaagaggtgaagtccgacgaagaactttctgtgcctgattccaagtgggctatgattcttgtcacagacccgccgccaccgatcatcgaaattgaggacgagactcagtcgtcaaccgatcgggttcagaaggctgaaccaaaatttcccgaggctgcaccttctcaaccctctgttgcttcaaggttgcgtaagaggaagcaatccaccgctggacagggtggaaagcagatgaagcaggaaaagggcaagggggatcaccgcttcatctaccttcgatggaatccgattcgtctcgaaggaggctgagaagatgtatgctcatttttcccgaagaacttcattgtagaagagggtttgtctaggaaaatggatgaggctgttcggagttttattgagaaggctggattgattcgtacggtgactgatttgaaaccgtataaggaggaactggtgtttgaattctgggcaaatctgcctacagtgaaggttgataccaccaatgttggtgttttggtgcgtaattgggagtatgagttctcccgtgagaatattaatgagttgtttgggttggcatctgtcgacgtgagacaacaacgaatggacatggtggggttgatggaggatgaggtcgcaaagtttctgactgatggcaaggtcaagtctctgaaggggttgctggtgagtgctttctctccaccaggtcgagagctgttcaaactatgttgcaccaactggtctcaaacatagaatgatgggtatgcacagcctgacagagccaagctggtatacatgatcatgcacaacattccattcgactttgggaggacggtgtttgatcacattcttcagttggcaataaaaccagaaactaagctcttcctgcaattttcaaacctggtctaccagttgatacagacgcaacgccatgttcagatcccagtaaacccaaccgcatcagcagcgtcgacaaagaagaagaaggtgaagcagagtgtagctgcaggacgcaaagactcagccaaccgtagggcgatgaaaattgccatcgaaattttgcaggctgctctagatgcaggtaagtgttctgtgcgatcttcttgctttatactacatatgtctgattgtttacatgatttttgactaagttatgtgctcaagcagggggagataaggccccttcggagtcagatgatgctgggggagattaacttgtgggggagctgtgtttttgtttcgtttctcttgttaagctcggttgtatttcagaccaaaacaacttctcttttgtttttgtttaaaccgatgattgtatcatcgtaaacatgggtctgtaatattttttccacacattgttcactttcagactaatcgttttatgatatttatactagatggtatttctacagtatgcctattagatgtgtgngtgtgtctctcatttgagtttaaggttatatcaatgaaggaatgcttgagtatcaaactcagtcaaaaagggggagattgaagatgcagagtcaatcaatcggctgatggcgatcagagcgttgatgaatttcaggacgctgcatcgggtttcatcagacgcttgatttgcagacatggatgcgagagcaaacgtggcaagctaaggcggatgatgtggagagccaaggatga

SEQ ID NO: 162827 - DNA, 2056 bp, Arabidopsis thaliana landsberg
cacaaaatctatcgagcaagaaaaaaatcagatagtactatcttgacaagcgatataatcacaattacctatgcatgtcttcataataaatcacgtcaaggctcataattacgccacgtggattttaaccgcgtggacacacgttttcacaaggtataaaagaagcaaccctacctctctttcttctacgtgattcgcacaccactgtaaaagtgtaaaaaaactctttttttgttcttcttcacatttcattcgattcaaaaaatattctgttcttagattgtaatctgtttttttttctgtaatctcccattattgggttttgaatttctcgtcattttacgaaaaaggttgtgaatcggcctaatcgatctcggtcgtcataagtgagtgcttcttcctccgtattagctctcaaaaacatttgtgtttctatttgaaacgtaacaatttacgatatttttcctcacaaattaatgtaattgaaacacaaaaccctatcatgcatgatgcacccatatattaccatctttaattccaaaatcatcattttccttccatgatttgtatctgaaatggtcatgcatctatgttgcgcaggatcttacgtgtgttttactaatcgtgaaacaatatcaacgtcagattcttctctatacacttttctttaagtttacccaatcatcatgtctccaagtatggagccaaagtgtgaccattgtgcaacctcgcaagcattgatttactgcaaatccgatttggctaaactatgcctaaactgcgacgtccatgtacactctgcgaatcctctgtctcacaggcacatacgctctttgatctgcgagaaatgcttctcacagccagccgcaatccgctgtctcgacgagaaggtttcatactgccaaggatgtcattggcacgaaagcaactgttcggagttaggacacagagttcagagcttgaatcctttctctggttgtccttctcctacagattttaacagaatgtggtcttcaattcttgaacctcctgtctccggcttgcttagtccgttcgttggttcttttcccttgaatgatctcaacaataccatgttcgataccgcttattccatggtaccacacaacatcagttacactcagaatttcagtgataaattgtctttcttttccacggaatctaaggtaataattaaaggagtgaaaagtgttccttataagttcttgatgaaaaatacagttcttatttgtgtgtatgttccagggatatcctgatatggttcttaaacttgaagaaggagaagaagatctatgtgaagggcttaacttggatgatgcaccattaaactttgacgtaggagatgatattatcggatgttcatcagaagtacacatagaaccggaccatacggtaccaaattgcctattgattgacaagactaacacatccagctttaccggctccaactttactgtagacaaggctctagaggtctctttcgcttttttgttgtcgttgttgtagtttctagtacctcaagaaagtttctaatataaattgtgttattctgtttccaggcatcgccaccaggtcagcaaatgaacatcaacactggacttcagcttcctctatcacctgtcttgttcggacaaatccatccatctcttaacatcactggtgaaaacaatgcagctgattaccaggattgtgggatgtctccagggtttataatgagtgaagcgccatgggaaacgaattttgaagttagttgtccacaagcaagaaacgaggctaagttgagatacaaggagaagaaattaaagcgctcgtaagtttattactaatcattacaaaacagagtttataccaacttggatcaggtttaatggtgtttttctttttttttaattgtagttttgggaaacagattcgatatgcatctcgcaaagcaagagctgacacgaggaaaagagtgaaaggaagatttgtgaaagctggtgacagtgatgattatgatccatcatcaccgacgacgaacaattgaaatttacaaaaa

SEQ ID NO: 162828 - DNA, 1225 bp, Arabidopsis thaliana landsberg
atggaacctgcggctgttactccggaggcagctgcgtccgtagataggcgatcctcgggcaggtcccatggaggaggacgaggctccagaggtgggggccggtcttcaaaccggtctcaggaagtgaggcagacgtccaactccggcggaggatccgcgggaagtaggcctttccactggtcttacactcacgatcgtgatcacccgatcgttgaggacgaggctgggttagcgaacctgcttcgccatatcaaagggaggaactgccaggttcctggagtgaagaacatggccgaggcggcggcctatgctgacatgatggcgaaggagggtcaggtaattatcgataactgtctccttctaatttatatctttacgctagttgtgactttcggttttgctttcggtacgcgatagctgccacaaacaagctggttgctctctatgagcagcgtctgagccaggtcccctcggcgaacgagcatgaagaaggaaaggccctcatcctggagctgacatcgagtgtgaaggctggttaggatcgcgaagtctcgttccaggtacacctcaggtttgacttgtttataaataattcgtcgatgatttgatgattctaacctgattgttatttcaggcgaagatcgagaggctgaaaatggagttgtccacttcaaaagacctcgagaaaggttttgctgagaagatcgggttcatggagatggagctcgaggggttgcaagccgaccagcagacgacgaggaggcagattcatcgcttggagcagaggagggaggagctctccaaaaaggtgatggacctgactttgactgcacaaggggcaaagaaggcggttcacgatgctttagttgagctggctgctgcgtattcgaagctgctggctgggatcaaggagaagtgggtcgccaaaaaggagtacacggtgctggaggggcaagcggctgaggtggagtcgaacctggctttaatcgaccagatcacaaaggctgctatcgatctgaccgtggagaaacctcggctgcaagcagagctggatgacctagaggcgcggtacaaatcgaaggaggtacgtctgatggacgtcgacgagcaagggacgccaattggcttggatgagttcgggagcaacaaagacgcttttccgggaggtctcgcggagggttctggtactgtcttcgctacgccagccggagaatcgagggagtga

SEQ ID NO: 162829 - DNA, 2656 bp, Arabidopsis thaliana landsberg
ccattttctccaaccctaaccctaatggcgccgagaacaattcctcctctaaagaagaggaagagaggattagccggaggaacaaagccaatacatgttgtcatgaaggcaacgacggagcctccgacaacgacagaggagccatcagcgacggagcaaaatccggtcgcaattgagggaggaggagttgaagaagaaccaattccgaccataatcccgaccgtagtggaagaaggagagcagtctgacaacaatgaggaagaaaattctgagaaggatgagaacgaatagagtgaagaagaagagagtgaagaagaagagaaagaagaagaagagaaagaagaagaagaaaaagaagaagaggagaaagaagaagaggggaatgttgccggaggagagtcctcagatgatagtagtaaaaccttgggcgaagagacctcctccgataagaatatgaatgatgagactgtagtggaaaatcaagtggaaattccggcgtcaatggtaagtatttctcaagtatttgaatggtatgaaactagtataacaggataatactatgatttctggagaatattgtcattactaggatataactatgtgtatgaattttgggtaacattggtagtactaagatagaactatgtgtatgatttctggataatactgtcattactaggatatacctatgcgtttctgggtaatactgtcaatactaggaaacaactacgtgtatgatttgtgggtaatattgtcattactatgatataactatgtgtatgaatctaggtaacattggtagtaatatgaatgaatatctgttgtaggagatcgacgaggaaaccgaagcaataccaccactgagtatgtatttcccgccctccgaatatgtgaagaaaatcaagctttcaactcggtgctatattcacgaagtgttgactacattcgagaatttgcagcctccgatgagcacgtccgagagggcatggtttgagaaccattcgagtttgcaacacatcttccacatgccaagagacccaaaccaccgacttatggggatgtggatgctccttcttcgcacgacgcgcattgaaaggaagaaagaagcgtggttcatcgtcaatggcgttccaatccgatatggtatattggaacacgcattgatatcgggcttcaattggaagaactatacacttgggtataaaaatacgaaggaatttggatttcaagaagaagcatttcaaaaatactgttgtgaaacgcgaagacatgagagataagctcataggaatggtaccggcgggtgaaagatcaaaaaaaaggttgaggatgatggtcttgtatttcttaagcaacattatcatagcacctatcaagatcaggaataaggcacctcaagtgaatgaattttgcctcaaggctgtgagtgatctcacattttgtaaaaattttcaatgtagaaggtattttttaaattacatgttaggaaccatctcacacacggtgaatcattttaatggttcagtcaccaacaactagaagtacatatggtcggttccgggtttctatcttccgatgaaggttagttaaaacttatattaataggtgattatttgcaatactaataatattgtagaatactatttgttattagatattgttttcttattctgtagcttcttgtattcgaggcaatcccatagttgaggaaagaatttattgacgacattgcaggagcagatcagggatctcctaagatgtgcaaggtgaagtttaagaaaaaccatttgaaaggctttcctcttgatactattaatgcagaattgggtacaactcaggtgagttgtcctagatatactattttatgaaacatttgctattctatttagttataataatccattcacactgtttatctttacaggtcattgattgtctcgtcacacctagaattgaggagcacaaactcatgaaaattatcaccaaagaagaagacgacattgacgtggctgatgtagtggtacacacttggttcaagcgttatacagagggccgtctaatcaggtttgatgagctctaccagcaggatattcaagtcctgaagatcaccgcatgaccagagattgcgggtgtacagcatattcctaagtaggtggacaagaactcccgagtttagtttctgtggtgcagatgattgaaaagttggataagaagatggtagaccagctgaatgaaattatagcaatgatttcagatttggataaaagagttgaatcgttgttagcattcaaggatgagcagaaagcagagaagagaaaggtgcgtttcgtaatactatattggtaattgagtaatactgagtagcactgtgtgatctagagtaaaactgagtaatactgatataatttcgttcggttgcagaattaagaagcgaaggaccaagagaaggatggtgatccgaaagagaagaatggtgatcaagagtaggattgtgtcccgacagagaaggatcacgaaaaagatggtgtcccgaaaaagaaggatggtggtccttcgaaacctgtggaagcaaaattcacaaagaggaccactcggagtaccaagatttgaatttggtttattttgtttggatttgaatttgggaatgttattttag

SEQ ID NO: 162830 - DNA, 1008 bp, Arabidopsis thaliana landsberg
atggttaaccatcaaaatctttacgagttgtctccgatggttactggctgaaccatttgtgtcatggtattaagaatttacaaagaattctcaacccgaacgctttcaaactacgtcttgtcttggccgatgaatgggtaaacaattttcttcaatttattttgcattttgcggaatttttatttacccgtgtatccctcacccctaaaatgttgtttgtaacaggacacccaaatagaagcaaccatcggacctcgtttctctcccttctactttgacaggatcgaaaagaatcaatggaaaacgataagtacgtttctcgttcgacctaactgcgaaccaataagaacaactcctcatgagtttcgcattctattcatggatcacaccattatcacttcttccacatcaagagcaaccggtttacttaacaagttcactctatttgactacattgtggatgatgttgttggcaaacataccttggttggtaagtaatggattcttcataaattccattcacttttttcaaaaaatttattttttaaacacatatctctgacatatttcttatagatgttatcggggcactcgttaatgttgggatcatgactaataccgcaagtaacgagaatgatatggccagattcaaattgccgttcacgatcatggataaaaagtacatttcttaaaacctcaatttacagtttttttcaaacatatcatgtttatacattattatagtaagtatataaccacatatttttacatattttcagcaaggatacattggtatgtgaggcttatggagatattgcagtggacttggagaaaagatttcgagcatttcgcaagaacaatgttgttattgctcttgcttggtggaaaattagtagattttatccaggttgtaactggtttaagattgttagccatgcacctatatcaaccatgtatccagaacctgatgttgaggaagttgaagaaatcaaaatggttgtcgactaa

SEQ ID NO: 162831 - DNA, 984 bp, Arabidopsis thaliana landsberg
atggcgactctcaaagcttcctttttgatcaaaaccctcgacagtgacgtcaccggagattttctctccgatctggaacgtcgtgggtcaggtgctgttcatgttatcatgggtcctatgttttctgggaaatcgacctctctccttcgccgaatcaagtcagagatcagcgacggaaggtacagtttattttctatctccgtagattttaattgttagatctatctccgtaaatttcttaatttcgtgttttggttaagcagaagtgttgcgatgctgaagtcgagtaaggatactagatacgccaaagattcggtggtgacacatgatggaattggattcccttgctgggctcttccagatctcatgtcatttcctgagaaattcggactagatgcttataacaaggtaataaattcgatgctctatttggtgtttcgggtcttaattgtgaaggatctgtattgaatttgtgttttctctgaaaaatgattggcagcttgatgtgattggtattgatgaggctcagttctttggagatctttatgagttttgctgcaaagtcgctgatgatgatggtaaaattgtgattgttgcaggccttgatggtgactatttaaggtgcttggtcctatttgtgatttgattactttttattcttaaaaaaaacaattttgttgactgtaatgtggatttgatctttctatatgtagaaggagttttggtgctgtacttgacattataccaatagctgattctgtgactaagctcactgcacggtgtgaggtctgtggacataaagctttcttcactctaagaaagaattgtgacaccagaactgagcttattggtggagctgatgtctatatgcctgtttgtcgcaagcattacatcactaatcatattgtcattaaagcttctaagaaagtcttggaagattctgacaaggcgagaactgaatcttgtgttgctgctacaatctaa

SEQ ID NO: 162832 - DNA, 1182 bp, Arabidopsis thaliana landsberg
atgtgtaatttgttaaacattgagaaagatcctataagggttttgattaccggtgcagcaggtaagaactcaaacaaaagacgatccggtttatgttttgatttataattctatcaatttatttggtttggttcagtgtttttttattggagtcttttatctactactccctacctttatggtcgtttgttcttaatttaattgagaactttctattgaacaggaaacataggatatgcaattgctccaatgattgcaagaggtattatgctaggtccagatcaacccatgattctgcatttacttgatatagagccagcttcaagttcactagaagctgtgaaaatggagcttcaagattcagctttccctcttctcaaaggcgttatcgcgacaacaaatgttgttgaagcatgtaaagatgtgaatatcgtgataatgatcggcggattcccaaggatagcaggcatggaaagaaaagatgtgatgtcgaaaaatgttgtgatatataaagctcaagcttcggctttagagcgttatgcatcagatgattgcaaggttcttgttgtagcaaaccctgcaaacactaatgctctgatcttaaaagagtttgcgccatcaatcccggaagaaaatatcacttgcctgacacgactcgaccataatcgagctctagctcagcttgcagataagctaagtgttcccgtgagcagtgtaaagaacgtgatcgtttggggtaaccattcttcaactcaatatcccgacaccaatcacgcaacagtctctacaaaaactggagacagaccgttaaaagaactagtcacagatcacaactggctgaagaacgagtttatcgtggaagttcagcaacgcggtgcagctgttttaagagcacggaaacagtcgagtgctttttccgctgctggtgcagcttgtgaccatatccgtgattggtttcttggaacccctaaaggaacttgggtttctatgggtgtttgttctgacggctcatatggtataccacctggtttggtttactcgtttccggttatctgtgagaaaggcagttggaagatcgtacaaggactcagtatagacgagttttcgagggagaaaatggatgactctgcacgagagctagctgaagagaaggatttagcttattcctgtctcaatgtatag

SEQ ID NO: 162833 - DNA, 2135 bp, Arabidopsis thaliana landsberg
ctgcggattaaggatgtcgaagtctgaactcatgcggcttgtacctctcggtcatagagggtatggttactggaaaacacggatgatacagctaatcagaggtcaaggagaagatgcatggactgctgtaaaagatggctgggaacctcctttcagcgtaactgaagcaggtctcaaggtgttgaaaccaaaggcaaattggacggaaagaggagaagaacctgtcttagtttaatgcaagagctatgaatgctatctactgttgtctggatgacaacgagtacaaccttgtctcaaggtgtgaatcagctaagcagatgtgggacactttgcagaaactgaatgaaggagatgttagtgtaaaacgaactagattggatcagctagctacatattttgagaacatcaggatggatccttcagaaacagttattgaattcagtgctaaacagagtaagattgctaatgaagctaaaactctgggaaaaacctacaaggaaaagaagttagtgaagaaacttctcaggtgcctaccacagaagtatgttgcacacaaagctatcatgagagtttcaggaaatacagatactctcaaatatgaagcattggttggaattctgaagtctgaagaaatggaagctgttgaagatcaatggaacctgaacaaagggatagcgtttaaggctgaaaaagaaaaagttcctgatccgctgcaggaaatcaaagatgatctattccttatggctagaaattttggaaaagctctgaagcgcgttgaaagaggcagaaccagagacagtcgtgatgcaagagaatccagtcgttggaacataagtgatacagaaaaatcaggcagcaggcctgtgaagaacgagaattctggtaaaaggcgcgatgtgaaatgtcatgagtgtggtggtatgggacacacaaaaccagaatgtcctgtcacaaaacgcaaggatatgaagtgctatgagtgtgatgtgattggtcatatcaaagctgagtgtccaagtattcagaaaagcaaagaaaaaacttttctgagtttcagtgactctgagtcagacagtgaggatgagacaggtggtatgctgaactttgttgctttcagtgcaaaggatgacaatgaatcgagcagtgaggattctgagtcagacaacgatgagacacagattacaagtgcgagctatcgcatcttgtatgacagctggttactgctaagcaaggacaagctgagacttacaaaggagaatctgcagttgtcagcaaaactagatctcttggaggaagaaataaaggaagaagctattggtgaaaagcttccattgcctgataaacagataatagaaagaaagatgaattgtctccagcagagtctgagtcaagaaaaggagaaatctcttttgctggaaagagaactgagtgagaatcacaagaagatcagaatgctgaacaatgggggtaagaatcttgatgaaattctgtctatgggaatagttggatctgatcacagaggattaggttatcaaccttctgtgtcctagacgcctcttgatagacctaagaccatgaactttgtaaagagtacaacgaatcatgaagaggaagatagtaaactcaagtcagctctacagaacacagtcaagtaagagcagaaaccgatcaagcaaaaaatgactcccaaggcttcagtatcgcatcagaagactagttacataaaggtgtggaccaagtccagacgaggtcgaagggtgtttgactgttatcactgtggaaagactggacacatcagaagtttctgttacaagttctaagacaaggtcaaacaactctggcaagctcgaaagtgctttatagagcctttgaagtttggcaaagtatgggttaataaactggatctgtacagcaagtcacaggagcatgatgaggaaaaatacaacagagttgtagatgaatctgaggaaatcaacctgatctgcaacgcctcattgatgcaattagatgaatcagctgaagatgaatttgaggaaatcaacttgacctgcaacgtttcaattatgcaactagatgaatcagatgaggacgagcctgtagtagcaaaggtggccaccctatcccctaatgcataa

SEQ ID NO: 162834 - DNA, 1343 bp, Arabidopsis thaliana landsberg
ttcatttacacgcaccatacatcaatggattccaaactaatccgtttcgctgttgtgattatgctcctgtccatccaaatcttttgcacagctggtaagaactgatttattgatttattttgttttcatcacaattaacctcacaacaaaaactcaactttatttaatcaatctatgtttaaattaataaaaagcattatctcatggtttgattttctttggatgtaatctggttcagtctaactccgttttttggaaacgattaaatattttaaaccaaacaataaccgagtacggtttgattactatattttgtgtccttctaggtgttgcaggggacatcaccggagtttgttacggccggaacggcaacaatcttccaacgccggcagatacagttgctctatacaaaagcaacaacatcgacgcaatccgtatgtacgagcccttcgcagacatgctcgaagcgcttcgtggctcaggtctcttagtcgcgtttggtccacgaaacgaagatatccaatccctagctcacgatccagccgccgcaacaaatttcgtctccacctggattacaccttaccaaaacaacgtcgcaattaaatggatcacaattggtaacgaagtcttccccggagaaatcgctcaatttgttgccgccgcgataaaaaacgtcaacgtcgcgctaacgaattccggcgtcacaggaatctctgtcacgacggttttagctatgaccgcgttgaccaatacatatccaccttccgctgcaacattcctcccagatctaaccgagatcatgacggagattacatcgatactctcagagacgaattcgcctctcatgacgaatatctacccgtacttcgcatacgcgtcagatccatatcacatctcactcgattacgctagtttcaaatccaatacaccggtagtgatagacggtgatttgtattacaacaatatgtttgaggcgatggttgacggattcaatgcggcgttggagaagatcaacgccgcaaacgtggtggtgatggtggcggagacgggatggccgacggagggaaatccaccgcacacgagtgttgataacgcgaaggcctataatatggggattcgaacatgtgggagatctgcagaacggaagcggacgccccgccggcaaaacacgccggttgacgtgtttctattcgcaatgttcaaagaaaatcagaaggatggtccggtggaacagagtttcggaatctttgcacctgatatgactccagtctacgatcttttttgtaaatggcgttaattaattttcccgcttaaatttttaaaaatacgtttgtccattttac

SEQ ID NO: 162835 - DNA, 1318 bp, Arabidopsis thaliana landsberg
atggttaggttcttgaacatcgcgttgattttactcttgatcgttttgtttgtcgcaaatgtcttggaggccacgaaactgaatgtgatggacaaatgttggagaccaaacccccattggcgtagaacccgcaatcagcttgcgcggtgttcagtcggatttgccggaaaaatgacgggaaatatcggtaaaggagtcacacaatacaaagtaaccgacccgtctgatgatcctctgaaccctaaacctggaaccctaagatacggagcaacactcgtcaaaggtaaaaaatggatcacattcaaaagaaacatgaagatcaagcttcataaaccgcttctaatcagcagcttcacggcactcgatggtcgaggtgctagtgttcacatctcgggtcccgcttgcctcatagtctatagagccaccgatgtgatcattcatgggcttaagatccatgattgtaaagctcatccaccaagctcagtgatgggacctgactcaaagatcatccaacttggacacatggatggcgacgctatcaggctagtcacggctaagaaagtatggatcgaccacaacactctctatgattgcgaagacggtcttctagatgtcacactagggagtactgacgtcacagtgtcgaacaattggtttaggaaccaggacaaggtcatgcttcttggacatgatgatggctatgtaaaagacaaagatatgagggtaactgttgtgtttaaccactttggtcctaattgcaaccagagaatgccaaggtacaaaattgacagaagcctagactaattgattttcgtttattgatatttcgatttctaatttggatgaaatatgtgaaatatacagagtgagacatggatatgctcatgttgccaataactattaccaaggatggactcaatatgcaattggaggaagcatgagccctcgtgtaaagagtgaatcaaactatttcgtggcaccaaaatccggaagcaaagaggtccgtatcaagtagtaatggaaaacgctaaaacacaaaacgcattttctttttttttatctcatctaacatttgaatttgaacttgttgtagataacttggaagaaacgtagcaatggagaccaaatgcaatggaaattctactcagtgaatgattacttcgagaacggagcttgttttggcctacacaaaggtgttggaaaagcacggcccaattacggcccagatcaaaggttcacagtcgcaaacgctaaacaggttaaagtactcacttcttcagccggagcgttacactgcaccagaaactccgtctgttag

SEQ ID NO: 162836 - DNA, 727 bp, Arabidopsis thaliana landsberg
atgtttaggatagttttgcatgcatgttgcatatttgcgttgatttcaggtgatttggagctgttgacgagcaatctcgaagaagcggacctgatcatgacaaaccactcgacccagaggtcgagtaggagcttcaagatctcaagagaccactcgaccaccaggtcgagtagaggacatcatcacttcacttcaccactcgaccccgaggtcgagtgccctcatctccatcaccagaccatcactcgatcacttcactcgaccgatgaggtcgagtgtcttcatctccctcttctgacaccactcgatcacatcactcgacccccaggccgagtgacttcatcccattaccagacctctactcgatctcatcactctacctggatgtcgagtatcacatcaccaccactcgattgcatactcgactgccagcttcagagtcttcttcattccgcactcaaccagacactcgagcacaaggaagaaaagaagactccagcttatcactcgacctctcactcgaccacctgggtcgagtacagttcttaatccgtcccaatactgcgtcgttttgagtattaggatttcagaatattttgctataagtagcatgtacttaacattttcgagaacaagtttttatctaagttttattccgtagacactttgtttttgacctttggtaattcggatttctctttatctattcagtattcagtattcaata

SEQ ID NO: 162837 - DNA, 949 bp, Arabidopsis thaliana landsberg
atgaaagacatggttagcatgataaggactagtcgagagtcccctaaatggatcatcgattctcatatctggaaagcgacgtgtgagtattgggatactgaagaagcaatagcgaggagtcagatatattccaaggctcgcttgtctgaccgtaatgggctcggtcctcacatccatttgtcagggccaaagtcatatcaaaacatcaaacatgaactggttattaacttctatctcttttttttttttttaatgtgtttgtgtcttaagttcatatgttgtattaagccttgttcatttttatcatcatagtaaaaagagttaggaaggacggtgagtgttggtgaggttttcatcaagactcataccaaaccggatggtacttatgtcaataaaaaggcagagcagattgttaaaaggtatgagaatgaactgcaaagaaaagttgtcggaaatggaggcagagacttcaagtatttcagacggggaatctcgggagctcacaatagaggaccatattgtcatctttctggaggtaaagattacattttcacttgcatattgtctgcattttctcaagctctttattaatggtttggctatttttttttcataggccacagagacagattcaagagggaactattatggagttggaagcctcaaagataatcttccggatctagtcactggaaaggacaaacatgcagcatactctacctcctttgtgtcattgcaagagcaactaaaagaagctcaacagaagatcgaagagcaggctgctcataatgctcgacgtgaggcagagcaagcccgagctgtggctgaacggaaagacaagctggagcacttagccttgctggaaaagtatttgcgccaaactgatccaacctttctcaactttatggctactcattcatctgaagcaaccacaaccgatcctatctaa

SEQ ID NO: 162838 - DNA, 6465 bp, Arabidopsis thaliana landsberg
  unsure (1)..(6465): unsure at all n locations
tttatcagaagatctctaagatattgtaagaaattaaattttgaaattttgaaaagtaaatttttgtataaaaactgtttagtagtatagaaaaatatcctttcatttcatgtcaatacatctccacagaaaataaaaagttgcagtaatcttaaaaaaaaaaaaaaaagttttaaagatggcgaaattacgagaagcttcattttgtgcactcgcatgtgtccttgcattgatcttgagttttgtctcggcagacacatataatcgtcaagataaacaagtttgttatttaattaaataaagaataatcaataaattttgtttctccctatcatttgatccatagttcacgatgataacgatgataacaatccatgaaggtgtatgttgtctacatgggttcacttccgtctcaaccggactacaaaccaacgtctgatcacataagtattcttcaacaagtcaccggcgaaaggtgtgattagttacaattaatttttaaaaattgttatgaagataagatactaacaagtgatttctttcctagttcgatggaaggtcgtttggtgagaagttacaagaagagtttcaacgggttctctgcccggctcactgagtcagaacgagaaagagtagccggtgagtgttcttccatcgagacgtacattttctgttgaaatgttttttaaggctaaacgttttaaaaccctttgtgttgatagaaatggagggagttgtgtccgtgttcccgagcaagaagtacaagctccatacaacggcatcttgggacttcatgggattgaaggaaggaaagaatacaaaacgaaacttggccgttgagagtgatactattgtcggagttttcgacactgggatttcgccagagtcagaaagcttctccggtaaaggatttggtcctcctcctaagaaatggaaaggtgtttgtaaaggcggcaaaaacttcacttgcaacaagtaattctcttaaattacaataaagattagtattagggacgtattttgaagaaattagttttgtgtttgggcataaaatattttggttacaaaaataaactatagagttaatattaataatgaatctggttacactgtttcagcaagttgattggagcaagagactatacaaacgaaggcaccagggacattgaaggccacggtacacacacagcatccacagcggctggaaacgtagtcgagaacacaagcttctatgggattggtaatggaactgcgagaggcggcgttccagactcaagaatcgcagcttacaaagtttgtagcggagcaggatgtagctcggagtacatactatcggcgttcgatgatgcaatcgcagatggtgtcgacgtcatcagcgcctccctcgggggagacaccgcgtacatgtatggaaaggacccgattgcgataggggcttttcacgctatggccaaagggattctcactgtgcagtcagctggtaacaatggtccgaatccaaccgtgagcgtagcaccgtggatcttaaccgttgcagccagcaccacaaaccgtaggattgtcactaaagtcgttctaggaaacggcaagacacttgtcgtaagtaccaagaaacgttctcatttctatgatcctagtctccttctcattatcgatgtctcttttgtttttataacaggggcaatccgtgaatgcttttgatctgaaaggaaaacagtatcctcttgtgtacgaaacatcggttgagaagtgtaataatgaatctctggtgaagggaaagattgttgtgtgcagttatgcgattggttcacaagtccctgttgcattcatatttagagacaaaaaagagttcgcctctgttcaaccttggcccgtctcttctctatcactagacgactttggctctctcatttcttacattaactccacaaagtaacgaacaaatcatctccatgtttcatactcttatcatgtggtctggattctcattctttgtcttgatatctttgtgtttatttatctcaggtccccgaaagcgactattctaaaaagtgaagcaatctttaaccaggcagatcctaaagttgctggattctcttcgcgcggtccaaacactatcgcggttgatattcttcaggtataacatttgtatgatgctacctaattctctttcgtttcccagcctaagagaaaatggttgattgaattgcagccggatataacagcnnnnnnnnnnnnnnnnnnnnctgcttattcacctttgtttcaccatctgcaacaacgttggacaataggcgtgtgaactacactattacctcaggaacttctatggcttgtccacacgttacaggcgtggctgcgtacatcaagacatttcatcctgattggtctccttccgtaatccaatctgccatcatgacaaccggtaaacaaaagtccaacttttactttcttgcatcgcaagtaacttgtgttgacaactctgttcttatactgtctcttaatgaatctttgcagcttggcagatgaatgctactggaactggggctgaatcgaccgagtttgcttatggagctggccatgtcgacccaatagccgctataaatcctggacttgtctatgagttgaacaaaacagaccacatctcctttctctgcggcatgaactacacttcgaaaacccttaaactaatttcaggtgatgccgtcatttgcagtggaaaaacattacaaagaaacctcaactatccttcgatgtcagctaaactttcggaatctaatagctccttcaccgtgactttcaaaagaaccgtcaccaaccttggtaccgccaactctacatacaaatcaaagattgtcttaaatcatggatctaagctcaatgtcaaggtttcgcctagtgtcctttctatgaaatcgttgaaggaaaagcaatctttcacagtgactgtttcgggcagcaatatcgacccaaaactgccttcgtctgcaaatctaatatggtctgatggaacacataacgtgagaagccccattgttgtgtatattgatggttactgatgaggcattatcagttcaccatagttatcaatcatcataacattttgctatacatatatttcttcaaaaacatgtctactccatatacgttttctgattatgtcatcataatgcaaaatgaaaataaagtactaaacgatcgagaaaaaaacagttgtacaaaaaaaaaagattttgattaaggagttgaagaaacaaaaacaaaattgagttctaaatagatgtgaccaaataaacagtagatatctatttcctaaaaatgtatttggtcaacatacgatacttctagttaccaaaagagttttgctcaacatacaatcacagcatttgacagaaatatcattaaaattactaattttatactagtgtataaattatatcatgttgatctcgataaaaactgagaaattagacaacctttaattcattttataagaaaaagatggcgagacgagcagattcgttttgtctcatatcatgtgttcttgtctcgtttgtaatttcagtctctgcagtgacagatgattctcaagataaacaagtgagttctcataacttaagattatcgagtttttttttttcttggtttctctgtaatatatgaccaatcatacataatgacaatccatgaaggtatatatcgtgtacttgggatcacttccttctcgagaagagtacacaccaatgtccgatcacatgagtattcttcaagaaatcaccggagagaggttttattaaaaatgatttttttcctcttattatatcttatatatggtttaaaatcataactctaaaaagttttaataatattctagtttgatcgaaaatcgcttggtgagaagctacaaaaagagtttcaacgggtttgcagcacgactcacagaatccgaacgaaaaagattagccggtaacattatatcgagttttctagctggttaaaaatctttaaaagaatacagaattatagtagaaagaaaaattaaaggagtttaaaagaaaaactttttcagtgttagatatatattcaaaaaaatttgcaaaatcgtatctcttttctttttttgtgcaccacatcactaaatgttatgtaatgttttttcttaggaatggagagagttgtgtctgtgttcccaagtagaaaactgaaactgcaaacgacgtcgtcttggaactttatgggtctcaaagaaggcatcaaaactaagcgaacccgtagcattgagagtgataccattatcggggtcatcgacagtggaatctatcccgaatccgacagcttttccgaccaaggctttggccctcctcctaagaaatggaagggaacttgtgctggcgggaaaaacttcacctgcaacaagtaagtacacttcttaccctaacttgggaattttgtccaacagtttaagagtacttttaatcttgggtaacaacaatttctctaattttgcagcaaggtcattggggcaagagactacacagccaaatctaaagcaaatcaaacagcgagagactacagtggacacggcacacacacagcgtcaatcgctgccggaaacgcagttaagaacacaagtttctacggaatcggtaatggaactgcgagaggtggcgttccagcctcaagaatcgcagcttacaaagcctgtagcgagatggggtgtaccactgaatctgtactatcggcgttcgatgatgcgatagcagacggtgttgacctcatcagcatctctctcggggcaaacttagtccgcacgtacgaaacggacccgatagcgattggggcttttcacgctatggtcaaaggtattctcactgtgcagtcagctggtaacggtggtccgaatccgggctcagtcatgagtgtagcaccatggatcttgacagttgcagcaagcaacaccaaccgtgggtttgtcaccaaagttgtactcggaaacggcaagacatttgtcgtaagtatcaagtaacactctcatttctatcatcatagtatatttgtccctttcagtgacaaagggctcttttgtttttttgtctaaacaggggaaatcattgaacgcttttgatttaaaaggaaagaattatcctctgtatggaggttctactgatggacctctgcttagagggaaaatcttggtgagtgaagataaagttagttcagaaatcgttgttgcaaacataaatgaaaattaccatgactatgcctacgttagcattctgccctcctctgctctatcaaaagatgactttgactctgtcatctcttacgttaactccacgaagtaaccaacgatcttctcttttttcatttggtctagatcccctactttgtcttgatatctctgtgtttgtatcctcaggtccccgcacgggactgttctaaaaagtgaatcaatctttaaccaggcagctcctaaagttgctggattctcttctcgcggtccaaacactattgcggttgatatacttaaggtatataacatttacatgctcttgattcttttttattattatttcttgacctgagaaacaatggttggtggatggattgcagccagatgtaacagcaccaggagtggagattctcgctgcgttttcacctttgaattcaccagctcaagacaaaagagataatagacatgttaagtactctgttctgtcgggaacttcaatgtcttgtccacacgttgcaggcgtggctgcgtacatcaagacgtttcatcctgaatggtctccttccatgatccaatctgccatcatgacaactggtaagcaaaactcatatccaattttcattttcttgcccggcaaataactttgttggcaactctgttcataaacagtctatccattaacgtttgcagcttggccgatgaatgctaccggaactgcggttgcatcaaccgagtttgcttatggagctggacatgttgacccaatagcagctataaatccaggtctcgtttatgaaataggcaaatcagaccacatcgcctttctctgtggtttgaactacaatgcgacttctctaaaactcatcgctggtgaagctgtcacttgcactggcaagaccttaccaagaaacctaaactacccttcaatgtcagctaaattgccgaaatctgaaagctccttcatcgtgactttcaacagaaccgtaaccaacgtaggtaccccaaactcaacatacaaatcaaagattctcttaaatcacggatctaacctcaaagtcgaggtctccccaagtgttctatctatgaagtcagtgaaggagaagcagtcttttacagtgactgtttcagggagcaatatcgacccaaaactgccttcttctgcaaatctaatatggtctgatggaacacataacgtgagaagccccattgttgtttatattgatggttactga

SEQ ID NO: 162839 - DNA, 2087 bp, Arabidopsis thaliana landsberg
atggttttagttaatgttcattccgatggacaaccaattatcatcaacaaagacatgttaacttggtacttgctcagcctcaagctcagacaaaaatttcaaaccaaaaaccaacactcggaaccggttcaagatccgaatctccacggtttaccggaagttaccagaccgaatcaagaccaaaacgtgcagaaccacaagcagtctcattccgagtcaggtaaggaggtggtagaagagaggccagaagagaccacaggagacagttgggtgatctcaataagagacaagctcgagcaagcagatagagacgacgacacaacaatttggggaaagctctgcatctacagagttccacattacctacaagagaacgacaagaagtcctatttccctcagactgtctcacttggtccatatcaccatgggagacagcaaacacagtccatggagtgccataaatggcgtgccgtcaatatggtattaaaacgtacgaaccaaggcattgaagtgtttcttgacgccatgatagagctggaggagaaggctcgtgcttgctacgaaggttccattgttttgagcagtaacgagttcacagaaatgcttcttcttgatggctgttttattctcgagctcctccaaggagtcaatgaaggattcttgaaactcgggttagcgtgattcaatttcttgtttttgtcaagttatcttgctaatccggtatgattttaaatcgggttatctaaaactactgattttgattattcatttttggctgttacgtagatatgatcataacgatccagttttcgcggttcgaggatcgatgcattcgattcaacgtgacatgataatgctggaaaatcaacttcctttgttcgtactcaaccggttattagagttacaacccggtacacagaaccaaactggtttagtggaattagtggttcggttctttattcctctaatgccaacggccgagacgttgaccgagaactcgcctccaagaggcgtatccaatggagagttgcactgtcttgatgttttccatcgaagtctgctcttcccaagatcatccggaaaggcaaattactcacgcgtggcggataagcgccaacaacaactgatacattgcgtgactgaactaagaaacgcaggtgttgagttcatgagaaaggaaaccgaccggttttgggatatgcaattcaaaaacggttatctagaaataccgaggctacttatccatgacggtacgttcacgtttttcacatttttcttctttttaacacatgccccatatgtttacaatttatttttcttttgtttgagtaaaatgttacagtttttttttcttatccatcacctttttaattcatcaaatccatataaattgatattttctcgtttgtattggtttatatggattgacaaagaatatattagtaggaatcatgatgtattgatgtggtatgttgcataaaaatgctactttggaatataagaaatgtcatcaattgactaattcagaatgatctaagcaatggaaaagagtatgtgttttcagattggcaaaaagtttagataatgaaacaaatacattttctcaacaaaacaactaaatgtttataataagtaaagccatcctcgtatgtttttttgtaggtaccaaatctctttttctgaatcttatagcttttgagcagtgtcatatcgattcgagcaatgatataacatcctacataatcttcatggacaatctaatagattctcacgaagatgttagctacttacactactgtggtatcatcgaacattggctagggagcgattctgaagtcgcggatttgttcaaccgtttatgtcaagaagttgtattcgacaccgaagatagctatttatctaggttatcgattgaggttaatcgttactacgatcataagtggaatgcttggagggctacgttgaaacataagtacttcaataatccatgggcaattgtttctttctgtgctgcggttattctactagtcctcactttctctcaaagtttttacgctgtttacgcttattataagccaccttcttaa

SEQ ID NO: 162840 - DNA, 1056 bp, Arabidopsis thaliana landsberg
cctcgctttctctgaaaaagcattttagtcacatgtctctgcttctcaaccagccctcgaagctactatgcttccggaggaaatctgttctggtaagatcctctcctcttctctctaatggtttatcatcttcattgcggcaaactccgccttgtaccatcatcgacgctgttccatgtggagaggatctcggaaaactcgtcatttacaatgctaacgcagttcacttcacttacttggaaaagaaggtgcctctggagttggtggataatccaatggtaacgatcgggtcgtcccatggttgggtagctactttgagtcaggacgacggaatacttcgtctccaagatgatctaaacccggctgcatcggatacaaaccctaaacgcattcccttgcctcctcttgtaactctgcctcattgccaaactcaaatcgtcaccaatgtgtcaatgtcctcatcttctcccgaggatgaaaactgtgttgtggctgtcaagttcttggtacctcaaatcagcttttgcagacctgatgaaagccactccaagtggaccaatatcaaaattaaaaacccttgcttcttctctttttcggttgtgttttctgagaatggcttgtttcgcatacctggatccggaggccacctcattggatcatgggatctctacaatgctaaaccaaatcccaagtttcagaggctgcggtactaaaatctttccaaactgactaagaccgaacgcgagctgcaggagcgaacacttggttaagaaccaccagtgaaatgttcttggttaagtggtataaaaagtcctctagaatgatcatcaagggtattgggaaatcgaaaacaaaagctttagtggtgttcaagctagacgaagaagcaaatgctgtttacactcaagacatgggcgatctcttcatttacctcacaaagtctgaccctttatgtgtccctactaactcacggatacccctgcctcctaaccgagtcttaatcttggatgtagatgaaagcagaagggttagtctgtgtcgtacaacttctgttgt

SEQ ID NO: 162841 - DNA, 2219 bp, Arabidopsis thaliana landsberg
atggtttttgaatatgaagatcttcttgatgacaatgattcagaagaggagaatttggatattcttgatgatattgaagaaataccacctccaggtccaacaccaccaccaacgaggcaaggtgtcaatcgatcacagagaaaacctaagaacggaccaaagaaacggcaacgacgacttactgctgagtgttgggaccatcttacaattattggagaaaagggacctgatggtaaagaagatgtgagatgcaattactgtggaaagatctatcattggcatttacacaagaatggaacaactactctagatcgtcattggaaagcttgcaaaaggagacctagagatcaagatgtgggtgaaatgatgatgactcatgaaggaaagcgtcaagctcggaaattggaccaaaaagtttttcgtgacatgattgcgatggcaatagttgagcatggtcttccctattcgtttgtcgaatatagaaggattcgaaacgcactcacatatgctaatcctgatatcaaacattggtgtcggaacacagcatcatcagattgctataagttgtttgagaaggaaaaagcaactctcaagatggaattggctaaaatctctagtagagtatgtttgactacggatctttggagatctctcgttatagaagggtacatatgtttgacagctcattacattgatagtgattggaagctaaaaaacaaaatattgtcgttttcagcttttccacctccacatactggatatgctatagcgatgaagcttatcgagctactcaaagaatggggattagagataaaggttttctctcttacagtggacaatgctactgcgaatgatagtatgcaaaccatcttaaagagaaatctacaaagggatttgttgtgtaatggagacttttttcatgtgaggtgttcagcacatgtactaaatcttattgtgcaagatggattagatgtggttggtgattctttgaaaaagattagggcaacagttaagtttgtaagggcttccgagactcgagaggatatgtatgcgaactgtatggaaacggttggtcttcagattaaagctggtctaattttggatgtgtcaactcgctggaattctacttatcatatgcttgagagagtgatcaaacatcaaggggctttacagaatcttcaagatatcgaaccatcttataaatgttttccaactgaggccgagtgggtaagaggaaagttgatatgtgaatttttgaagccattcgatgagattaccaaattgttttctggctcaacttatcccacatcaaacttatatttcatgcaagtttggaatatcgaatgctggttgcgacgtcataaattttcggatgatgaggttattgagaagatggttgagaagatgcagctcaagtatgataaatattgggaggaatatagtgagatacttgcaattggggcagtgttagatccaaggatgaagtttgctcttttagaattttgtttcactgctctagacccatcaacttgtgctcaaaagtgtgaacgtattcgccaaaaaatgtatgatctctttgattcatatcagagtaatagaccgacaacatctacaggtccttcacagacttttgcaagcacttccaacgacaatgcaccaactggatataatgtaagtgatatttttttttttggttttgttgttgttgtttagttataaacgtaaatctggatatatattgtaatgtaatggattgatttttttttggtggcaggacttttatgctttttactcacagagaataggggataataaaaaatcacctttggatgtgtacttggatgaaccagcattaaacatgatggcgtttgaaagtatgaatgtcttggattattggaaagacaacgctagccgtttcaaagagttgtcttatatggcttctgatgttcttagtattccaattacaacagtagcttcagaatcatcgtttagcataggtagtcgtgttctaaacaaatatagcagttctctctaacctccgcatgtcgtagctttgatttgtggacgtaaagaataaagggttttaaggtaaactacataaattcttataatcaagagtaagttaaatatagataacaaatgtttttttgtattacgtagatgatggtgtagaggttgctaggggtgatgttccagctgctgaagcaaccacgaactaa

SEQ ID NO: 162842 - DNA, 1519 bp, Arabidopsis thaliana landsberg
tatattaataaaaccgcttaatgggctggtctaatgggccgaaaacggtttactaaatggtcttagaagacttgtttcttcaattatgaaggttatctgaaaacgcttctcctggtaacgttcgtcggagttttagcatgggtttatcaaacaatccaaccaccacccgccaaaatcgtcggctctcccggtggacccaccgtgacatcaccgaggatcaaactgagagacggaagacatctggcttacacagaattcggaatccctagagacgaagccaagttcaagatcataaacatccacggcttcgattcttgtatgcgagactcgcatttcgccaatttcttatcgccggtaagttttccggccaaatctaacatcacccatttgttgaatcatcgatagcatgtagaaaaaatgtcaaaatttgtgtcttttagtgaagctaatggggaaaaatggtgtctttgtgcttaggctcttgtggaggaattgaggatatacattgtgtcttttgatcgtcctggttatggagagagtgatcctaacctgaatgggtcaccaagaagcatagcattggatatagaagagcttgctgacgggttaggactaggacctcagttctatctctttggttactccatgggtggtgaaattacatgggcatgccttaactacattcctcacaggtactgcatttgagtctatcttattgggttttcgatgtatcgaaaaagatttcagctttgatcttgaaacaatagctaagatgtgttgtgaaatgtgtttttttggttatggactttgtttacaggttagcaggagctgcccttgtagctccagcgattaactattggtggagaaacttaccgggagatttaacaagagaagcattctctcgtatgcatcctgcagatcaatggtcacttcgagtagctcattatgctccttggcttacatattggtggaacactcagaaatggttcccaatctccaatgtgattgccggtaatcccattattttctcacgtgaggacatggagatcttgtctaagctcggattcgtcaatccaaatcgggtacaagcacatctatagacgttcagtttccatatcataagtttcatacctctacaatgagaatatgatttggaatcatatgatgtgtatattccttcttttttttgttccaggcatacataagacaacaaggtgaatatgtaagcttacaccgagatttgaatgtcgcattttcaagctgggagtttgatacgttagaccttcaagatccgttcccgaacaacaatggctcagttcacgtatggaatggcgatgaggataagtttgtgccagtaaagcttcagcggtatgtcgcgtcaaagctgccatggattcgttaccatgaaatatctggatcaggacattttgtaccatttgtggaaggtatgactgataagatcatcaagtcacttttggttggggaagaagatgtaagtgagagtagagaagcctctgtttaa

SEQ ID NO: 162843 - DNA, 984 bp, Arabidopsis thaliana landsberg
taaatctatggccgatttagtaaaaaccaatgctcgcagagacggtgaagaacgatttcaagcgcttgagcaagaggctttcatcaataattcgtctccggagctccagaacgagttggtatccgacgccggaggtgggattgaagcaatcgctaatcgtctggttggtattcgaattccctgatgcacacaacctgtttgatgtaatgcatatttctatgaaaacactaagcaaagctttttcctttctttatactgcatttttgtcaaatggcagagcaaatggattgtagcagctctgtttggatccgttctgcttctacgacatgatggtgcagctttgtgggctgtgattggatcggtttcaaattccgtgctctcagtagctttgaaacgtatacttaaccaagagagacctgttgctactctccgttctgatcctgggatgccttcttctcatgcccaatccatttctttcatctctggggtttctgtcttctccgggaaacaatcagtcacaatgctcatctgtttcttcccttgcatttgatcaactcttaaagatgactttattactcttatttccacagttatggagtggcttggaaccaatgtactctctctgttccttagcggcttcatcctcgcattgggttcttatttcgtaagtcttcatatcattttaggacatgaatcaagttaacaattatcgttgaaaacgaaatattgacactgatgttttattttggggtatagacgtggttaagggtttctcagaagcttcacacgacaagtcaagtggtcgtaggtgcaatcgtgggttctgtttactccaccttatggtatgtaacttggaactctcttgttcttgaagcctttacctcaacattctcagtacaaatagctgtctttctggttgctgctgcgtctgctttaggttttgcagtttatgtgctacttaactggtttaaagatgacagatga

SEQ ID NO: 162844 - DNA, 1058 bp, Arabidopsis thaliana landsberg
  unsure (1)..(1058): unsure at all n locations
caacacgaacaacatattcaggaaagcctgcgtgctaaatctccttcggccaagttcttaaagctggttatgatgatgaaggatttaggtgtccggaagtttaaaggagagcagaatactgctttagcggataagtggtggtgtataagcttgtatttaggtgcttataatacccttcggcgcttaatgtgtcatctcgacaccaaaaccatccctaacctttgatcaacatataagtctgtattttgcatgctttgagcatccatttgtcatcattttagcatcatatcatcactgttttatacaatttctcatcatttgtcatcaccttgcatgtttaggatagttttgcatgcatgttgcatatttgtgttgatttcaagtgatttggagcttttgacgagctaattggaagaagcgtacctgatcatgtcaagccactcgagnnnnnnnnnnnnnnnnnnnnnnnnnnnttcaacagaccactcgaccccttggtcgagtagaagacctcagcatttcacgtcaccactcgaccccctagttgagtaccgccaagagagtcactcgttcacatcactcgatcccctggtcgagtatcatcacctccaccacctgaccatcactcgatctctgtactcgaccccgaggacgagtgtcttcaccttcaccacctcaccttcactcgatcacatcactctaccagcaagtcgagtaccatcatcatccaccactcgactacatactcgatgtcgagctttagagtcttctccattccgcactcaaccagacactcgagcacaagaaagaaaagaagactttggcttatcactcgaccactcgctcgaccacctgggtcgagtacagttcttaacccgtcccaatattgtgtcgtttgaagtattagggtttcagaatattttgctataagtagcatgtactttacattaccgagaagaagtttttatctagttttattccatagacactgtgttctagaccttttataatccggatttctctttatctattaagtatttagtattcagtatttgttc

SEQ ID NO: 162845 - DNA, 2124 bp, Arabidopsis thaliana landsberg
atgaggaagctttgtccaaatttggacagagaagacgggttagagacggtgttagaggttccggtgccggaagaaatgtttacaaagatgggaagcaacgcccaagggcggtggaggaatatgcacgctctcatgaaggcacacgccgttgtgaccgcggtggcgactgatgtaagaacgccggcgtcatcgtcatcgatgagtaatgtcaacatgcatttgcagtcaaaatcagacaacgagtttgtggccttgttgaaaatcgtaggaagtcctcttattccttttcatgtcccgctcgagttttgtctatcccgaccaatcaacgacacttccatcgtacgtatcttatcattaattcaatctattgatttttgtttaaccttttgatgaagtggggttataggttagaattcaagtctttcacttgcagttttaattttggttcgttattcttaatgttttgaatggcacaattttcaatgattctataaaccatgggaggattagaagactactaaaattttccaatttcaaaaagagaaaaatgtatagagatggaatgtgtagcgattattagccctcaatttctttatgagataacaaatagttcttttttttttgatcaaaacaaatagttcaaaaataaaaaaagttttataggataaacattttatcttcttttttttgttcgtatgaaacaagttatcatacaatttacgttcgtctaagtagaaagcaaacctattatgtggaatgttgatagtagtggtgtatttgaaggaggcgtcgacggctaaatacatagtgcaacagtacgtggcagcgtgcggaggtccagcggctttgaacgcagtgaaaagcatgtacgcggtggggcaagtaaggatgcaaggctccgagatggttgctggagaggacgaagggacgggtacgccggtgcgacttggtaaaggcagtttcgaggtcggaggttttgttttatggcaaaagaatccaaatctttggttcttggagctagtggtttccggtttcaagattagcgctggtagtgacggcaaagtggcttggaaccaatcctctactcaaccttctcaggcccaccgtggtcctcctcgtcctctccgccgtttttttcaggtgcccatgcatttttaacctttcaatgcatattatcgactattttacgattaaacttaacaaaaatgacaaaatttgtagtatagtggttttgatcgccctatcatattccatgttcaaacatgggagcactcttgtgagttataaacttataaagtactaatttagtagtaaattagaactaagccagagaggaaaccagtcaaaatgttcataacaccattaaaaaaataaatcctagcaatgatatacaccaagaaatacaaaattttgattgttagcaaattttaattgttacaaacttgttattagcaaattttgattaacattgttacaaaatctcgattgctaataaatcctatctcatattattagcaatttttgccttaaaaaaatataaacttaccatgactaaagattgaccttttgacatttttcatctgttgaatgacgtggcagggactagacccgagatgcacagcgagtttgttcttagacgccgtttgcatcggtgaacaacccgttaacggtgaagactgtttcgtcttaaaagtagaaacaccgtcagatattctcaaagcacaatgctcaccaaacacggaggtgatcaaccacacggtatggggttacttcagccaacgaaccggacttctcgtaaagttcggtgacacaaaactcgtgagagtcaaatccggaagaggcaaaaacgacggcgttttttgggagacaagtatggagtccatcatcgacgattacatattcgttgacgcagtcaacatagctcacggtggtcagactgtgaccacactctaccgctacggtggagctgttaatcaccggagaagaatagaggagaaatggcgtatcgaggaggtggatttcaatatttgtggattgtgtttggagagctttttaccaccgtcggatatcaacaatgatcattaggcacgatggagaaatcgttacaatagtctatctttttct

SEQ ID NO: 162846 - DNA, 2365 bp, Arabidopsis thaliana landsberg
  unsure (1)..(2365): unsure at all n locations
atgaattcgtggcacactggagatgactctataaaagcagcggcgtcatcgagagaaaccgaagaagaagcagtaacaaatttggtgaagtcacgagaatcaacgatgacggcgacgaacaagcaagtcatattgaaagactacgtgagtggtttccctacggaatccgatttcgatttcactaccaccaccgtcgaacttagggttccggaaggtactaactctgttctagtgaagaatctctacttgtcatgcgatccttacatgagaattcgcatggggaaacctgatccttccactgctgctcttgctcaagcttacactcccggccaggtaatgatgataatgtttattttgtttggtttgcatgtgaagaaactagatgcttcttattgatgtagaaactacatgacaatttggtgttcttgaagactctgagaagaaattgcgtctctcttggttgttcttttcgctatctctatcgtgttgactgttgtttttccgttgtgtgttttggtgcagccaatctttgggtatggagtgtctagagttatagaatctgggcatccagattacaagaaaggtgacttactctgggggatagttggatgggaggagtatagtgttattactccaatgactcacatgcatttcaagatccaacataccgatattccattatcttactacactggacttctcggtatgttaattaatatatctcggccttttttcctagttttgtaactggaatcactctgtaaatttaggaaatctgcttcttgatatacaaagttctggcttgagacagtgatcatgttgttgaatgtcataaactttatagatgtctaacaaaattagaaacgttgtttgaaacgtaggaagggaattaattataactgcaatctagaagactagagtttcaactgtttggtttgttgatctgtttcatatattcactgtttcatggttgtgtcctgtcctaataggtatgcctggtatgactgcctatgctgggttttatgaagtttgttctccaaaggaaggagagacagtttatgtgtcagctgcatctggtgctgttggtcagcttgtgggacaatttgctaagatgatgggctgttatgttgttggaagcgccggaagtacagagaaggtgagatgatggacaatttgtatccttttatttcttggttctccttcaggagaatgacttgcccaattacttncttttcgggatttgctaggttgatctcctgaagaccaagtttgggtttgattatgcatttaactacaaggaagaacctgaccttagtgctgcgctcaaaaggttcagtaaactacttatttctaagtgttttatgcctataaatgttagaatccgtttgcataataaagcggcaatactttttgattgatcttctcaattgcgttttgaccaatctaagagatattctccgtttttttccaggtgtttccctaatggcattgacatatactttgagaatgtaggaggcaaaatgctagatgcagtgcttatgaacatgaacatgcacgggcgtatcgctgtctgtggaatgatctcacagtacaatcttgagaaccaagaaggtgtacacaacctatccaacataatctacaaacgaatccgcattcaaggctttgtagtgtctgatttctacgacgaatactcaaagttcttggagtttctgcatccgcacattaaagaagggaagataacgtacgtggaagatgtagctgatgggctcgagaaaggtcctgaagctctcgtgggactcttccatggtaagaatgttgggaaacaagttgttgttattgctcgtgaatgatgaatactttaattgggagtaaggttttattgctcgtgagggaataatacttatttgggagaaatgttatatttatccaacaagagtttgtatggctgttgaacccaaccgtgagtttttggtttatgaataatagtaattatagtatatacagtaagattaatttgtttgttattggttttatcattttatgtgacttggttcacaaaatgtatgtaagtagtaacaaacaagccaaaacctctctcacaaatccaaaaaagaagcctaatacaaacccatgtttctagctcttgttcccaagtatgcgtgtttaagcatcaatgaatacaatttgtgcaactccttttcttctttattagaggacatcacgattaacaatcacatggctctgttttgcgagaactatttggagctgggatactgttttgtgggtttggtgtgatatgtgttttgtctctggtcttaagaatcttcgatgttccagagacaaagggaccacacttgacacttga

SEQ ID NO: 162847 - DNA, 2371 bp, Arabidopsis thaliana landsberg
atggaccttcaacgtctgcaccccacgtccgcaactatccaccgcctctgcaactcttccagaactcaacgactcaaccacaacatcaagctcctccgcctctatctgaagaggtccactacactccgccgccaacagcgccacctcagcaaactcctcctcagtcgcgagattcagacgctccaggaaacagccacccgtcgtctcaagggaacaacttccaagaggaagttcctgggacgttgccggagctacaagaagactcggcgttggctctgcaatcgacactctctatgccaaacagggagcagtggtgttgtgtcttgtctccaattcccaaacctaaaaccgagtggtatgttctcttcctctattttattctagtgttcttagcctgtgtagtgtaactcgtgttatggtctgtagaatggcttgttagggtttgtgtaacatagtagaatctgcctttgttctaaactcgtgtgtgatcttgttaagttcttcactttgtctataatcttgttaggttatttattgtgttctgtggtgaatcatgaacataattgtggaacatttgttgattgttgaacttagcatgtttttggctttgacattgaggatctgtctttgttctatacttgtctataatcttgttaagttatttattgtgttctgttgtgaatcatgaacataattgtggaacatttgttgattgttgaacttagcatgttttcggctttgatattgaggatctgtctttgttctatacttgtctagaatcgtgttaagttatttactgtgtgatatcttgttatgttgactattgtgttctgtgtgtgatcttgtcggcttatacttgtctagaatcttgtagaatctgcctttgttcaattatatagtctactgtagttgtagtgttttggattttaaacatgtttactttctgtctgtgttgcatgtgtttggaggtttactcgcgacagaggatctaaattggttagaaagatcacacggatctttactcaaaagttcaatgctccttactataaatggtcctctgtgccattggctaaaagagagagactgtttttagagttcgcggtaagcttcctgactctttgttttgttcagtctttgttttattgtctgctcaagttcagttcactaacttcttctttttttgtataaaactcaccactgggatcccttaatcatagggactgtccaatattacttcaatgagatcatcaagaggcgcttgaaggacatggtttgcaccgcaaggagaactcgagagcagcctccatggattggagaaactctgtggggaacaatgtgtgcttactgggacacagaagaagcccagaaaaggagtcagacctattctaaagctcggctctctgaccgtaatgatctcggtccacacatccactactttgggccaaagtcttatcaagaaatccaagatgaattggtaagtgtttcagcatcctttcatgtcttttagagtcgttcaaatcataagttagagttttattgtgtgtcttgttcagttcaagcagtctttgacttgtgaggatattgatctgtgtttgtgataagtgtgtattttgcatgttttgagcatccatttgtcatcactttagcatcatatcatcactgttttataaaatttcacatcatttgtcatcactttgcatgtttaggatagttttgcatgcatgttgcatatttgcgttgatttcaggtgatttggagctgttgacgagctatctggaagaagcggacctgatcatgacaaaccactcgacccagaggtcgagtaggagcttcaagatctcaagagaccactcgaccaccaggtcgagtagaggacatcaccacttcacttcaccactcgaccccgaggtcgagtgccctcatctccatcaccagaccatcactcgatcacttcactcgaccatgaggtcgagtgtcttcacctccatcatcagaccaccactcgacctcgtcactcaacctggaagtcgagtatcttctgacaccactcgactgcatactcggtgacaagcttcagatccttcttcattccgcactcaaccagacacacgagcacaaggaaaacaagaaggctccagctattcactcgacctctcactcgaccacgtgggtcgagtacagttcttaacctgtcccaatacttcgttgttttgagtattagggttttcaggatatttggctataagtagcatgtacttctcattttcgcagacaagaagttttttatctaattttatttccgcagaccttgtgttctagactttttgtaatccggatttctctttatctattcagtattcagtattcagtt

SEQ ID NO: 162848 - DNA, 1652 bp, Arabidopsis thaliana landsberg
atggatcaaagatcattagaagctgctggtaaatctggaaacatcgatctactatacgaactaatccatgaagatccatacgttcttgataaaaccgaccacgtgcccttcgttaatactcctctccatgtggcagccgtcaatggaaaaacagagtttgccatggaaatgatgaacttgaaaccatcttttgctcggaaacttaacgccgacggacttacaccgttacacctcgccgtggaacacggtcacttctggttagtacttgaagtagttaaggttgatccaagtcttgttcgtaataaagggagacatagtacgtacactcacttatttgttgaacccttaattatgtttcttagttttttccaaaagctttagctctaatcaatccgaactaatgttataatatgtatctagtaaattcaaatcttggagatagtattgaagtaggacgaatagtccattgaatgctagtttgaattcagtctattgttgcttttgactagtcattatgtcgatattgtatggtcagatcatgaactagattggttataccaggagtgttaaattcatttttcttgtccaaaaaaggtatgacgccattgctagttgcggtaagtagaaagaagattgatctgatgtcagaattcttcttgggttgtcccgaaagcattgtggacgcaaatgtgaacggagaaaacgctcttcacatcgccgtgaataactacgaccaaagagaaggattaagcgttcttaaagttctcatgggatggatcttaagattgtgtcaaaaagatgcagagtggatcgagacaagagtcataaaccgaagagacaaagacggtaacacgcctttacatctcgcggcgtacgagatcaatcgtcaagctatgaaattgatgttagagagctccaagattaacgtcaacattgagaacaagaacggtttaaccgttctcgacattgctgtgttacacaataacagagagatagagagaatggttaagagacatggtggaaaacgttcggtttctcttgtcaagattaagacaacatcggatatactcgcgtcgcagctttcttggagagaatcgagacggacgaagaagattcggttttattcttggatctctgaagagagaagaaacgctcttttagtggtcgcaactctcatagttacagctacttatcagaccgttctccagcctcccggaggcgtgtctgatggcggtggtcaaaacagtggaacaagcggtccgaaagcgggttcagtggttatggacgaggtctactttatctggttatggctgtggaacagtgcggggttctactttgcgattgagatgatgatacgtttgttgagtttaggacaagagagtatgttttggtattaccctctgttcgttcctatggtcttggcttactctgttgcaggggatgtgatcaagccgaacgcaagagcgtacacgatcgcaggtgtgggtgcgatcgtggttcttataattaggggattggtagtttggttttgggaatgggtgcagtctaagagaaccaagctacgtggacccaagagtggattggtttgggaaggtttcactacgttggatcaagctagaggtgttgcgcctaatcggtatgtgattaggtaa

SEQ ID NO: 162849 - DNA, 942 bp, Arabidopsis thaliana landsberg
  unsure (1)..(942): unsure at all n locations
atgggtcgtgtgattagggcacagcgtaaaggtgcggctggttccgttttcaagtcccacacccaccaccgcaagggtccagctaagttccggagcctcgattacggagagcgaaacggttacctcaaaggattggtgaccgaaatcatccacgacccaggccgtggtgctcctctcgctcgtgtcgcgttccgtcatcctttccgctacatgaagcagaaggaactgttcgtagccgccgaaggtatgtacaccggacaatacctctactgtggtaagaaggctaatcttatggtcggtaacgttcttccccttggatcaatccctgagggagctgttatctgtaacgttgagctccatgtcggtgaccgtggtgctctcgctagggcttctggtgattacgccatcgtaattgctcacaatcctgaaagcaacaccactaggtaatttcgggaaaccaattattagtatataattatatcttcatgttgcgtgctgttgttatcttatgcgtaaacctaagtatattactggaacatcattgtcttacttgacttgaatagcaatttacaagattgatctgtttgttgtaccataaaaagggttaagcttccttctggatcgaagaagattttgccaagtgcgtgcagagccatgattgggcaagttgcaggtggaggaagaacagagaagccacttctcaaggctggaaatgcataccacaagtacaaagcgaagaggaactgttggcctgttgtacgtggtgttgcgatgaacccagtggaacatccccacggaggaggnnnnnnnnnnnnnnnnnnnnnnnnnnnnnnnnnnnngcgtgataaatctgctggtgctaaggttggtcaaattgctgcaaggagaactggtcgtcgtagaggtgcagctgccacattagcagccaaggcagactactag

SEQ ID NO: 162850 - DNA, 1786 bp, Arabidopsis thaliana landsberg
atggaactcttacttccacacccatcaaactcaactccactcaccgtcctcggcttcttagaccgagccgcttccgtctatggtgactgtccgtccatcctccacactgcaaacaccgttcatacttggtccgaaacacataaccgctgtctccgtatcgcatcggctctaacttcctcctctatcggaattaaacaaggccaagtcgtctctgtcgtgggtcccaacgtcccgtccgtctatgagcttcagtttgctgtcccaatgtccggagccatcttaaacaacatcaaccctcgcttagacgcacacgcactctctgtcctcctgcgtcacagcgaatccagactcgttttcgtcgaccaccgttctatatccttagtccttgaagcagtttcattattcacacaacacgagaaacctcacctcgtcctcctggacgatgaccaagagaacgattcttcatccgcatcagattttcttgacacgtacgaagaaattatggagagaggaaattcaagattcaagtggatccgtcctcaaaccgaatggcaaccaatggttcttaactatacttccggaacgacgtcgtctcccaagggagtggtacttagccacagagcgattttcatgctcactgttagctccttgcttgattggtcagtaccaaaccggccagtttacttgtggactctaccgatgtttcacgccaatggttggggttacacttggggcaccgcagcggttggagccaccaacatctgcacgcgtagagtcgacgcaccgactatttacaacttgatcgataagcacaatgtgacccacatgtgtgctgcacctatggttctcaacatgctaattaactatccattaagtacgccgctcaagaacccggttcaggtacatgaagagaaaaccggttcactgccggttaattttgtctattcaatttaagctttactttgagattttttgtgattgaaagcgttatgaatgaacatttctctctgtttcggttttatgaactttgaatcaggttatgacctctggagctcccccaccagcaaccattatctcccgagcggagtcacttggtttcaacgtcagccactcatacggtttaacagagactagcggtccggttgtgtcatgtgcttggaagcctaagtgggaccatcttgatccattggagagagctaggctgaagtcaaggcaaggagtaagaacactcggattcacggaagtcgatgtaagggatcgcaaaacaggaaagagtgtgaaacacgacggagtttcggttggagagattgttttcagaggcagctcagtcatgttgggatactacaaagaccctcaaggaactgcggcttgtatgagggaggacgggtggttctactctggagacatcggggttatacacaaagatggttacttggagatcaaagatcggtcaaaagatgtgatcatatgcggaggagaaaatataagcagcgcagagattgagacggttctgtatacaaatccggtggtgaaggaagctgcggtggtggctaaaccggataagatgtggggagagacaccatgtgcttttgtgagcttgaagtgtgataacaatggtgacgggtcggttcccgtgaccgagagagagataagggagttttgtaagacgaagttacctaaatacatggttccgaggaaagtgatctttcaggaggaacttcccaagacttccacaggaaaaattcagaagtttttgctaagacaaatggctaagtccctgtcttga

SEQ ID NO: 162851 - DNA, 1674 bp, Arabidopsis thaliana landsberg
atgaaggcttctttcaagggaaagttcgatgtcgacaagagcggtagcgttgcttcgcttaccttcaacgccggcaatgctaagctacgagccaccatgactgatgcttccttcgtcgccggtcctagctttaatggtctctctctcgccgttgagaagcctggcttcttcatcatcgactacaacgtccctaaaaaggttactccttttctcttagtttcaagtttttgaagttaacccttttagcttcaaacctataaggaatgagaaatggatgaaattgtatggagtctctgagaaagttaagagtttttggagattaaactaggttaggagtgtaaattgaagtataaagtttcgatttttatgctacagaatgttagtttacaccaggttctatttttgtatggattctatgaaaaatgagtgaaatttaagtagaaattttcggtttttctgctgcaggatgttacacaaggttctatttgaatggattctttgcaaatgaatgaaattgaagtaaaaagtttcggtttttatgctgcaggatgttaggtttcagtttatgaacactatcagaattgcagagaagcctttgaatctgacttacattcatatgagaggagataaccggacgattgttgacgggagttttgtgattgatccagcaaacaagttgtctgctaattacatggtgggtacaaagaattgtaagctgaagtatacttatgttcatggagggatagctacatttgagccttgttatgacgtggctaagaatatgtgggactttgcggtttctcataaactttatggtggtgataatctcaaggcaacttatcagacttctagtaagatgcttggtttggaatggtcgaacaactctaaatcaactggatctttcaaggtaaatactattttcacttctctgtttttgttcatagcactacttcttttggcaggagtagattgaattttacatatatcactatcccagcagttgacactagatactcttatatactgttatcttagcatttcttcttacggtcctgtctcttctcaaaatttgttctttaaaacaagcatatatgtgcatgtaggtatgagactatattgctcttcttgtaatgacatttagttctatcaagtaggttaaaaattcttaacccagccatgttgtttatctattgttgcttactaagaatttaagaaagactgaagcttaagcagtgatataaacttggtatgaatgatgcaaatctcctaatggcatgggtgtgatctttattaatgcataaaagatgcatggtgatcttgagagagtgttaacaagagacttgaattacaatcctctggttagggattaagttcctcttacttggttctggtggttgggttgaataatttgttgtaccatcgaccaggttttcttataggtagtttgggttaaacatgttaatgtgtgaatggggaactagaacttctcttgaatactgcaatcgatcttttaaacgttgtttcataagcacttagctaaaagtggttctttttgcagtcgtggttaatgagtttctcttactgtttcaacaggtatgtgcatcaatgaatcttgcggatgaactgaaaacgccgaaattgaccgcagaaactacatggaaccttgaaatgtag

SEQ ID NO: 162852 - DNA, 1529 bp, Arabidopsis thaliana landsberg
atgcgtagatccattgcgactgggtttgcgtcgatagtgaagggatttcatcttcatagtcatagacatcgtctacagataagtaaccctagaactgctgcttccttaagcctttgtggtttctgtttctggattcgagctttttctagttaccgaaagattttgagaaacggtcttcacaatcttcagtttaatgatgctcttgatttgttcactcgtatggttcactctcgtccccttccttcaattatcgatttcactagattattgagtgttattgcaaagatgaatagatatgatgttgtgatttctctctttgagcaaatgcaaatcctggggattccacctcttctttgtacttgcaatatcgttatgcattgtgtttgtctatcttctcagccttgtcgtgcttcgtgttttcttgggaagatgatgaaacttggttttgagcctgacttagtcacgtttacttctctgcttaatggttactgtcattggaatagaattgaggatgctatagctctgtttgatcagattttgggaatgggatttaaacctaatgttgtgacatacaccacattgattcactgtctttgtaaaaaccgacatttgaatcacgcggtggagctttttaaccagatggggactaatgggagtagaccgaatgttgttacctacaacgctcttgttaccggtctttgcgagattggtagatggggtgatgctgcttggcttctgagggatatgatgaagaggagaattgaacctaatgtaatcactttcactgcgttgatcgatgcgtttgtgaaagtggggaagcttatggaggctaaagaactgtacaatgtgatgatccaaatgtctgtgtatcctgatgttttcacttacggttcactgatcaatgggctttgcatgtatggtctcttagatgaggctaggcaaatgttttatttgatggaaaggaatggttgctacccgaatgaagtgatttatactactctcatacatggattttgcaagtctaaaagggtagaggacgggatgaaaatcttctatgagatgtcgcagaaaggagtagttgcaaacacaatcacttacaccgttcttatccagggttattgtctagtgggcagacctgatgtgcccaagaagttttcaatcagatgagttctcgtcgtgcgcctccagatattaggacatacaacgttttgttagatggtctatgttgtaatgggaaagtagagaaggcattgatgatattcgaatacatgcggaagagagagatggatattaatattgttacatataccatcattattcaagggatgtgcaagcttggtaaggtggaagatgcttttgatttattttgtagccttttctccaaaggaatgaagcctaatgttataacctacaccacaatgatatcgggattttgtaggcgaggcttaattcatgaagctgattcgctgtttaagaaaatgaaagaagatgggttcttaccaaatgaaagtgtgtacaagtaggtgcca

SEQ ID NO: 162853 - DNA, 4879 bp, Arabidopsis thaliana landsberg
  unsure (1)..(4879): unsure at all n locations
atgccggaagagagtcggccaatgccactacggaagctaatcgatgccgaaagagaaggcgtcgctaaagaaatagagcgatgtcggaaaagtgaggatttctctctctcaaaagttgagagcgagaacattttttccaaccaataagcacaaaacaaagttcgcctagaggaaaataaccctaaaagtcgaaccgaatgatttcacctaattttgaattttcgggtaagttcggttcaaattcaatttcggaaataaaattattaaccggatagtcttacaaattcggatcctacaaattcttgaacttttatcacttatgnnnnnnnnnnnnnnnnnnnnnnnnnnnnnnnngttaatctgaatgccaccgaaaatgtgatataccagttgtacccttaatgagttgattaaaaaaatgaaaaagaaattcaaaagctaaataaagaaaatcgagatcctcagttctctctccttcgtcgtcgtgttcttcttctttcgtcgacgttcatcttcttcgtcggccaccatcgattctggccaccgccgacttgaaaatccgtcgtaaaaggtaacgaattaggtcaaattttttcatatttcctctgacaatggtgcattgtgattttagattgctattttgaattatatataattcccagattcaatatgatagtttgatgattgggttgcaaagtaaagactaatcgattagaggttgccgaaacgttatttgaggtgatgagcaatcgaatgtaggttgaatgtgagttgaatttgaattccgagatttcatattaaagatataaggtttgggtttgcaaagtttagattaaccaattagtttaacgaataggtatgtattaacattggaaatcaattgaatggaaggttcagtcgattctaaatcgagtgcgacgacagattgatttcatctatacgtatgataagagtacatgtggtataacaattaaaatgtttgattggagtttaactggttgtattttcaggagcgatgaagaagaagatccacactaaggtacattttaactttggaggatactattctgaagtgaatgagtggattggtaaaaattcactatatgctatattgtttaagatgagtagtttggagaagataacatattcgatgttagttgacaagataatgaagaaggttgcgattgatgaagcttctgtgaagttgaaactgagttacaatctgtctaaagttaggagagagacatatattgtagatgatgaggatgtcttcatatttttaacagaatctgatgaagagagtcggattccagtttcgcatgtggaggaattaaatggtataagagttgagaggagagaggaaatttctgtaccggagcgtcgaagttcagttggtgtaaatgtaagagaggatgatgttttaaatgaagtaggtgagatggtgcatgatggatatgagaatgatgtgaatgattgtgagaatgtagtaggtacggagatcgtggctgtcgaaaggccgatggaaaggccggtgaattctgttgaggaagaagatgaggatgttaggattgattatgatgatattcacgatattccacgaagtgtagaagttactccgcaggttatagaatgggatgatggtacgggtattgaaattggtcaagaattttgttcaagggaggctgtgtgggaattggttaacagagctgcaaagcaagaagtttttggagtctatactattaagtcagacccgttgagacttatgctacgatgccgccaagcttctaaagggtgtacttggtatctaagagttgcgagaactaagaaatctcatttttggagtgttagagtgcatagaaagatgcatacatgctctcggagtgttgagactacaagcaacagtatacagcgaggcacaccaagattaatagcatcggttttgcattgtgactatcccggaaatttagagaccccaactccaaaaaacattatgtcgattgtaagaggaagacttggggtgcattgttcatactccactgccttaagaggcaaaatgctacatgttagtgatgtgcgagggactccggaaagaagctacacgatgttattttcttatctttacatgttagagaaggtaaatccagggacagtaacttatgtggagttggaaggagagaaaaagttcaagtacctcttcattgcattaggcgcttgcattgaaggttttagggcaatgcggaaagtgatagttgtggatgcaactcatcttaaaactgtgtatggtgggatgttggttattgcaacagcacaagatcctaatcatcatcattatccacttgcgtttggaatcattgatagcgagaaggatgtaagttggatttggttcttagaaaagctgaaaactgtatattcggatgttcccggattggtctttattagtgataggcatcaaagcataaagaaggctgtcaagacggtgtacccgaatgcgcttcatgcagcttgtatatggcatttgtgtcaaaacatgagagatcgtgtgaaaattgacaaggatggagctgctgtcaagttcagggattgtgctcatgcatatactgagagtgagttcgagaaagagtttggtcattttacaagtttatggcctaaagctgctgactttcttgtgaaagtagggtttgagaaatggtcgaggtgccattttaaaggagacaagtataacattgacactagtaattctgcggagtccattaatggtgtgtttaaaaaagcgagaaaatatcacttgttaccaatgattgatgtgatgatttctaagttttctgaatggttcaacgagcataggcaagattcaggttcttgtccaatcacagcacaagttgtgcctactgtggagaacatattgcacattagatgtcaagttgcagccaaattaactgtgtttgagcttaacagttacaaccaagaatacaacgtgattgatctcaactcggtaagttttctggtggatttgaaaatgaaaagttgttcatgcaaatgttttgatatagacaagatcccgtgtgtccatgctatggccgcagcaaggcacctcgcccgcaaggaagggagaaatgcgaatacaaccatctacggactctgctctgtgtattacttgatagatagttggtcattggcctattaccggacgttgtatgtagtcccacatgagtcggtttgggttcttcctgcccatattaaagagttagttgcctttccgccggaatacacaccaaaaggaccaggacgaaatcaagagaagcggtttccatcagctggtgaagcgcgaaagaggagaaaatcgcaacctggaataaacttggaggcttggctgcagcctgaggaagggttcaaccaatacaactaagttcatttgtatttgcattatattatttgtaagtgtgatgtactatgttttatgttttcgtatttgtattgaattctttgcaagtttattgaattctttgcaagtttattgaattatttgcaagtttaatgtatttttttaagttcaactgagacaactgatatatgtatctgtattttaggattaacaaaatgataaaataattctcaatattttcagctattatcaacatctaaacattgaataaatccaaaatatgatattacaacattgttattaataaacttgatcataaactggtttcctaataaatcacctatgtataacaaggaacatatagttcatgattgtccaatgtacatacgttatgtatgaaaacagatatttactaaatatgattctatcaaaacttattaaaatccattaatatgttaaaacttatgggaccaactaaaaaaatgagttggtttttcagatttaacttcaaaaacacaaaatttagaatagttcaactgtttgtgattccagccaactgtacatatacatacaactatgtgtattctgaatattctaataaatacaattttttttaaaaatagaccccacgacttgcgttcacactacgattattgcgttcacactacaaagtttctacctatttattctccttcaatctctctttctctctctctctcttctatttcacttctctcgttcttctctcttcttcctctctctcgttcttctctcttcttccttcccaacatcggcgacgacaactgaaattagtgttcccattatctgccgccgccgacgataacaacaacaaccaaggtatgatatagggtttcttacgggtttttagccgccgtaattagtagatctagggtttcttacgggtttttagccgccgtaattagtagatctagggtttcttacgggtttctctgttttgtagatgccctatagttactctcaaccatccacgtccgaagctagttggaatagtggagaggcgaatgccgatgcaaattggggggttccagaaaaatgtttttgtggtaagcctgtaaaacttgaagtgtgcaaaactggttacaggcaaggcgacagagtctacaaatgcccaatgcttaaagtaagttattgtgttttcacttcattggaacaacaaagtacaagtgaattatatttatgaagtcttctctctttcgcaggctgaagagtacgagtcccgaaaccaccttattcagtggtgggatcaggcggtaactgaggaacttgagaaggtaaatcacaaacttgattccgcactaagacatggacaactagcatgcaatcatgctttggagtccatccgggaaactattcatctcatgcaaggcgaaattgaaacccttaaagaaaggttactcgccaaagaagtcgagattgataggcttagggcattactttctacatggtgattatgat

SEQ ID NO: 162854 - DNA, 880 bp, Arabidopsis thaliana landsberg
atgacaagtgctcttgaggagagtgcagaccacgcgctgtcttgttctcctcatcaagggcagacgcaccaaacgtcagcgttctgcgtctcctcttatgatgaacgctgctgcagtatccagcgttagtagcggtgaacgatcatcagtggaggtaagagacgaagaagctgctgttgaagtagaattccacggagctaccgatgaagacgaagatatggcgaattgtctgatcttgttgtcgcaaggacatcaagcaaagagcagcgacgatcatttgtcgatgcagagaatgggtttctttagcaacaagaaaccggtggcttctctagggttagggctagacggtgtttaccagtgcaaaacgtgtgataaaagcttccattcgttccaagcgctaggagggcacagggctagtcacaagaagccaaaacttggagctagcgttttcaaatgcgtcgagaagaaaacggcgtctgcgtctacggttgaaacagtggaagctggagccgtaggaagctttctttccctacaagtgactagtagtgatggtagcaagaaaccggagaaaacacatgaatgttcaatctgcaaggccgagttttcttcaggacaagccttaggaggacatatgaggagacatagaggtttaacaataaacgcaaacgctacttcagcaatcaaaacagcgatatcatcatcaagtcatcatcaccatgaagaatctatacggccaaagaactttctccagttagatctgaatcttccagcacccgaagatgaacgatgctgcgagaaaccgaaattcgcgtttgcatccaaagatcagattcttctcttcacggccgcgtcaaattctttgattgattgtcatcactaa

SEQ ID NO: 162855 - DNA, 1244 bp, Arabidopsis thaliana landsberg
atgctaaatccgaaccaactcatgtattatacggttgtggttgtgaatcaaaacttggtatatgtgaaacagtacatctttgaaacgacggcgtatccaagagagcatgaacaactcaagaaattacgagaagctacggtcctcaagtatggcaatttgtaagtctggctgcaacctctattgtccatatttctataatcattatagcttagttgagctaatattttgcaagatatacagtactactatacgatcatactctgatactttccaacaataattgcaagtatcataacgttactacgttagatcctactaaatatgtatgtaccttgtacttccactcgcataagttaatttttttttcttgttaaactttccaaaaaaataaacattttcaaattttgacaagacttagcagcttagtgtggtttgtggtatagtcgtaaaatttatcagatcatcaattcaaggattatactagtaatgaaaaaatggtttgtgcttgtatgcgtagaagcgagatggaggtaccggttgatgaggggcatttcctatctatgcttctaaagataatgaatgccaaaaagacgatagagcttggtgttttcaccggttattcgttgctcaccacggccctagcattgcctcatgatggacatgtatgtacacaacactccttgatttttacaaatcaaattaagcaaaaatgataagagctagcatctatgaacaggttactggaatagatattgataaagaagcttacgagatgggactggagttcataaagaatgcaggtgttcatcacaagatcaatttcatccactctgattgtcttcaggccttagacaatatgttgagtgtaagtaatcagtcttcatttttctctcttttggtatgctattctcttaagttgatgacattggtttatgaatgataatggagcacaggagaatccaaaaccagagtttgatttcgcatttgttgacgctgataaaccaaactatgcaaacatgcacgagaggctaatgaagctggtgaaggtaggaggagtcatagcgtttgataacacattgtggtcagggtttgtggcggagaaagaggaaaacgtgccagtgcacatgagggtaaacagaaaagcctttttggacttgaacaagcgtctcgctgctgatcctcacgtcgaggtctctcaagtctccattggcgatggtgtcactctctgcagacgccttgtatga

SEQ ID NO: 162856 - DNA, 1233 bp, Arabidopsis thaliana landsberg
  unsure (1)..(1233): unsure at all n locations
atgaacgagagtaagcttgacgcggtccacaatcaacttgtggaggatgtcgattatgttcggagcagaggttttccgaatcagagatttcatcaccaagaaggctacacaggttcctatgggaatggtccaactagctacactcaaaattctcagttccagcaaccgctacagaatagcaatagtttcagcttcacaagaaactataatcttgcttcttaccaagcccccccccccccttctacccagacctaagagcaagatagaatcattgctggaacagattctggaaggtcaacaaaggatcttaaagagacctatccctagatggaatgagaggagcctcactatttcttggcacgctgcttcaatggaaagtgagtatgagttagtgaggattttgcagttgcataggcagtgttgaacgacaccaacccttggtgtcgatcgacaccatcgcatatatacgagacatcgggttgtgacgaagcaaaatcgaccaagctcgacattgatctccaaaatcgctcgacacacattgatagtgtcgaccgacaccacttcggtgtcgatcgacaccagtaccaacctgaggaagtgtcgacgtttgacggagcagaatcgaccgagattgacagagcaggatcgatactagatagtagtgtcgaccgacactcacctagtatcgatcgacactggatgcagtttgcagcgctgaattgtcaacatgctaaggaaagtcgagttgtagcacatgtgtcgatcgacacaaccactcgcgtcgatcgacacacatctctagttgaggaagagtcatctccgatagctacttttcaagttgggatcactgctattcgtccaagcactactgtcacgtcacacaatgcacctcttatacttcatccacctcctaaacggctaaggtacttatctnctcctcctaaacctctagatttcatcaataagactttaaaatctccaaaaacagttttacggttaagcaagccacaagtttctcgtcgagcgcttgttctttcttttgatgattgtgcaggaaagcggagtataccagccatacctttgtcctgccctacagacattcctcacttccttggtagaccgcacacaccgactgcttatacgccaccttggatgatgtgaggatctactaggaagtatttacttcctccatctgatccacctcatccccaaactccaccaaattcaaggtat

SEQ ID NO: 162857 - DNA, 2208 bp, Arabidopsis thaliana landsberg
atgaagagcacggagttgaatcgacggtccagggggcttcccagccagtacgagttcacgccggcgaatcgtcaagtcctgcttcaagattctgaacgagatccgattgcacatcctccaacaagtcaaaccgtgagggactatcctcctctgacgcaactttccagtcaggcgaaggatctccttgtggatatagatctcttcggggatctccttctcctcgcagatctggatcgactctgtttcgagcatccggctcgactcaacctagatctcgaggatctattcatcatctagcctccacgttgaaacaatctccagaggcagttcaacctgaagcctccaatcagtctccagcggcggttcaacgagaagcatccaatcctctacttcaggaagcctcaaatcctccacctcgagtctttgtatcacatcacagctctcaagctcaaaactcacacgcggaggaagatgaagatgatgatgctgagtttgaggctgattttgaaagggaatcaactctccctgaagctttgcttgcaaatctacatgacatgcttgcccagctaggccgtgagaagtatacaacggtcatctctcccacatttgagcctctaaccgtatggtaagctgagaatattagggagagttgctaagttgattaggtgtgtaatatgtgtgtgttaagtgtgtgaaaccctatggtaagcttagtttattaagttgattaggtgtttaataagttgattagaataagagttaatattgagtaatgtgtgtgtgtatcctcaaagttgattaggtgtgtaatatatttaataagttgattaggttaagcgttaatattgagtaatgtgtgtatatatgctaagttgattaggtttgtatatgctaattggtttatgtacttgtaggtttggtcacgacaatggtaagctgacccggaagatcacaaaggtcttcacaaacaagtttaatgggccattttacagttggagctgtgtacctactgaaagaagacacatatacttcctcgaattcgcaataaagtaacttctatctcctattaatctcttacatttggtttggtttggttgtttgatcactaacatcaaactctcctcttgttttgtagagtacacacacatggcatccatcagtgaccggtgtagttgaataatagttctttaaaatatgtcaaacgcgtatgaaggacatggtttctaaggcttgcgcaagacgtgccaatgagcgaccgccatggattgagaagacattgtggaaggaaatgtgtgcgtattgagacacagaagaagccattgccagaagttcaaccacatcagtagctcgaatgtctgaccgtaatggtcttggtcctcacaaacatgtatcggggccaaagtctttcttacagattgagcaagagatggtaagttacatttatttatttaatgaatgatttttattaagagtctgaattgttttgtgaacaacatttcagaaaattgagctaggaagaccacctactattggtgaggtattcgttaagactcataccaaaaaagatgggacttttgttgataagaaggcgcaggaaattcatgaggcatatttgaagaacaaggaagctaagttggctgcccgtgagaatgatgaagggtctgatggtacttcccgtcgattagaactatctcaagaggaggatgatgaggtcttccttcaggtaatggtcttgatcctcttgtcttttttttatattatcacttgcttcatcttttctacaataatcctcttgtcttttgtttgcagtcaactgtcacaaacgagagatgggtatactttagaatgagaagcttagggaggtacatcaatggaaagcggaagtacccaggctgcagttctgctttcactaccttgcagtcacagcttgaggaagccaactgcaagatagaagaacaagcgactctccaggcacatcgtgaggcagaggcattgcgggtgaaagctgagcaagcagatatcaagcgtgatgctaatgagcaacaagaagagatcaaacacttgaggatggttaagaagtacttgacagaaagagaccccaagtttctcgcattcctcgagtctgctggtgctactgcttctgctttagaagatcaaacagaggatgtccaaactgctactgcttcacaagatccaccccaggagtga

SEQ ID NO: 162858 - DNA, 3121 bp, Arabidopsis thaliana landsberg
atggtgcatcctttggttgatagagctacaagcgatatgctcattggtcctgactgggccatgaacctcgagatatgtgacatgcttaatcatgagcctgggtaagacctttttcactaaaatgtatttgaatgactgtaaaatccttggtccaatgctctaggtgatcaatccgaatcaatgttctaaaggaaaaatggtaattgttgacattgtgatttcctaaagagaatcaatggtaattttgttgatctcggttatactacatttgtgttgatcactgaagactcggatggttcagatttggttttgatgtttttttttttggttttattccacttttctaatgatatgtgagtgtgtgtttgtaggcaaacgagagaggtagtgagtggcataaagaagaggcttactagtagaacttccaaggttcagcttctggctcttacagtaagttctactaccagggcttgatattcatgttttggtttggtttggtttgattttggattcagtttcggttttgcatagaatgagatgttcttacattattaataccaaacttcacttcagtatgatatgtacacaaccaatagtattcagatatttacttttattttcttcctttttaaaaatttatttatgagaagattaacatattttggttttgttactttgtagttactagagacaataataaccaattgtggagaacttattcatatgcaagttgcagagaaggatatacttcataagatggtgaagatggccaaaaggaaggtcaggctatgtttcttttaaacgattgtttaatctataacaatagttttgtgtgacacctaacttatcatgttgtttgttaaacttatagcctaacatccaagtgaaggagaagatattgatacttatagatacttggcaagagagcttttcaggtccacaaggaagacatccacaatattacgcagcataccaagaattgttggtatgtttcatttttgctgtgacatgtccattttaatcgaaccgatggagatatggtttgaatgttagtatttcgtttaatttcttttatctgttttcagcgtgcaggaattgtattccctcaaagacctcaaatcacacccagttcaggacaaaatggtccttcgacaaggtatcctcagaattctcgtaacgctagacaagaagctattgatacttcaacagagtcagaatttccaactctgaggtgtctatcttaattattgctcattattttctaggaatattcaacataaaaagatttgatcaaatagcatttttttggttgaagtttgacagaaattcaaaacgcaagaggaattatggatgtcttagctgaaatgatgaacgcaatagatggaaacaacaaagaggtatatcttttaacacctagattctgaaaattcatataacatttttcgttaacattgaatctaccaaatgaatgtattttcttttcacctttgcagggacttaaacaagaggttgttgtagatcttgttagccaatgtcgcacctataaacaaagagtagtgcaccttgtaaactcgacatcgtaaagatctgaaacttttacctgcaaaatttgttttgaaactctaaacaattttgacgaatatatgttctttatacacgttttggttcatgtgtcagagatgaatctatgctttgccaaggcctagccttaaatgacgatttgcagcgattacttgcaaagcacgaagccatcgcctctggaaacagtatgattaaaaaagaagaaaaatctaaaaaagaagttcctaaggacacaactcaaatcatagatgttggttcaaggtaagaaacagttctagacttctagttattaaatgttttattttgaaatatctttgggttcttgactaaattgtgtaaaaacttaagaattattttgttgttgtattgtgtgttatattttgatgtataggcattggtttagtggttaaggattgaaggttgaaagattaaaaagattggccttttacactctaaaatatttttgaacttcttttgcagtgagaccaaaaatggtagtgttgtggcttatacaaccaatggtccaaaaatagaccttctaagtggtgatgacttcgagactccgaatgcggataactcattagctcttgttcctctcggacctccacaaccaagtagccccgtagcaaagccagataattccatcgtcttaatcgatatgttgtcagataataactgcgaaagctctactccaacttcgaatcctcacgcaaatcatcagaaggtgcaacaaaattactcgaatggatttggacctggccatcaagagcaatcttattatggtcaagggtcatctgctcctgtttggaatctccaaattactcaacaaccatcttctcctgcctacggaaaccaaccattttcgcctaactttagcccgcccgcctctcctcactatggtattcattttggacctgaaactcaagactgatatcagtacctatagaaaactcaaactaatcctaacttgttttccctttgcatcgttgtctcttgtggtctataaggtggacaaaacaacaacgttctggcattacctccaccaccatgggaagctcaatctccaagctctagccctcaatactctcctacacatccaatgcaagtgactcaagtggtcatcaccacacacacacatcaacccctcggttacaaccctcaaggcggctctcctcatgctaccaacaacaacaacaacaacatgttcgggatgttcctccctccaatgacaggaggccacatgccgccaccctttggccacaacggacacgtcacaaacaacaattataatcccaacatgtacggaggctatggaggacaagctcagccaccacaacagtatcttgtagaacaacaaatgtacggaatgtctcttcaagacaatggaaacaacaatactaatccctaccaagtttcttctcatcagcctccaccaatgatgaagcctatgaataagaaaccagaagacaagttgtttggtgatcttgttgaactctccaagttcaagaaacccacttcaggacgagctggtagtatgtaa

SEQ ID NO: 162859 - DNA, 2430 bp, Arabidopsis thaliana landsberg
  unsure (1)..(2430): unsure at all n locations
atggtcaacaatcaagtctccagtagcgtagttgatacagaggggaacccaatccctccaatccagacagatgctcctgaagccgccgctcccgcgaccctagcagaactgaggagtatgatggctcaacttcaacagaaggtaaacgatcaagaacaagcaaatcggtccttagcacagcaactcgaagcagcaacctctcaaggacaaatcaggactacccgtttcggcgcgaggcacattcacgatcgacgggcggcagcggatctcaatcccacacggctcgtattccaaacacctggcaataccacaagacccgtccgcagaacggcatcggaaatcggacgggaccgaaccgagccggcaattttgagaaatcgggaaacacatcgaaacgaaccacaactccctcctctccgagcggagtttaccgaagccgatcgtatcgacgctttggacaatgaagactccgaggagaacattagatgggctgaagaatacgccagagagcaggaaataagcgccatcaaattatccctagtaaaggcagaaaacgagatgaagctcgtaagatcccaaatgcataacgcagtctcctcagcaccgaacatcgactgcattctggaagaatcccacaacacgccgttcacacacaaaatctccaatgcaataatctcggatccaggaaaactaagaannnnnnnnnnnnnnnnnnnnnnnnnnnnnnnnnnnnnnnnnaagtcgttcatcatctctgtggcccgagccaaattcagaccagaagaaagagacgctggtctctgtcacctgttcgtcgagcacttgaaagggccagccctggactggttctcgagactcgaaggaaattctgtggatagttttcaggagctatcgactcttttcctaaagcaatgttcggtgctaatcgatcccggcacatcagacgccgatctatggtcactatctcagcagcctaatgagccacttcgagatttcctcgcaaaattctgatccaccctagccaaagtagaaggaatcnnnnnnnnnnnnnnnnnnnnnnnnnnnnnnnnnnnnnnnnnnnnnnaatccgaattttgaaaggaactaaacttgtccaaaccaccgacaatccgagacgccctgcaccgagcctcggattacgtatcccatgaagaagagatggagctactagctagaagacacgaaccgaccaagcaaacgcctcgcagcgataaacctcagaccggcgctccgaaccacaagaaaggcgcccaaggtggtatgttcgttcaccatgaaggacgaaatttctccggagcccataattaccaggtcgatacaccccgaggcgaagccacccgaggccgagggcgaggcccgcggacgaggacgcggtcgagaatcctacacatggacgaaggatcaaccctcagggaaagagcaagaatattgcgaattgcacaagagttacggccatcacacgtccagatgtcgtagcctcggagcgagattggcagcaaaattcctggccggagaaattggtnnnnnnnnnnnnnnnnnnnnnttagaggcagaaaaaggtaaaaccgagcaggtcaacgctgtggccaatcccgagcagaccgccctcgcggcgaaccccgaaggacctaaaagaggccggggtaatcgcaaaacagacgacgatgaaccagaagctgctcggggaaggatcttcacaattttaggggattcagctttctgtcaagatacggcagcatcaatgaaggcatatcaaaggaaagccgaagcgaatcgtaattggacgcggccatttaatggaccaaatgacgaagtaacctttcacgaaagcgataccaacggtttataccgttcacacaacgatcccttagtcattacattaaccatcggtgatttcaacgtcgaacgagtcctattcgacacgggaagcacactagaatccacgagatcaatccctgacccggtaatctccatctgtcttgatgacgaaaaacccgatgcgaagaagcttttcaggaactcaaaaagtacctggcgaccccaccaatcctcgcgaaacccataatcggggaaccactttacttgtatgttgccatgtcggatactgtagtcagtggagtgttagtccgagaagacagaggtgaacaaaaaccgattttttacgtctcgtagacattcaccggcgcggaatctcgctacccgcaaatggagaaactcgctctagcagtcctaatgtcagctcggaaactgcgaccctactttcaattccattccatcgtagtaatggaatccatgccactctacgctatcttacacagtccaagccaatcgggacgcctggctaaatgggcaatcgagctcagcgaatatgacatcgagtatcggaacaaaacatgtgcaaaatcccaa

SEQ ID NO: 162860 - DNA, 2401 bp, Arabidopsis thaliana landsberg
atgcctctgaatcatgcggagatgataactgcatcaacacatgtttgcaagtaagttcatggtctagtgtggatactcttcagatttaagattttaaggtctctgaagtttctttcgattgtgttgtatacatgcagtgattgttatgataagctggtgggattccttctatactggttccggataacactgccgagaaatcatttgccagcggatgtagcggctagggaagattgttggtatggatacgcatgtaggacacaacaccacaacgaagatcatgctcgtaaacgtaaccatgtgtgtcgtcctaccagagggaaccatcacttttagtccgcttttcatcttttcctctgacaatcttttgattatattttgggatattctgtatgagtagttagaaactgttccttgaatagttatcaaaatggattattttatcatctgctatgcactatatagaagttgatgtcgggtcaaaaatatatactgttatgtttgacatatatcaatcagatcaaccaatttcttagcaaatttattaacaatcttatgaatagccatttttgtgtgtttcaaactttcaattgccaataaaaatttaactacaatatcaaaatgattcgttacgttaactgaaactctattaaaatgttatgtcatctcaaaaatcttgaatacttagagcatctccatcagtatgtcatctcaaaaatcttgaatactaatatgggtctatctctttttttttttttttccacacttgagtctttctctttctggtcaaaaattttgggtcttttgttatccaattttatgtataatcaaaagctaatcgtgaagttggtaaattgtagtatattacactactaagcagctgatttacggtccttttttcatatttcccatgtgtcaaaatgtaatttgggtaatcattgtcagatgtgacaagcagataagttttctaggttgctatgttaattctgtaatcatcgccaaataatcagattcatattcaagtagtaaaacataaaaaaaaaaaaaaactatcttttatctgttcatggccaaatcaatgcggctaccaaatttagttgatcaattacaaccaattctataaagaacaaaaaaaaaaggtaatttgaatcaaaacgtggctcagaagtgcttgaaaggtaatcacgagattaaaaaatctcaatcatgtgataaaaggtcattttttcttcatcatcaccacaaattttgtttttctcagaaaaaacatcaaatacaatttgaaaataccgcaaaaatattatactttaaaccaacgaactcaaggttgatcttaaaaggataacaaaacccagaaatggtaagcttgaaaccctttttcaagatcaaccttgatttttactatctcgaaaacataatttggatttctgaataacttcaccgtgtatcagttgtattatatatatagtgaaccctgaaattagggcaaaccctctgttcaaaaagaccaaaatagccctaacaacgttcaattatttcgaaaacactctcacagtttccttggtgtctccgccattactccaaaacttctgcttcttcgaaacttctaaagccttaaagtttgataatttatctccaaagacatggtttttccaattgcaacaagctctgttacgaaccccaagctccatcattaccaccatcttcgtgacttcaacagaaacagagtatctacatctctaaagataataaactcgaagaatcacacaaacccaagaaagtaaagttcctctctctttatattctctttgaggaatttaacgaacaccttacgtgcattcgttaacaatgcataacagagtatttttttttttacaggtgtgagtgttttgatctctacgatcaattaattccatacaaggaagcttggtcatggcaaaaaagcattctcaatgagaaaaaagctttgattgataaaaaccaagagtgttcagattcattgattatactacaacatccttctgtttacacaatgggaactggaagctcagagaattatctcaatttcgacataaagaatgctcctttcgatgtttatagaacagaacgtggtggtgaagttacttatcatggtcctggtcaggtaaaacacaatgagtctcctttgttttcttctcaaattcatcaatattgaagctaatggtttgtcaatgaatgtgaaatgtagctagttatgtatcctataatcaatctacggaatcacaaaatggatcttcattggtacttaaggaagcttgaggaagtagttattcgtgttctttcttcggctttcgccatcaatgcttctcgtctcgacggttttactggagtttgggttggtatgtttgttcataatcttcac

SEQ ID NO: 162861 - DNA, 688 bp, Arabidopsis thaliana landsberg
tgcaacaccaccaatagcaactccacctgccgcaaagccaccaatctcaactcctcctatttcaaaaccaccagttgcaacaccaccagccgcaacaccacctatcacaactccaccacccgcaaaacctcctgttgcaactccaccaatagcaactccacccatcgcaaaaccgccagttgcaacaccgcccaccgcaacaccaccaattgcaacttctcctgttgcaaaaccaccagttgcaataccacctataaaaactccaccacccgcaaaaccgcctgttgcaattccaccaatagcaactccacccgtcgcaaaaccgccagttgcaacaccgcccaccgcaactccacctattgcaactcctcctattgcaacaccaccggttgtaacaccgcccaccgcaactccaccagttgcaactcctcctattgcaaaacctccaacgacaacaccgcccaccgcaactccacctgttgcaatgccaccaatagcaactccacctaccgcaaaaccgcctgttgcaactccaccgatagcaattccacccgtcgcaaatcccccagttgtaacaccgcccaccgcgacaccaccagttgcaactcctcctattgcaaaaccaccagttgcaacaccacccactacagcaccgcccaccgcaactccacctgttgcaaaaccaccg

SEQ ID NO: 162862 - DNA, 3947 bp, Arabidopsis thaliana landsberg
atgcatgatgagcaacgagaaccgttcgtcgattcgtcggacggcgacatgacgacggcggcgaaaagaatcttcggattgcgccaaaggtgatgataggtaagctttggtgggaaattgggaattggcttttgaataaaatagaaagaagaaagagagaaccagaaaaaggaagtttgggagagtgacgaagacagcgaaatttttagatttacagggccactaagaattatccagttgtcaaggagtgactgacacgtgtcggttacggttttttttttcctttctgaatcttttgattcttctgctttgggaaccgtaaacgatttgtagtatgggtttgtgaaaggccatgggcttattttatgggcttgataacagacaggataatattaaaaatttggaacgttacaaaaagaatacgaatattaaaagagataaaaattttattattattagtattgaatcctttttaattttttttttgtgcaaagtaatagtattgaatccaacacaatttttctttttctttttggaatgctagttaacatttcttcaacaaatatgtataacacatgttttatcattaaaaacttgaattgtttaatctcatgagaatccagctaagatcaatataataagaatccaacaaatatcaatattataaataatttcatggttcagtcaattaattagatgtcgaaatgtgtaaaaaaaattaacttctttttctctataaaaactactataaaagacatatttatattttttaaaattataattgttttggcgaataaaaacaaacaaaattatctataaataaagagattgtaattttattagtttagatttatgacaaaataaatttttgtgaatgtgacaaaatagaaataccaacaaaaaatataagacgttgagatgcacaaactgttggggtcggatttggcctcgtaggacccgagccaactaaacaagctccgagaacgcctcagaaacatctgtcgggtatatttggctcgggaatcgttccaagacgcacactccgggctgatgacaagtacctcggaaatcgcagcaaggaatcatcctgagccagcttagaaaacacctcggggaccctgcaagtaatcttccgtcccgaatttagcaacgcctcgggtgctttcagggtaccaccccgaggcgaacctcggaaacgctttgggtaaacgatctaactcgcacgaaacgagccgttcaactacaaaccgacaagaggtacccggctcggaagaaacttcacactaaggccaaaacatctcaaacctaagggaaagacttagacccgacgcatggtcaagataccatgtccgaaaaacctggaaatgatatttggaaatcattaaggatattaacaacaaagagaaaatcccgcaaagatctccagaagataaagatttatcactgccgcctcaaagataacaacaaatctcccaagaatatcgcgaggggcggctcaaagccttatataaagcacctcaaggcatgagagaaggggcacgcacaaaaacgctctcaacttcaggctatcaaaaacgctctgactttgaaggcaaaaacacttattttcatattctagaacacttgtatgatcaaatcattactttctcattaatacaatcaagaacaccgtccgcgataattgagaattctgttggtctttgagaatctcacaaagattcgttctttgaagaaacccttaaaacaatttctattgtgcgatttttgactctcacaatttggcgctagaaggagggtgtattgagatttctcttactcccagaacacagaaccaaccacccaaaccactatggtcaacaatcagattcctggtaacacagttgacggagagggaaacccgatccctccaaaccagacagacgttcctgaagccgccgctctcgcgcgcctagcagaactaagaagtatgatggctcaacttcagaaaaaggtgaatgatcaagaacaagcaaatcgatctttggcacaacaactcgaagcagctacctcccaaggacagatcaggactacccgtttcggcgcgaggcatcttcaggatcgacgaacagcagcagatctcaacccaaaaaggctcgtgttccacacgcctagcaatactacaaggcccatccgccgaaccgcaccggaaattggaagagatcgaaccgaaccggcaatcttgggaaatcgagaaacgaatcgagcaaagggaaacgatccgcagctccctcctccctgagcagaaattgccaaggctgatcagatcgaggtctcagatgataaagattcagaagagaacgttcggtgggctgaggagtacgccagagaaaaggaaataagcgctatcaagctctccctagccaaggcagaaaacgagatgaagctcgtaagatcccaaatgcataacgcagtcttctcggccccgaacattgaccgcattttggaagagtcccacaacataccattcgcacacaggatctccaacgcgataatctcagatcaaggaaagctaaggatcgaatacttcaacggatattccgacccgaaaggacaattgaagtcattcatcatctccgttgcccgagccaaattcagaccagaagaaagagacgctggtctctgtcacctgttcgtcgagcacttgaaagggccagctctggattggttctcgagactcgaaggaaattctgtggacaggccgaggacgaggccgcggtcgaggacgtggtcgagaatcctacacttggacgaaagatcaacccgcaggaaacgagcaggaatattgtgagttgcacaagagttacggccattatacttttgttgttgtagcctcggagcaaagttggcagcaaaattgctagcaggagagatcggtggaggtttgaccatcgaagacttggaagcggaaaagggtaaaaccgagaaggtcaatgctgtggccaatcccgggcatgcggcccccgcggcgaacatcgaaggacccaaaagaggccgaggtaatagcgaatcagacgacgacgagccataagcagctcgggggagaatcttcacaattttaggagattcggctttctgtcaagacacgggggcatcaatcaaagcttatcaaaggaaagccgacacggatcacaactggacgcggccatttaacagaccaaatgacgaagtaacttttcacgaaagcgataccaacggtttagaccgtccgcacaacgatcctttagtcattacactgaccatcagtgatttccatgtcgaaggagtcctagtcgacacgggaagcatactggacatcatttttcttacgactctacaagaaatgaagatcggcatgatgcaaatcgtaccaactccacaacctgtgctcggattctctggggaaaacactatgactctcgggaccatcaagttaccagtccgagccaaaggggtagtaaaaatcgtcgatttctctgttaccgaccagccgaccgtgtacaacgcgattatcagcacaccatggttaaatcaattccgacgtgtcgcctcgacgtatcatctctgcctgaaatttcccacaagcgacggcgtgaaaaccatctggggaatcaaaaaaatgctcgaatctgcttcatggcagcacacaagctcaggaaccccgtcactgaatcgaaggccgacacgaatcataagaaggccaagcttggccgagctgaagagaagtcaattatcgagcagttatagcagctacggattgaagaggcttgggagtccacaacaccaactcccgatccggtaatctccatctgccttgacgacgaaaagcccgagcgatgcgtagaaatcggcagagatctaggagaagagttaacagctgaactcaccgctttcctcaaaaaaaacgtcaatacgttcgcctggtcccagaa

SEQ ID NO: 162863 - DNA, 4042 bp, Arabidopsis thaliana landsberg
atggagaaaatgtaagataattccaaaagaagatccaaacgaaatattatatgtgctataattatgaagaaaatgtaagataattctcaaagaagatccacacgaaatactgtttcatcgtggtcgacgaaaatacgcaataaattaaatgaaattaatacgattattttcctgaaatatagtcagataatttttttgcatgaaactacaaaatctgacggcttgaaatatttctattcaacggccggtattaataggagactcccatatttttaaaaaaggaaatgacgaagcgcgtgtttttttaagcgaactacgaaaccgaacggctaaaaacaattcaattgaatgaccaaaattataacgtataacccaaaagttgtaaacccgggtcaaaaggattcgcgtgttctttaagtgaaggcgagagatcgaacggacacaaacacttcaatcgaatggccaagattataacgtatgacctaaaaattgtaaacccgggtcataaggatccgcgtgtttttttagtgaaggcgagagatcgaacggacacaaacacttcaatcgaatggccaagattataacgtatgacccaataattgtaaactcgagtcataaggatccgcgtgttttttaagtgaaggctcgagatcggacggtcaaaacaattcaagcgaacggccaagattataacgtaacttaagttattctcagtaaaaggtaaactttttcatgacattaaccatttaaacatatgatttaaaggtaaaaaaaaaatttaaccgagaatcacttaacgtacgtctcaaataatagagtagattgaaattaaaatcataatttacttgaatcaatacaaaccataagtaactatatttcataaaccgacaaaacaaaattagacaccgggtaatcaaactgaatttattgtgaaagtcgtctggccagtcccttttttgcaaagaggaagccaaaaaatccttgtaaaaaacagaaataattttttttttcttttcaatccgaaataaacggatattactagtatatccccatccgaacccattaattaccagaaaaaccatggttcgtttccgaaccaaaccacccaaaccacttttactttttatttgaaaattaaataaaaaaaacctaatattttcagggatttcccaattcaaatttcattctttttctcattacaaccgttttcgatttttcttcttcttctccttagtaaccgctgaaattaaccgcaacattccctatttctttaaattcaatcgatcgttcttcttcctttcaccagtatttccgttctctttccgattcgaaatcagtcatgccgcctaagacgcgtgaaggaggtcaagggaaaaaaaaggagatagaagcgccggcgccggcgaagacatagaaagttaaggcgtcggcggagaaaccgaaggttcaggcgccggcgaagaaagataaagagaaagtgccggttgaggagcagtcgccggcacaaacgactgcgacggcgatggcaaccaatgcggctccaacgacagcggctccaacgacaacggctccaacgacggctccaacgacggagagcctgatgcttgatgattctacgttttatgatgctctgaagcatattcctgctgaagaaattcaagagaatatgcaaactgatgaggtagaagatgaaaatgaaaaagaagaaacaagtgaataagaagaatcagggagtagtagccgaaccttgggctccgattccgattcagaggagacggagacaaacaaagaactcgcgtgtgctaatcccgtggatgaggcggagagacaagatgacggcctagccgttatcgaggaggaggaggagaggagctccgcgagcgacgaggacgtcaatgtgaaaaagtccgtggaggatgagggagacgaggacgagagagacgaggacgtgatagtggaaaaacccgtggaggagatgactatagacgaggacatcgcaaatgtggtaagtattccatttcgtaataccgatctaattgggtaataatgcaattgtgaactgtggacagtactagtaacattggaaaatgctatgttgatatttaggtaatattggcggatgtgggtaataccttagagtaatactacaattgtgatttatcgatagttagtactagtaactttgagaaatactacatagtaaaataggagtatctgtgtaatactggtaattacggggaatacttctgagaaatacagagtaatactgtggcagtactatttacaattgactaatatatgaatagtaggatttgtgtaatactggtaatttcggggaatactttttggaaatacagtgtaatactgtggtagtactatttacaattgagtgatatatgaatgaatgtttgtttctttcaggatatggaggaagcgatggcaatgcagccacttggtatgcacttcccggcgtcggagtataccaagaagatgaagttagcaacgaggtgttatatctcggaggtgttgaagaccttcgctgacttggaacatcctctaacgcatgttgagaagaattattttatggagcatccgaatttcaagcacatctaccacctgccttccagatatacccacaaattaatggggatgtggatgctttttcttcgaacggcatctattgagaagaagaaggaggtttggttcgttgttaatggagttcccatccgctatggtattagggagcatgctttgatctctggtttcaactgcaaggcctatccagctaattatcagagtgctggtaatatgaacttcgccaacaggtacttcaaaaccggggtaattagacgtgaagacgtgaaaaccaagctaatggagatggaaccggctagatcaaaggataggttgcggatggcggtcctctattttctaacaagcatcattgccgtgcctactaagactggagaaagggctagtccaattgatgatttctgtgttagggctgcaagtgatcttacgttttgtaagacatttccatgggggagatattcatttgagtacatgttaaaatcgatctcacacacattggatcattttaacggtgtcgtcccgaacactcagtcaccatggcctgttcccggattctgtgtgccgcttgaggtaagtcttttgctttatccttgttacattttcgtaattgaagctaacaattaaatttcatgtgttttgtgtagtttttagcatttgaggccattccatcacttagggaaagattcatagaagaaaaagagggtgcacatgccggttgtccaaggatgtgcaaggtgaatttcaagaggaccgagatgaaagggtttacccttgagcaaatcaaccatgtactcggaacaactgaggttaggaattcctattattccttgagcaaatatgagcaaatatgattttatttctttctaatatttcattgtctattatttccataggtcattgagagtataattagagagaaggctgaagaagtaccccttttggctgaaatcacgggagtagaggatgatgttgataagcacgatgttgtagttgatagttggatgaagcgtcttggtcaagggcgtgaaattagatttgaggaggtgtacaacgaggatgtgcatgcacgaatggaagccccaaatgaagaggaagttcccacagctgttggaccgggagacccgacgttagttgatgtaatggagaagctccattccatcaatgacaagctgaatgaagctttgttggcgcttatggaaatggaggaaaaacaagcaacgttcgaagcatttatggatgagatgaaagccaaggtaaatctgggtaataccggatatactgttccataattggtaatatcgcgtaatactaaggtttaactaaattaacaatgcagatgtctcagaacccaccagatgaggaggaatcaacaatcaaggaaaatgcggctgctccttttgtgcccaaacgagtgacccgttcaacccgtgcaaagtctagtaacgtgtga

SEQ ID NO: 162864 - DNA, 1818 bp, Arabidopsis thaliana landsberg
gggggagatatttatcagaaagttaaaggaaatatcttgaaagagcctgccaccaccgagaagagaattgaaggttaaaaacttctgcctgaatctctgataaatagatactatgtatccttgtgtcctgtcttaatctattctttgtctttcttctgttgatacaaactctgtgttttctatttatagaaacaccaattctgttcttcatacgacgagagaagagaaaaatgaggagtagagatatggagagaggtaggaaacacagaggggacacccagtggacggcttggctgactccaacaattgtcgtggctaatgtctccatcctcatcgttgtcatgtacaccaacgactgccctaagacaaccacgggagccaacggagattgcgtttaaagcttctccgcaggttctcgtttcagccactcagagagaaccctttcttgggtccatcttcttcaacgtaagtttctaaaagaactcgaaagccaaatttttgtgaacttttgatgtctgtttcaattcataaacccttaaaagtctctgtttatttctccaatgtttcaaggttttgattactgccttaacaaatcaggttaaggcttgtggggtatttcactagtatctttcgtttcgtttcatctttatttttcaattttgcgatcctttcacacgtcattgttatttgcgattgctttgattagtttgttcatgccatgttgtattcgaaacaaactctgttcttgagatacagctcatcggagtcttttcctttgttgtctaaacaacatgattcaggtcaaacttgtatctttgaggacatatttggatttaagattatgacttatgagcttcattagcattggggtctgtaactcttggaattgctgtgattccatgctctatccgacctgcgatgattctaacccgatgatggtttcagattggagaaattgggagctttggattggaggaaagtcgtgcaaggaaatgaaaaatggaggctcatcactgctatgtggctccatgccggtatcattcaccttgttatgaatatgtttgatgtgatcatcttcggtatccgccttgagcaacagtttggcttcagtaagtctttcctatcaccgctcattttacccgcgatcttctcattctcctgttctattcatgtattcaaaatgtcttgtaaaacgattctgcagtaaggattgggctcatctatctgatttcgggatttggcggaagcattctctcagctctcttccttcaaaaaagcatctctgttggtgcctcgggtgctctccttggactcatgggagcaatgttatctgagctgctcaccaactggactatctacaagagcaaggtactgtgtcatgttctttcccaagatacaaacattaaccgaaaatataacatggtttcattgccttgacaatcttctgaatttttccagctttgtgctttgttatcgttcttgttcatcatcgcaatcaatttggcaataggtttgcttccttgggtagacaactttgctcacattggcggtctcttgactgggttttgccttgggtttatcctactgatgcagcctcagtctgggtgggaagagttccgcaactcttctcagtacggtgcccgtgctagatcaaaatataacccgtgccagtacgtgttgttctttgttgccgctgttttggttgtcgccggtttaacagttgggctggtgatgctgttcaacggagagaatgggaacaagcattgcaaatggtgtcatcgcctagactgttatcctacttctaaatggtcttgttga

SEQ ID NO: 162865 - DNA, 3838 bp, Arabidopsis thaliana landsberg
atggcgggaaactataattatccgagtagcagttgttttaatcgagattggatgtacaagaggttcgatgaaatgacggtgaatttgtcagaagaatacgtcgtacgagtggaggagttcttgacatttgctaatagctagcctataatacaaagttgtcgaggtaaattccactgtccttgtgctgtgtgcaagaataaaaaacatatcgtctcgggtagaaaagttagtagtcatttgtttagtcaaaatttatgcctgattattatgtttggtataagcattgggaagatttcaacatgaatgtaggaacgagtatttatgttgatagtacgtatctaagagagaattatgaaagtgtgggtaatgttgtagaagatccatatgtggatgtgggtcatgttgtagaagatctatatgtggatatggcgaacgatgcattgcgttataacgtggggtttgatgataactatcatcaagacggtactaatcagaatgtggaggaaccgatacgtaaccattctaaaaaaatttacgacttgatagaaggtgctcaaaatccattgtacgatggttgtcgtgaaggccagtctcaattatcgttagcagctcgagtcatgcagaacaaggcggatcataatatgagtgaaagatgtgtggattcggtatgtcaaatgttgacagatattttaccagaaggaaaccaagctactgatttccattacaagatagaaaaatttatgcgcaatttaggccttccttattatacaatcgatgtttgtattaacaattgtatgcttttctggaaacaagacgaaaaggaagataaatgtcggttttgtagtgctcaaagatggaagcctatggatgactaccgtcgaataaccaaagtgccatatagttgtatgtggtatctacccattggtgaccgattgaagagaatgtatcagagccacaagactacagctgcaatgctttggcatgccgaacaccaatcaaaagaagaagaaatgaatcatccttcaaatgcggcgaagtggagatatttccaagagctacatcccatgtttgccgaagaaccccgtaacgtttatctcggattatgtactgatggatttaatccatttggcatgtcgcgaaatcattctttgtggcatgtgatcctgactccatataatttaccaccgggtatgtgcatgaatacatagtacttgtttcttacaattctgaattctgggccaaatcacccgcgaggtagtctcgatgtcttcctccaacctcttattgaggagctaaaagagttatggtctactggaatcgatgcatatgatgtgtctttgaatcgaaattttaatctaaaagcagtgttgctgtggacgataagcgactttctggcgtacaacatgttatcaggatcgacaacccacggtaaactgtcttgtccaatttgcatggaaagtactaacttttttttatctacctaatggaaggaagacgtgctggtttgattgtcaccgaagatttctttctcatggtcatccattacggaagaacgaaaaagacttccgagaagaaaaagacgcttctaccgagtatccacctgagtctttaaccggtgagcaaatttattacgagcggttgtctggtataaatccaccaagaaccaaggatgttagtggcaacggtcacgaaaagaagatgccaggctatgggaaggaacataactggcacaaggaaagcatattatgggagcttccatattggaaggatctgaatctccgacattgtatcgatgtgatgcatacagagaagaattttttggataacataatgaatactcttatgagcgtgaagggtaaatcaaaggacaacataatggcaagaatggatatagaacgattttgttctcggcctgacttacatattgatagtaagggaaaagctccatttccagcttatacattgacaaatgaagccaaaatgagtttattgcaatgtgttaaacatgcaatcaaattccctgatggttattcgtctgatttgagtagttgtgttgatatggagaatgggaagttatcaggtatgaagagtcacgattgccatgtttttatggagcggttacttccatttatctttgcagaactcctcgaccggaacgttcaccttgcattatcaggtaaaataagaatataatttactctttatatcatatttgcacttgagatgatgcaattttttttttcaggggttggcgcgtttcttagggacttatgttcgagaactttgcagaaaagtcgcattcaaattcttaagcagaacattgttttgatcatatgcaacttagagaagatcttcccaccatcattttttgatgttatggagcacctgcctatacatctcccctacgaagcagaattgggcggtcctgtccaatataggtggatgtatccttttgcgaggtttttcaaaaagttgaaaggaaaagcaaaacataaaagatatgcggacggatcaattgttgagtcatatatcaatgacgagatttcttatttttcagagcactactttgtcgatcatatacaaacaaaatcaaggtaaatataattatttattttacgatgcgcaagctatacttcagaattaaaatcaattacatggatcaggttaacaagattcgatgaaggaaaagttcctgtatatcatgtccctagagtacctaacatatttatgcacgtcggccgtccaagtggtgaaatgcacgtggaatgactttcagagaaagactaccaaagcgcacatgcatatgttttaagaaattgtgactattttcaaccacttgagaggtattttaaatcactccttaatttaaaatttccattatgataactttgatttatttatctttggttgtaaatatagtatgttcgaggattttctttctgtgaaatatccaaccttgtccgaaaaagaactctacgcgaaaagagctgaagaatattatcaatgggttaaagaatatgtaagtctacatcattttagtaatttttaaaagtgatcatttaaattatgttgatattgtttatttattatgtaggtaacatattggaaccctacttttctatttcctacttgggttcaagagattgtgcatggacctttgaacaaggttaaaacttggccaatgtatttcacacgaggatatttgtttcatccaaaaaatcatggcgctggacgaaaaacatgtaactatggggtatgtgttaaaggaaaaaattacgcggattcatctaatgaaccggatttctacggtaccttaactgatatcatagaactcgagtatgaggggatcgtcaatttgaaaatcacactttttaagtgtaagttgtatgacccaaaggttggtagaggcacttggcgaagccatagtggtgttgtagacgttctatcatctaggaaatacaataaatacgagccatttattctaggtacgtaattaagaatacataaggttctttataaattattaaataattttgtatatttattaatgtataatttgtgtattcagcatcgcaggcagatcaagtttgttatattccgtatccatatacaaagaaaccaaaaagcatttggctaaatgttttaaaagttaatcctcggggaaacatttctggagaatatgaaaacaatgatccgactcttttgcaaacagaaaatgatgaagctgtgttgctgactacaattgaagatcgggtactagacaatccggtagaaagcttaaacccaatcatactcgattatgatgtaaaagatgatgaaccagaggatgaatttcgat

SEQ ID NO: 162866 - DNA, 1524 bp, Arabidopsis thaliana landsberg
atgatttgtaccttccacagagtattccgatcagtcagaatcaactggtatgatattgaaatctggcttacgaaaacaataaatcgaaatcgaattcgattattgcagagatttgggggaaatgactatttggtttttattttcagagaggatagagtcgccggagtcgcggattggtggacagtgacggaggagtcgctggagtcagaggagtggccggattcgcttctcgtcgcaatgtggagaaacaataaattagggtttttactaggttcgtgttttttttatgatcgtgataaaagaagatagagaaaaccggttatatttcttaggttttcttaaaccgacgatttcagggtaaaggggtaatttcgatcactgaaagttactaatgcttatgaagtgcctatttgcggccaaactttctaaaaagtgcctctacatgtaatattctcttaattatttgacttatttaccgtttaactatattttttcatcggccatctcttctctttccttttcccatctcttctctctctttttcttttttttttctcactttatcaaagaaaaaaacctttcccataatatcttcaaatccactctacgcgatactttctcttctctctggaccaatacgagaatacgagcccttgttttctttaagattgtaatttattttgcaatttaaatctttgttttgacataaatttgagattcagttctcgaagaaccttcttcttctttgataagtgtgtattttgcatgtttgagcatccatttgtcatcactttagcatcatatcatcactgttttataccatttcacatcatttgtcatcactttgcatgtttaggatagttttgcatgcatgttgcttatttgcgttgatttcaggtgatttggagctgttgacgagctatctggaagaagcagacgtgatcatgacaaaccactcgaccaagaggtcgagtaggagcttcaaaatctcaagagaccactcgacaacgaggtcgagtagagcacatcaccacttcacctcaccactcgaccccgtggtcgagtgccatcatctccatcaccagacggtcactagatcacgtcactcgacctctaggtcgagtgccttcacctccatcatcagacaaccactcgacctactcactccacccagaggtcgagtatcttcatcacaatcactcgactgcatactcgatgacaagcttcagagccttcttcattccgcactcaatcagacactcgagcaaaaggaagaaaagaagactccagctactcactcgagctctcactcgaccacgtgggtcgagtactgttcttaacccgtcccaatacttcgtcgttttgagtattagggtttcgggatatttggctataagtagcatgtacttcacattttcgcaaaaaaaggttggtttttatctagttttattttcgcagaccttgtgttctagactttttgtaatccggatttctctttatctattcattattcagtattcagtt

SEQ ID NO: 162867 - DNA, 1756 bp, Arabidopsis thaliana landsberg
ataaaatacgtctatgctaattttaagggattgatgtgaagtttgtttggattaaatttgattgataatgtgattgacaatttaaattaaaaatttaaagtaaaattaattattttggaaaaaaaatttaatgctaatgacattgggttgtaaataagtccaactctaagatttatttgctaaaatgactgtaaaaaatgtatatatagataatctacccggtccaaaccggtttggtaaactgaatcaccgatctagagaatcaaccttacttgtgcctttctcgctcaagtagagaagctcgacggtaaacagaaacacttgatacgacgtcgcataacaacgaacgatgacgtcgctaccgtacgccgatgccgattgtagcctcagggctttagctggccgtgcagagggattcggacgctccgccgtcggtggtctccacggcgatctctatgtcgtcacttctcttgcaggtgatgtattcgtaaaatctatctacgaatctatatatgtacctctatgcccgatgctttaccgatgatcatactggaatgtatggataaattcgccttcgtattgattatgagatgcatttgttgattgtgttcgaagatcttgagattggttatgtgtggattttagatgatggacctgggactcttcgtgaaggaggtaggaggaaagagccgttatggattgtttttgcagtttctggaactataaatctcaattcatacttgagtgtatcgtcttacaagacgattgatggacgaggacaacgaattaagctcacagggaaaggaataagattgaaggaatgtgaacatatcatcatttgcaatttggagtttgaaggtggtagaggtcatgatgttgatggtattcagattaaaccaaagtctagacacatttggattgatcggtgtagtctccgcgattacgatgatgggcttattgatattactagacaaagcacggatattactgtttctaggtgaggtttgatgattttggatggttatggttagggtaatgtatgctcttgactggtgcttaatgttgcttctggtttctacagatgttattttgcacagcatgacaagacgatgctgattggagctgatccttctcatgttgaggatagatgtatccgagtgaccattcaccattgtttctttgatggaactaggcagagacaacctcgtctcagatttggaaaagttcatttgtacaacaactacacaagaaactggggaatatatgctgtttgtgctagtgtagaagcgcaggtaaactcttttgcagatcttagatcattgcttgaggtctcacctgaagattcttatgtttctgaaatcaggtgttctctcaatgcaatatatacgaagcaggagtgaagaagaaaacttttgaatactactcagaaaaggttaattctcgcttttcatttgcatcagagaaaatcttgttcttattttgaatccaccaccatcatcttgtgtgagtttgtttgtaggctgctgacaaggaagaagcgagaactgggttagtacgatctgaaaatgacttgttcttgaatggagctcaaccttccttgatgacaggagccagtgaagaatgtgtattccatccaagtgaacactacccaacatggactgtggagccaccatcagaaactctcaagcaaatcatgcaaatttgtaccggttggcaatctttgtcccgtccttctgatcatggagttcctaagtaa

SEQ ID NO: 162868 - DNA, 2837 bp, Arabidopsis thaliana landsberg
atggatcctaaagggaagggaatcgtgatcaacgacaaggagaaggagtccttcgtcaacgagccaaaggatgacaagtccaacgactcgagctcgggccacagacgtaaggatgggaagaagaagaagacaagacgcatcaaggagatcgtctactacgacagcgatgagtctacttcctcccaaaaggacaacgactacgagaaaaagaaaacggtcaattcgaacttttcttttgattattctcgtattcctcaaagtactaatgctcatttattatctattccacttggtaaacctcctcattttgatggagaagactacggattttggagtcacaaaatgcgtagtcacttgttctctctccatcctagcatatgggagattgtagagagtggaatgaactttgatagtacggatagtcccatgtttattaatgaacagattcataaaaatgcacaagctactactgtgttgctagcctccttgtgcagggacgagtaccataaggtgagcggcttggacaatgccaagcagatctgggacaccctcaagatctctcatgaggggaatgatgtcaccttgctcaccaaaatggagttggtggagggcgagcttggacggttagcgatgataaggggcgaggaccgacacaaacatacaatcggctcaagaccctcatcaacaaaataaggagctacgggagcacgcgatggacagaccacgacgtcgtccgactgatgctaaggtcatttaccgttcttgatcctcatttggtgaataatattcgtgaaaatcccaggtacaccaaaatgccgtccgaagaagtccttggaaaattcgtaagtgggtgaatgatgatcaaggaggcaaggtacgtggacgacaccttgaatggaccgatcaacgagccgcaacctcttgctctcaaagcaacaagaagcaaggaggcgctacctaacaatgtggcacaaattgaggcggccgaacttaatgatgaagagatggcttttcttcatcaaagagattcaagacggcgctcaagggtcgcaagggacagccaagcaagaccaaagccaaagggaagcgctcatgcttcaaatgtggtaagattggtcattttatcgctaattgtcccgataatgatagtgaccaggaaaagaagagtggaaagtgggaaaagaagaagaactacaagaaggcgaagggcgaggcacatcttggaaaggagtgggattcggattgctcctcgtccgactccgacaacgaaggactcgctgccaccgccttcaacaagtcatccctcttccccaacgagcatcacacatgcctcatggcaaaggagaagaaggtatgtactcaaaacaatacttatgcttcttcaagcgaagatgagtctagtgatgatgatgaaatagactattcatgcttattcaagggcttagatagaactaagattgataagattaatgaattaattgatgctttgaatgataagaatagattactagaaaaacaagaggaccttttatatgaagagcatgataaatttgttagtgcacaaaattctcttgctctagaagttaaaaggaatgaaatgctctcttgtgaactatctacttgtcatgaaactattgccaagttaaagagttttaatgatgatttaaatgctaaactagaagtagcgagtaaatctaattcttgtgtagaaattgttgaaacctgtaataggtgtaaagatattgacattgatgcttgtagtgatcatttagtttcaatttccaaattaaatgatgaattagctagtcttaatgcccaacttaagactagcaagaatgaatttgacaagctaaaatttgcaagggatgcctacacgattggtagacaccccttaattaaggatggacttggatacaaaagggaagccaagaacttgacaagccataaggctcccatctccgccaaggagaaagggaaggtccctatggctagtagtgtgcaaaagaaccatgcctttatgtactatgatagaagacaacctagaaatacttataggagttgtaatgcatataatgcctttgattctcatgtcatgtttgcttctagttcttcttatgtgcatgatagaaatgttggtaggagaaatgttgttcataacttgcctaggagaaatgttgttaatattcctaggaaagtaaatgaaccttctacaatatatcatgctttaaatgcttcttttgctatttgtagaaaggataggaagatagttgctagaaaattaggggcaagatgcaagggagacaaaacttgcatttgggtccctaaggatatttgtgctaaccttgcaggacccaacattagttgggtacctaagacccaagcctaaatttgccttgcaggtttatgcatccgggggttcaagctggattatcgacagcggatgcacaaaccatatgacgggggagaagaagatgttcacctcctacgtcaaaaacaaagattcccaagattcaataatattcggtgatgggaaccaaggcaaggtgaaaggtttaggcaagattgcaatatctaatgagcactctatctctaatgtgtttttagttgagtctcttggttataatttactatctgttagtcaattatgtaatatgggatataattgtctatttacaaatgtagatgtgtctgtctttagaagatgtgatggttcactagcttttaagggtgtactagacgacaaactttatttggttgattttgcaaaagaggaggccggtctagatgcatgcttaattgctaagactagcatgggctggctgtgcatcgccgcttag

SEQ ID NO: 162869 - DNA, 2995 bp, Arabidopsis thaliana landsberg
atctatggacaaaattggaaactaattttcaaagaaatcgaattggaaatgaaatagtgataaggaagtaagtttaacctgcgggtcaagctctcaacttcttcatcggtgacttgaccaccaaacaccactttgctaatcccatccgatggctacaaacacattaaaccaaaattgaaacaaatactattaccagatggatcaaaatcagagtgaaatttcatgaatttcgaaacggtgcaagtacctggtgggaacgaacggcggagcgagaagcggatgaaggagaatccggcggtggaacttgcgaccaagtaagtagatctgcggtggatgtgtgtggctttctcaccggagtacttctctccatactctctcactcactagtcactagcaagcaaacaaatcgaagagaatgagaaaaatacagagaggaagaagaagaagaagattagtctctctcttttcttttcagcttcttcttcccacttggtttaagattaatcgattgtgttaattgactctattaccctttactttgttcgtaaatctcattttgatctggaagcttcttctctacgctgccacgtgtgattaacaagtggtcatgatcattaaattcaaaatcagattttctaatcagaaaattgttgtgattagtataatttgttggcgtttaacgggaatattcgaatacttttcttctagtaaggaattgggattaatattttagaatgtaaaaaaagttgttattagggaaaaaataataattgaagagtattagatagaattatggtcaatcatattcttctctttttttttctgacacaagaccatgtgaagccatcaaaactaataaagacttttaccaacgttttatttaagcagtgtgatcacgtgatgccaaccttttattagccatttagcatacaacatgtaatttgattaaaagtgtaattatttcaaaagccgtgattttatcctctcaattaggccttcataactaaacttaattattttccgcaatctttaatcctgattcttcgtaacgaaaactaaattagtaaattcaaattgtcacggagatatgcagttttttacacggatccttaaaagaacatgcgtccaaataaattgtggttagacaggaatatacacagtaatttgattaattagttaatctagattaaaaaacatgtaatctactaagcccaaaacgtttaattcgaagctttatgttgttgttgacaagaaaatgaagaaaccactaggcccaaaacctagacccaaaccaattatattgaacaatgtttgggcctttatttgaggatccatcatcaaagaccataataaaggcttctctttcacaaattccaaaattgtaagttttaccattttaaaacttgtttccacgcattttgtgtgatttctttctttgcctttaataaagcttcgtgctcaataggctgccacggaggcgagcctgaaaaatgccgatgacggttgtttccggtcgattctcaacggcgttgctccctacttgcttttccttgtcgcggttgcattccgtcaagtacgccgctcaaagacgggttgttttcgtttccagatcactcacgcctcttcagcctccgtctccgttgagacaaattcgaattcgaatgtacgtgccttagttcttctccaactttttgtaggaacagattctacttgtatatgttatcatgatattcccgaaagaaatcataattagatttttgtttgagttttacgtgtatttgatactactttgttgtgaatttgattttgtttgatgatctcgaatatcagatgattcaatttgattggtgtgcaggtggattttgttatcgagaagaaggataagaacagaggagagaagaagattctagcttgtcccatctgttataactccttagcatggattagtcaacctaatggattaatgtgagttttacttttcactaatttttatcgtttgttcagaaattggattgagagaataagtgaatgttccaattttcttgagaggcaagttatagaagttttgtattttacagagaatctgctgcctctggtattcaagtacaatgcaatacatgtaaaaggagttactcgggtaatgagacgcatcttgatttggctgttgctagtggaagcaagagatacagtgaaccaatgcctctttccactgagttatttaggtagatgatatgctttattggattctttgtcaatgtcctgtcttctatgtggaaactgagatttttttggaattgtttttttataggactccactggtctcgtttctctatgagaggggttggcgtcagaatttcatatggggaggttttccaggaccagagaaagaggtgagacaaaaaaaaactatctcaatattcaaaggcctcttctttggcggcaattatctttcaggaaatgcgtcaaatttctgattgtttgtcccaattagtatatttcacttaacataatgaagcttacattgattttcaatttttgaaccaaaaatttaagaacactgataaagttgcattccacagtttgaaatggctaaggcctatctgaagcctgttttgggaggcaatatcattgatgctagctgtggaagtgggatgttctcgaggttattcactagaagtgatctattttctctggttattgctctagattactcagagaatatgctgcgacaatgctatgaactcttaaataaagaagaaaactttcccaacaaagagtttgtactttcaccttttgctttctttattgtctttagatcttgggttaccagatgtgttatttttactcctgctgtctcgtttccaggaaacttgttctagtccgagctgacattgctagactccctttcctttcgggttcagttgacgctgtccatgctggtgctgctatgcattgctggccttcaccatcctcaaccgtaaagcttttctcctaa

SEQ ID NO: 162870 - DNA, 1290 bp, Arabidopsis thaliana landsberg
atgggtttggattattacgatatattgaaagtgaataggaacgcaacagaggatgatctaaagaaatcttacagaaaattggctatgaaatggcatcctgacaaaaaccctaacaccaaaacagaagctgaagccaagtttaagcaaatctctgaggcttatgaggcgagtctttattttggttgctaatttttattcccttgttcccttagatccattgctttagctaataattcaaagttatatgtaaatgagtttgttttcttgggatataagcaaaacaaaatgtatctcctcaagcatatgaggtaatgttgctgcattgctaagaatatgaggtaatgtttcaggttttgagtgatccgcagaagcgagcggtgtatgatcaatacggggaagaaggattaagcgatatgccacctcccgggagcacgggaaacaatggaagagcgggaggttttaaccctagaaatgcggaagatatatttgcagagttctttggaagtagtccatttggatttggttcagctggtggtcctggaaggtcaatgaggtttcaatcagacggtggaggaggaatgtttggcgggtttggtggtggaaacaacggtagcgaaaacaatatattcagaacttacagtgaaggcactcctgcgcctaagaaacctccaccggttgagagtaaattgccttgtagccttgaagagttgtattctggatcaactaggaaaatgaagatctctagatccattgttgatgctaatgggtaacaactttctctatagtctttactttgtttgtattttttaatctttttagacttgtttctcaagtttctttggatggtgcaggagacaagcgcaagagacagagattttgacgattgttgtgaaaccaggatggaaaaaagggacaaagataaagtttccagacaaaggaaatgagcaagtgaatcagttaccagctgatttggtgtttgtaatagacgagaaaccacatgatttgttcacgagagatgggaatgatctcatcacaagcagaagagtaacgcttgcagaagctataggaggaacaactgtgaatatcaacaccctcgatgggcggaatctacccgttggtgtcgcggaaatcgtgagtcccgggtatgagtttgtggttcctggagaagggatgccaatagctaaagaaccaagaaacaaaggtgatcttaagattaagttcgatgttcagtttcccgcaagattgacaacggagcagaaatccgctctcaagcgggtcttagcgggttga

SEQ ID NO: 162871 - DNA, 2434 bp, Arabidopsis thaliana landsberg
tgaggagaggggacgagtaagatggcaaagatgataaacaagacgcttgtattaacttatatctacttgctgatctacattatactttcttcaggagttatactgtacaataaggtgattttttagaggcttttatacttaaataacgtatctaattgttaagcagatatgtgtagtttgcatgttagagcctgtatctccatataaggcttcgatgtttaattatatgtagtgtatctgagatggaaaccatagccaaacccttttcgtagcaatcggtagtaattttttctataccctatgtctacctgggatgatactattctgatgtatcgtcggatgttggatatgcaagggctatgatagtattctgatgtatcgtcggatgttggatatgcaagggctatgatagtattctgatgtatcgtcggatgttggatatgcaagggctatctataactgtagtttgtattagcttttgttaaagtagagtctgacttctaaatcgtgactcttttattgctttttatttgcagtgggttttatccccaaaatacttcaattttccccttcctataacgctgacaatgatccatatggggtttgctggattcgtggctttccttcttattcgtgtcttcaaggtatcctaaactcaaagattatggagtttgctcctgcacatcttatctggagctctcttttataatattatcttctttgtggatccttagactccttttgcaagggcgtttataagttttcctctgttttgtaggttgtagctccggttaaaatgacatttgaaatgtaagccagtttgctctatatttttcatctatatttttttgttctcttcgcacgccccctccactggctctccattttgacattcttaatgggcccagatatgcaacctgtgtggtacctataagtgcattctttgcatcaagtctctggtaagttcctgttctatagacaataaacataatttattgatgcgcttattgctggccatcaggttcaggaaaactctgtattttctagtatttcttgcttcccaaactgtctcttcactatttcttattctcttgtgcaggtttggaaatactgcatatttgcacatttctgttgccttcattcagatgctgaaagcactaagtatgtgaagagttaacattttggttacagaatctgtttagtttatctattcattacaaagcatattaatatgtgactatgcaatttcagtgccagtagcgacatttatcatggcagttgtttgtggcactgacaaaccaaggtgtgatgtgttctcgaacatgttgctggtcagtgttggagttgtgatatcttcttatggggaaattcatttcaacatagttggcacagtctatcaggtgacaggcatctttgctgaagcacttagactggtgctaactcaagttcttctccagaagaagggtttgacattgaaccctataaccagcttgtattacatagctccctgcaggtattgatactggttatacctttggtttcagttcgtctaaatatattacattacattatttttgctagatggaaagttctgtctcactctactgcatattaatatacatgatcttttccttgacacactatgccttcaatttgtgcatttttgtttttctggccttaccttggtatgtgttagagaaacccacaatggaagtttcacagatccaattcaacttctggatatttttctccaatgctctatgtgctcttgccttgaacttctccatattcttagtcattgggagaacaggtgcagtaaccatccgggtggctggtgttctcaaagactggattcttatagccctctcaaccgtcattttccccgagtccacaatcactgggttgaatatcactggatacgcaataggtagattacttgatgtcacaacaaatgtgattgctgtaaacatctttcttgactggtttttgcccacataactatttattcttgtcatgtgtttgacacagcgctatgtggtgtcgtcatgtacaattacataaaagtaagggatgtgaaggcgtctcaaccaacagctgacagtcttccagatcgaatcaataaggtcagtcaaacattctcgatctctaagctcaagcagatctcagcttgcatttccctttcaaaagaaccactagagttgcaaactatagtgtagaaccagttaccttttttttccttctaatgtaacaactgatgaacacaaacattacacaggagtacaagatggagaagaagtcttcggataaattcaatcctaacgacagtgtggagatcccaagagtaggaggagaggtaaacgacgaggaagcccctttgatcacatcccggttgtctcatattggtcggacgcagctcggaaatcacgctgcttaa

SEQ ID NO: 162872 - DNA, 1806 bp, Arabidopsis thaliana landsberg
atgttgaggaaggcacagattccacacaccaccagccgcaaaggaatgattcgcctagcccatgagatggtatatgtctactctttaatcaattaagcttgtgtaaattggttaccatcaactaatcactatcatacttgtagaagagaaagagttctgaccctagtaaagtaacaagaagtaaagtctggatagtgggacatacacattcagatgggagacctgttaagccagagtttgaagctgttattgtaagaatttacattcttattatggattttgtaagtagcttagagtaattgcggcttgctttttttgattcaggataaaataaagactatagatagtcaaatggactccagctctagtataagtatcaaagatgatgctgtgagccaagtattaggaaaagacaaatccggaagagttagaggaatgggaagagggataacttcttccaagttagcattcatagaggctagagacactcatgtgcaaaagcttgaagcaacccaagcagaattgctcagcaaggttgaagacctacaaaatgtagttcgtgacttagctgcagggaaaagggtaagttaaatgtacaatttgttattaaattcatgtcaacttgtaagtttttaaatacttctttgttttcttcttgtatgtagcatgatgatggttgtaactcggagtccagtaatgttttcaatggaggaccgaggtgttagctgttggaatggtattcagaagttgaggttgttgtaggggaagcagaattctgctcagctgatccaatgtacaagataggacatattccactcggtcctaatgcagcagcagttatggtgaagtctgcatcaaacaaagaaacatctacctggaggcctacaccatctgtgagttcacttggcgaagctgttggctgcaaaattccatggccattcaataaaataattctggacaatatagactcaccaactggaattaagacagctggttcatcggtaaaagttttttctttgaactagactaatttttgtttgaagcttatgactggaaggcttataataatttttctttggttatgtatatatgctaccaatgcattagatgataagatcctgatttatgattggaattctgaggatgaaataatagctgagggtagttggtattcaacggaccaaaaagatctagtcaacaatgttcctttaggtccaaatgctgcaattgtgactgttagtaaagtagttaacaaagaggcttttctatggagacctagtgctgatatgagtttgatgggtgatgcactacatgagaacattgcatggcctatacataagatacaattcattcaagcaccatggcgtcaggaatctgtttcaaaacacgcatcacctaaggtaaatttcaaaaccatttcccttttacttgtgatgatgaattgttgcatttttaggaggctttgttgtagtgaatgaaactgaaatgattgtttggcctctttattgtagagcactagtgtaagtgtaagtagcagctctgaccccaacaaaggtggaaagaaggaatgcatcatcttagattgcaaaggaacatgagaaaaagttgtagaaggcagagtttgttttacaaacccaacaaaactcgtccattttgtgccatatgggtcacaatgctaccaaggtttggatagacgtttctaaggctggagatgcaccagtttggagaccaaactcagaagtcgaaatcattgctgatgcattaggtactacagtgacttggccaaatgacaaacttgtttttatt

SEQ ID NO: 162873 - DNA, 996 bp, Arabidopsis thaliana landsberg
gtgtatttccacagtcttcacgagttgtctcctttctcaactagatggatgatttgtgttatggttcttagagtgtatagaaagtttcacagtgggaacacattcgaactacgggtcgtctttgtcgatgaatcggtaaaacaatcttcactcttcttacaagttatatttaaccttattcttattccctatataactcaccctccgatgttgttttcatagggaacacaaattgaggctacaatcggaagacgtttttctcctttttacttctatatgctccaagagaatcaatggaaatcaatctcaacttttcgtgtcagtccaaactttgaaccaatcaaagcaacatcccaccattatgtgattgagttcatggaagaaacatttgtcacatgctcatacccaagggaaactgtattacttaacagattcacaccttttgactacattattgaagacacagttcttacagatactttggtcggtaagtaatacgtatctaatgcagatttcatactttcacctttgacatgcctgttttttaacttttatttcatactcccagatttggttggtgcactcctcgatataggatgtatgagaaattcctcacacaatggtgtcaagattgacagattgagactttccttcgagattatggacaaataatacaatttctttcgatcaattccttttaaatttctttcttttcatcatgtatttttcttgagaggggtataattgtaacactgttttatatgtttcagcaaggtgagattgaaatgtgaggctgttggccaaatggcggttgacttggatagcaggttttgatcttttcgcaatgctaacattgttattgcacacacttcgtggaggatcgttaggtatcatactggccccaaacacatgaagattttcaattatccgaccatatcacttgtgactgtcgaacccaatatcgaagaagtgcaagagataaaaatgatcgtcgac

SEQ ID NO: 162874 - DNA, 2576 bp, Arabidopsis thaliana landsberg
agagaaaggatggagagagaactcagacgaccgaacccaatcaacagctctcgccggccggagatattttcttcaggcggtaatagtactcaactaccggaaagcccacgaggcccaatggagttcttgtctagatcctggagtgtctctgccttggaagtctccagagctctccacaccgccaaatcagcttcagccaccaacaggcctccctcatccattaacactccgataccggaagaaacgctaaaccctgagaaagaagaatgtccgccggagaacagtactagtgttagtagccagttctcgttcgctgcctcggccacttcacagcttgttcttgagcgcataatgtctcaatcggtacgtttacatagctatggaccgaccgacacacactgtttttgtatcttgatgatgagtttattctgttttgaaaaatgaaggaggtgtcaccgttaacgtcggggaggctatcacacagcagcggcccactcaacggcggcggttcttttacggagacagacagtcctcccatctccccttccgatgaattcgacgacgtcatcaaggtacttctttccttatactatctctctaatccttccttggtttatcctttttcttagaacgtaagtctccgccatactttagagtttgttagcaaagtaaacaaaaattatgagtcaaaagaaaagcagaggcagcagacagaaacagatttgactttgactctccactttacaacctgtgtttgtttactttaacctctctcattcatttcacccacaaaaaaactacattgtttttttttgtttcttgttcattcatatgactggtagaaggtctccgtaaattgggtcgttgccatacataattttaaggaagtgctgcaaggtttagccttctgggtcttgggacttataaagctggtcggcgatcattaaagcgatagattgatagttatgcagtttcaatgttttctttttcttcttccattgaatgctctgtctctactgcatttacttgatgaattggaatttataaaagattaaagacataattggttggacacaggaataggaatgttacggtaacgcctagagctcctctttggttggctcattttaagaaagttatcggtaaatgcttttagagcgagcagtcactttacctccatttccaagcagttcattaatcctttatttgctttttgtagtccaatataatgccatcaacttgttggatttttcattaagtcagcttatctaataaaccagtcctaatgcagtattttcgcacccacaacaccatacagcctctcttctccggcacaggaggcagccgtggtaccaccggaaatggaagcaatacccccatggctggaaccggtccaaagacagttggtaggtggctcaaggaccgtaaggaaaagaagaaagaagagactagggctcagaatgcacaggttcacgcagctgtttctgttgcagcggttgcatctgctgtggcagctgtagcagcagccacagcagcttcttcccctggtaagaacgagcagatggccagaatcgatatggccatggcttctgcggctgctctggtggctgctcagtgtgtggaggctgcagaaatcatgggagcagaaagggatcatttgacatccgtggtgagctctgccgtgaatgttaagtcccatgacgatattgtcacccttactgcagctgctgcaacaggtactgcattaaaacgtagtcacccttacttctgtagagattccatacctgaattcacccccttttcttttgcagctctgcgaggagcagctacactcaaggcaagagcgcttaaggaagtatggaacatagctgcagtattgccagccgagaaaggggcaagttcagcgttgtgtggacaggttgacacaaagcatagtgatagcagctttagtggagaattacctgtggctggggaagacttccttggcgtctgtaaccaggaattactagctaaaggcactgagctcctcaaacgaactcgtggaggtactccaaagctacacccgtataaatgatttgtaagccaagtaaaaagcaagggtcgctgaccttgaattttgaaagcaggtgaactccactggaagattgtctctgtctacatcaacaaagcaggccaagctgtgctgaaattgaaaagtaaacacgttggagggaccttcacaaagaagaagaaacgtaggttcttctcagcacaaacatgtcatctcttacactagcctggcttttaaagtaaagctagatagataatacaagtcataatagtctttgatttggacttgtgttgcagatatggtgcttgaagtgagaaaggatatacctgcatgggctggcagagatcttttcaacggagacaagcatcactactttggcttaaagacagaaacaaagagggtcattgaatttgagtgcagaaaccaaagggaatacgagatatggactcagggcgtatccaggctacttgccattgctgctgagaagaagcagaaaagttccatgtccaaatggatggcaccttaa

SEQ ID NO: 162875 - DNA, 1076 bp, Arabidopsis thaliana landsberg
atgatgatgttaccagaagcatgcatagccaacatccttgcctttacatctccggcggatgcattctcgtcgtcagaagtctcttcggttttccggctagccggagactccgatttcgtatgggaaaagtttctaccatcggattacaaaagcctcatctctcaatctactgatcatcattggagtttttcttccaaaaaggaaatttatcgatgtttatgtggctctcttctcatcgataatgctcgaaaggttagatttctatgagttaaatttgaataaaaaatagatatcgttttaatttacttgaactaaaaatatcttttgtgtatgatgcaatttcagctgttcaagatcaataaattttccggaaaaatttcctacattttatcagcaagagatatttccataacttatagtgaccatgcatcgtactgctcttggagcaatgtctcagattctaggtcagtttttttctttcttttcttaaaataactatttatgattgtgtacatattgataatgttacacgtttaattaatctctattaccaatatttagttttcttaaatttcagattttcagagtcagctgaacttataacaactgatcgtttagaaatcaatggtaaaatcttaagcggagttttatcaccaaacacaaaatatggagcatatctcatcatgaaagtaactaaaggtgcttacggactagacctagttccggcggagacatcggttaaatctaagactggtcaaaataataagaacacaacttatctatgttgcttggatgagaagaaacagcaaatgaagcggctattttacgggaaccgagaagagcgaatggcgatgactgtggaggcagtaggcggagacgggaaaaggagggagccgaaagctagagacgacgggtggttggagattgagttaggagagtttgagacacgagaaggagaagatgatgtagtcaatatgactcttatggaggtgaaaggatatcaactgaaaggtggcattttgattgatggtattgaagtgaggcctatacctctgaaatagggatcaagatgagta

SEQ ID NO: 162876 - DNA, 1073 bp, Arabidopsis thaliana landsberg
atggaagattctttaggatggcattttactaaagccggaaattatacagtcaaatctggatatcatacggctcggttagatttgaacgagggtacaactctcataggtcccgatcttacaacgttaaaagcgtatatttggaaagtgcagtgtccacctaagttacgccattttttatggcaaatattatcgggttgtgtaccggtatcggagaatttacgaaagagaggtatactttgtgataagggttgtgttagttgtggtgctccagaggaatcaattaatcatactctttttcaatgccaccctgcaaggcagatttgggcactatcacaaattcctacggccccagggatttttccctcgaattcaatttttacgaatttggatcatttgttttggagaattccttcaggcgtcgatgcggcttcttacccatggatatttggtatatatggaaagcaagaaatgaaaaagtttttgaaaatgtggataaagatccaatggaaatattgctcttatcggtaaaagaggctcaatcgtggcaggaagctcaagtcgagctccatagtgaaaaacatggttccttgtctatagatagtcgaattcgggtgagggatgtatcacaagatacaactttttctggctttcggtgttttattgatggatcttggaaagcaagtgaccagttctcaggaacaggatggttctgtctatcatctcttggagagtcgccaaccatgggagccgccaacgttcgtagaagtctatctcctctacataccgaaatggaagctcttctttgggcgatgaagtgcatgattggagcagataatcagaacgtagctttctttacaaactgttcagacttggtgaaaatggtgtcttctccaaccgaatggccggcgttttcagtgtatttggaggagttgcaaagtgatagggaagaattcacaaatttctctttatctttaatttctcgtagtgcaaatgtaaaagcggataagttggcacgaaagattcgtaccgtaccgcatcatgtcacgtatgtaaacaatatccctcgagattga

SEQ ID NO: 162877 - DNA, 2332 bp, Arabidopsis thaliana landsberg
  unsure (1)..(2332): unsure at all n locations
atgatgctcgttaatcctcttcccttttctccgttgagatcactaaatccttacaagaacacttggcgtattcagattaaattgcgtcatgtttggaggcaatactctgtaaaggctggtgaatccatcgaaatgattttggttgatgaagcaatacatattatattttatgtgtatattttccataatattgtttgtttggcaagcatcatattcactatttatttttttcattttttttctttttatcatacagggtgataagatttatgctgttgtgagaagagagcaaatcaagaagtttgaaaagtacttaaccgagggtgtttggaagatcattacgaccatcactctaaatcctacaagtgtctagtatcgtatttctgacttgaaatacaagattgattttgttttcaaaaccacggtctctccatgtgataacgtttctgatgcttttttcctctcacttgctaagttcgatggggtgctctctagatccgctaactcaaatatcttgcacggttagattcaagtttttatattagtttagaacatacatgcattattccttatgtagaaattatattcatatatttattgtatttgtctatacagatattattggtcaggtagtcgatcggtctgaaatccaaaatcttaacgctagcaacaagcccaccaaaaaaatcgattttcatttgaaagatcagcagtacaaacaatctatattcatattcattcttatttaaagtttgttgtttttttttactttttattaataaatttcttctttccattttagtgacactcgcttggcatgtacactttgggggaagtttgctgagattgtggaccaagcttgctaggaatctactgatggaattgttgtttgcttaatcccgattgcgaagatcaatctctacacgggtaattatattgttatgtattactacatatctatacttttttaaaaacacgatcttatatttttaaaacagatactaggagtgtttccaattcttttgatgtttcacaagtcttcgtggatcccacgttggctgagttgggtctttttaagcaaaggtaattgtatttatttgtcactaaatatatttgtttatacataatattaagcaaactatattttcttgatatatagcataccaactgatgggttaactttgggaagtttggatcttttcacaagaggctctatgcaccaagaactggggatgacgatggtgattatccaaggcaaacaatcaaggaagtcctcacatcttctgatgtactatttattactttatttatcatactaacatttttattatatttttatattcttagattagtttgttaattcctctttatattcatttgaaggtgggtaagtgcaaaacagtttgcactgtttcggcaattgatacagattggccgtgctactatttttgttgtcgtgctcacaacaagaaggttgtcaaagaagaagctatcaaacttgaagatgtcaagcaacctcaaaagccaagattttggtgtgaaatatgcaatggttttgcaaaatctgttgttgccaagttagtctttatgaaatctttttattgaatgtattattaattataatttggtgtttagaacctaataatcctatttaacctttaggttttggttacatctccatattatggaccaaaccggtgaagccagatgcatgttattcgatagtcatgcaaaggaaattcttggcactactgcccctgaattgcttgatgggtcatttgatgaggtatattgtctttttaaaaataaactctttcattaaaatgtctacgttcatattataataatctatatttttctgtagatcgaagatccaactgttttccatgatgtgatcaatggtttgaaagggaagacttttcagtttctattgtgcattcaaagggaaaacatatttggtggatatgattcattcactgttgcccgagtctacaccggtaacattgctgatgaaatcgttcaagaagactctgatgcatacgttgatccatcatccttnnnnnnnnnnnnnnnnnnnnnnnnaataacattaaacaattccaatcattaatatttatttcttagggttgtcttattaaaatgtttatgtattttcatataaggttcccttatgctcactaatggtgttgacctttctgatgtggatttgtcgtcaacctctactccatcatcaaaaccaaaagaagatgatgttgatggaaatgatcaggcttccacaagtaggaaaaaatgttctaagatgaccatgtctgaggaaggctccgacgaatga

SEQ ID NO: 162878 - DNA, 1375 bp, Arabidopsis thaliana landsberg
atggcgatggttgttagactggttcgagtagagtggaaaagagatgagtctggatgctatgaacatgtcgtcgagttagatgggttatgcttggcggtaaaaatctgggaaagagacccgttcgctaaagttgttgacgccgtgaaggaaagattatcactccagtcggaagatgaagtggagttgtcttaccaatggccgcagtggataatgggaccagattggcagagggcaaacccaatacctattctcgatgatgaggatatgactttgtttatggcgatccgatctgatctagaggaggttcacctgaaggtgaagatcatacggaaaatgttgggagcatcaaccgtaaattcccaccgaagcgtcttagatatggggaatatgacctcggaaacgatatccgataagtattggaatagcagtgaaacacgagcagcttgggattccgcagtaacgagaatgttgtatggtatcgtctctggtaatagtgtaaccggtgatgtcggtctagccaaatacggtgcaggaccccatatagtcaggggagggggtataactatcagagaaaacacgggagagactggtgttggaagcgtcgcaccaagaacgctaacccaaggccatccaagtgcaaccgctaaagggaaagaacgtatcttggacgaagagagcatcaatgacttggagttcgcagtttggaggaagaaccaacaggaagtgatgctgcgagagatggaggagagagaaatacgactggcaggctctatggtaggacagctcgtcacgactccagctaaagctacggataacgatgttagagggcaaacaagttcaaacccggaggaagccattcgtcttacacttggcaacgcggctccagttgctgacgtggtatccgtagtggctctatcttcaacaaactcgacattcaagacaccgtctaacagtataagcttctctagtgaggatctaatggacgaagacgaagtatctagtaacaattgtctggcaaggataggtatgttagcaaatacagttagtcttatccaaataacattcatgttgacttgtaactaaccgcgggatctgataaagtttttcttacccatatacaaaggcgaagacgaggtggcgcactactactcagaccccgacggaccgctgtgtatggcaccaatgaacacccccaaaataagtagagtcaacaacattgttaggggggagattgttgcaactgaggcacaagttaatgagttaaatacccatgttcgccggaggttggcagatatatatttgaaagaaacactagtgccaacagttttgtatgacaaggacgccccaccatatttcgacgaccctggagaagaag

SEQ ID NO: 162879 - DNA, 3467 bp, Arabidopsis thaliana landsberg
  unsure (1)..(3467): unsure at all n locations
atgagttcaaagaaactgtacttccctacaaggctgttccaaccaagcagcgaaatagataatattacaagggtaacaaagcattcatccaacaaaattgtcttgatggtcagggaagcattagagccgatagaggtcaagacattaatggacacgttcttgggtcctatagtggatttaactgaatgcaatgacatagccttttcaagccatatcgtccatcatttactccgaagaaggatactaaccaacaatgacgaattgtggtttgtatttgctgatgaacctatgcgattctccgtgagagagtttacataacaacatgatttccaatggatgatgcatcaagaagcagtccaaatgtgaagagaaagaagatagaaaagtggtggataaaagataatcagactttgaagagaaagcagaaaaaagatttgtggattaatgaggatatgcgttttatcgatcttacatatgttttggaaaaccattccaaaaagatgctgccagaggagagaatgagattgcgggcttgttactaatggaggggatattgttagctcgaaattcgactaccacgctgccaattgagaatcttcagagagctactgatttcgaaaagttattcaagtatccatgggcgcagattgtttactcaaatttggtaactgaagtgaagaaattcgatattgacattttgttaaggaaacaatatgttctatttcgatttgtctccccaattcagctatgggcattatcatcggttcagaagttgggagaaaagtttggcactagagatgaatcatctagtggaaatattccattaattctccaatggagatcaacatcgtttccaagtgcaaaagctataacaatgatagcagatggtgacaaggtacattttcttagctatgaatttttttatgttttaaacactgtttataaataaagagtatgttttacaatagtttttacaatcaagttttaaggatttacaaagggttaaaagcaatttaaactatttacaacggattttaaaaggttaattaagaattgtgcattatttttacacagtttggaattttgtttatctttgcaggttgaagtgacaccaatagttggtgttcatactcatgaatacgaccacttggtttcacagaagaatcctgaagacaaggatctgttggatgtttttgatcttgtgatcaaaggatatagaatgagcaagaaggattggtgtcagggatggattcaagtggaacaaggacatcaaggaagaattgatcatgtcttgaaacctgcaattgaaacagttgtgcatcaaagcagaaaaaggaaatcaatgtcctttggtgagaaggtaaaactggtatatgaaaattgtgaggttcttaagaagaaagttggaaggctggagggctatttaggcatcgaaagagtttctgccagttatactagagaagaacaaaaagaagaggacgaataaaaggagcaggaagaagaaaagcacgaggaagaaggaaaataagaggaagaagaaaaggtatgtgtttttacaagggattttaanagcttataaatcgtgttttaaagatttttagccgttttaaaaagataggcagtgttagatatgtatttacaagggattttaaagacttcttaatggggttttaaaagattgaaatttgtttttaaagggtaggcagtgttcgataagattttacaacggattttaaaagctttttaaaagtgatttacatgactaataactgtgtcctggcttgtatttgggaacttgtaattatttatacagtttgaatacagagatcatcattctacttgcaatgttgaagaaacagaaaaacaagagaatcccaaacaaggcgatgaagaaatggaaagagaagaaggaaaagaagaaaaagtagaagaacatgatgaatataatgatgctgcagatcaagaagcgtatataaatttgttagatgatgaagataatgatactgcacccatagaaaaagaatcacaacaaaaaaaaaaagaaacaaaggtctcctttccttaactttttaaaaagacatgataaaattgtcaaaaaataaaaattttgtgttgatgttttggtttacaggttccaaaagaagaaaacgtagaagaacatgatgaacatgatgagactgaagatcaagaagctaatgggactgcacccacagagaaagaatcacaacctcaaaaagaagaaacaacagaggtctgcattccttaattgtttaaaaagacatgataaaattgtcaaaaaataaaaatttgttttgatgttttggtttacaggttccaaaagaagaaaacatagaagaacatgatgaacatgatgagactgaagatcaagaagcatatgtaattttgtcagatgatgaagataatgggactgcacccacagagaaagaatcccaacctcaaaaagaagaaacaacagaggtctgcattccttaattgtttaaaaagacatgataaaattgtcaaaaaataaaaatttgttttgatgttttggtttacaggttccaaaagaagaaaacgtagaagaacatgatgaacatgatgagactgaagatcaaaaagcatatgtaattttgtcagatgatgaagataatgggactgcacccacagagaaagaatcacaacctcaaaaagaagaaacaacagaggtctgcattccttaaattttttaaaaagacatgataaaattgtcaaaaaataaaaattttgttttgatgttttggtttacaggttccaaaagagaccaagaaagatgatgaagatgttagacaaacaccactctctactcaagaagaaaaaatcacccaggaacagagcagtggtaagttgtttttacattcacagatgatttgccttgagaaacaacttctaatattactattttttttgtttttgtatcagttgaaattcctttgacgcaagtcattttgagtaaggaactaatggaagaaattgacctaaaaattaaaaaaataggcgaaagacaaaggaattagagatctgctatcgtcacttgaagaagtaagttaaattacgtcattgttttgctgcaaaagattttaattctaatcattttggaatttttacatttcagattcttttggcccgacagtaaatggcaaaaagtcgaaatttggaaaatgtgggacgagaagaaatacaaattagcattaaagaaagcaacgttactcattcatcctgacaaactgcctcgagctcatccagaagtgaaatacctagctgaacaaatctgcaagataataatggttagtgttaaactcttcttttgtataacgatatatctttaaaaacttgaatattattgttatgcaaaaaataacttacagtttgaattttatttgcaggtagagaaggacagagctaataaggcaaaaatggatttagttctt

SEQ ID NO: 162880 - DNA, 3451 bp, Arabidopsis thaliana landsberg
tggagcacttgttttcctagtttcttctacatttcgactgtgctttttctgctcaccggtggaggagtttactctcactctgaatatttgattggattgggaagctatgacattactggcccggctgctgatgttaatatgatgggttatgctaacatggagcaagtagcatctggtattcacttcaggctccgtgctaggactttcattgtctctgagccccaagggaagccggttgtgtttgttaacctcgatgcttgcatggcttcacaaattgtaaaactaaaagtgatcgagagactcaaggcacggtacgcacctaatcttttcctcggttgactagccttagtttttaatgagattgtagtagctaagtctgtatgatgatcgagatggaataattaagctgttgtttgcagatatggggacttatatactgaacagaatgttggcatcagtggtattcatacccatgctggtccaggggggtatcttcagtatgtggtgtatatcgtaacatcacttggatttgttcgtcagtcgtttgatgcccttgtcgatggaattgagaacagtatcatacaagctcacgaaaatcttcgtcctggatcaatttttctcaataatggtaaggaccatatcctcttctctctggatctgtacgtatatgctgcaggaatgatctttggaactgctattctcatgaggctacttaaacttatcttacaggggaactcttggatgctggtgtaaaccgcagtccaagtgcatatcttaataatccttcaaaagaaaggagtaaacacaagtacaacgttgataaggaaatgactctcttaaagtttgtggatgatcaatggggtccagtaggtagtttcaattggtttgctacccatggaacttccatgagtcgtacaaactctttgatcagtggggacaacaagggcgctgcatcacgatttatggaggattggtatgaacagaatactgctgaaagatcttactctgaagagtttatttcagatgagatacctagaagagtttcaagcctaatcgagaatcatcaggacagtcgtaagtttaccacgcctttataactgctgtacattgtgtctataaagatggaacacgatcaaatattcagtgtgtttggtccgatgcagatcacgagttgctagagcttgcatcttactttgagtcacaacctggtaagcctgtaactagaatttcaagttctgcaaggcgggtgaggagtgctctgaggaaggcggataagcctggcttcgtttctgctttctgtcaaacgaactgtggagatgttagcccaaatgtgcttggagccttttgcctggacactggtcttccttgtgatttcaatcacagtacatgtggtgggaaaaatgagatgtgctatgggcgtggaccagggtattcacctgtctttttttttttttttttttttttttggtcgtcttacaagtttggatagcacaaacttatggtaaactctcatgacctatttttctttatcatttcagctatcctgatgaatttgaaagtacacgtataattggtgagagacaattcaagatggctttggaacttttcaacaaagcatctgaacagctacaagggaaggttgattaccgccatgtttatgttgacttttcacagctcaatgtgacacttcctaaaaaagatgggaaatcagaagttgtaaaaacatgtcctgcggcaatgggctttgctttcgctgctgggaccacagatggaccaggagcatttgattttacacaaggagatgataaggttttcagtaaaattcataatgcattatccaataagtagatattgcctttatgctttccaattcttaagtctacgtttggttaaatcaggggaaccctttctggagattggtgagaaatgttcttaaaacaccggacaagaaacaaatcgattgtcactatccaaaacctatcttgcttgacactggagaaatgacaaagccatatgactgggctgtaagtagttaaaaatgtaaacttccatgagtcttgtatacagtattaagactctactctaacttgtcgttttgaatccagccgtcaattctttcattgcaagttctacgtattggacaacttttcattctcagcgttcctggaggtagtggagaatctgcagattgtcacaattaataattttgactagtgatgcgatgtttaataatcctgtctatctttcttgtcagaatttacaactatggctggaaggcgtctccgctatgcagtgaaaacacaacttaaaaacagtggtaataaagatttgagcggtgagattcacgttgtgatagctggattggctaatggttactcacagtatgtgactacttttgaggagtatcaagtgcagagatacgaggtaaaagcttatctactggcccttttaaacaaacaagagttcgtattcttacattaatatgcatgtgttacaatggttgcatctgttagggtgcatctacgttatatgggccacacaccctcagtggctacattcaagagttcaagaaactctccaaatctctcgtccttgatatgcctgttcaaccggggcctcaaccgccggatctccttgacaagcaactaagcttcctcacaccagtcatgatggacacaactcctagcggagacagtttcggggatgttatttcggatgttcctaaaaacttgtctttgaagagaggaaacggccaggtgaccgttgtattccggtcagcctgccctagaaacgatctactgacagaaggtatcatcacccaaacccaatagaaaaaataatatttgagttttttttttaatttctcgagtaatatttctttgaaacaagttactatagagactatacttgtgcttgcctgtaagcttttctagtccctttttctctaattctgtgatgaaggataataaccttaaccatggagcatagtcgcgttgatgcaaaactgtgagcttttaaaagtgaaaatattgaaatactaactattcttgctgacgtgaatttctcatgggttattattgctcataaatttctaaaattgcatatgcttatgtctacttcttagtgatggatcctttcaaaataagtgacttgtcatactttgatgctaagaagagatactatgttcatgacagggacgtttacactggtggagagactagagcagaaggacaagacttggaccccggtttatgacgacgatgatctatgtctgaggttcaagtggtcgaggcataaaaagctgagctcccggagtcaggccactgtggaatggagaattcccgagtctgcatcaccaggggtttataggatcacccattttggtgctgcaaagaagctttttgggtcagtccatcatttcacaggctcttctagtgctttcgttgtaaca

SEQ ID NO: 162881 - DNA, 1694 bp, Arabidopsis thaliana landsberg
atgatcatagaagactctcttattcaagaccaaacattagctgccactaatattctctttagtcaaacgcctcgtaacagcaactctgttgttcctcctagtttcagacgctccacctctgttgtatatccctctgctcagccatcgggtaccagctcaggacccgtttcagccgtccagactcctaagaagtcaagcgcgggattcgtaagaagctctagctctaggcaaaggtccagtaccgatcccatgatcaagcctaaccagctcgttgacaaggcaagtacttgtcttaaaactaatgaattagcctaattaaccatacgttaagattgtttcattgcatgaatttatactttaaaatatgataactgttttccaaattcaaacaacaatttttttatgttgattaataattaaaattagaaatattgttatatttgaagaatattaattttcacatgcaaactcaaacaaaagctgctctttgagcaatcgcagcttatttatgtggtgacatgtatgtgtgacaggagctaaataaggtggaaggttcggagacgaagcggtttgtgctggttcatggtggtgggttcggagcttggtgttggtacaaaaccataactcttttagagaagcatggtttccaagtcgatgctgttgagttgaccggttcaggtgtgagctcgattgacacaaacaacatcaccagcctcgctcactactccaagcctctcctccatttcttcgaatccctcaaacccaccgagaaggttccaactttgtcttataaaccagtctttccagtgctaattgatgatgaaaagttacaacaattggatcatgtttaagaaattaatattataacaggtgatactggtgggacatgattttggaggagcttgtatgtcctatgcgatggagatgtttcctacaaagatcgccaaagctgtctttatctctgctgctatgttggctaatggccaaagcactcttgatctctttaatcaacaggtacttttttcttcaaaccatttaattctattttttttttaatacactaagcagccaaattttgacatttaattgccaatatgatgaaccagcaaaattgaaaaataagtgatagtgtttcttatgtgttagaaaccgtcgttaaaatctaatcgcaaccaattgattcgcagcctgactcaaattatgatctgatggaacaagtccatctatttctgtacgccaacggcaaaaagaaccctccaacagccgttgatttcgacagatcattgcttagagattttttctttaatcagagccctccaaaggtacacaacacattaggctaataaatagctgaaccggtacaattcggtttaactaaacccgacttgttttctttactataggacgttgcattagcgtcggtatcgatgagaccaatcccgttcgcaccagtggtcgaaaagctccacgtgtcggagaaaaattacggttcaatccgacggttctacatcaaaaccatggaggatgattacgctgtaccggtttctctccaagatgcaatgatcaaatcaaaccctccagaacaagtttttcatctcaaaggctctgaccatgcacctttcttctctcgtcctcagtctttgaaccggatactcgttgagatttctcaattacctcccaagaaatcttcttga

SEQ ID NO: 162882 - DNA, 1928 bp, Arabidopsis thaliana landsberg
atgagtgacatccaagcaaaagaagatgcggcgcctgttgatagacagtcttcttcgtcggttgtggttcctgatgagccgtcacctctaagaaagatgatatcagtggcttctatcgccgccggtgtacagttcgggtgggccttacagctctctcttcttactccgtacgttcaactcctcggaatccctcacaaatggtcatctctcatttggctctgtggtccagtctccggcatgattgttcaaccatcgtcggttacttcagtgaccgatgtaggccaaatttggtcgacgtcgtcctttcatcgccatgggggtgccttgctggtcgctgtttctgttgtactaatcggatacgcggctgatttcgccacagcatggggacaacatcgacaaacctgtcaagatgcgagccgtagttatcttcgctctcgggttctggatccttgacgtggctaacaacactctccaaggaccatgccgtgcttttcttggtgatttagccgctggagacgctaagaaaacacgaacggcaaatgcgtttttctctttcttcatggccgttggaaacgttttgggatatgcggcaggatcgtacactaacctctacaagatcttccctttcacaatgactaaagcatgcgacatctattgcgcaaatctcaagagctgtttcttcctttccatcactctcctcctagtcgtcaccatcatagctctatggtacgtggaagataagcaatggtcgcctaaggcagactccgacaacgagaaaactccgttcttcggtgagatctttggagcttttaaggtgatgaaacgtccaatgtggatgcttctaatcgtcacggccttgaactggatcgcatggtttccttttcttttatacgataccgattggatgggtcgtgaagtgtatgggggagactcaaaaggagatgacaaaatgaagaaactatacaaccacggaatccaagttggttcgttggggttgatgcttaactctatcgttcttggagtcatgtcccttgttattggagtgattagtaagaaaattggagctaaaaggctttggggagctgtgaacataatcctcgcggtgtgtttggcaatgacagttttggttactaaaaaggctgaggagcaccggaagatcgctggtcggatggcccttcctaccaatgccatcagagatggagcattgagtctctttgctattcttggaattcctcttgctgtaagtccaccatgtcttttaccaatttgtgttactattatccatgaattattattttgtttaacaatattaatccattttttgctatattttatagattacatttagtattccatttgcattagcttccattatttcaagcagttccggtgccggtcaaggtatttaattttaacctctccttttgtttctaatttgaacctacattctcatagtaatgctaattaaaatgtgtgaacacaaaaaacggtaatggagagatcagtttccaattataagaaaaacgatcgagtatatattttcacatagggtgatgtatgttatgtactaatttattggttaattgatatttttatacaatctgtttacatcttcaattattagttggttttcattcaccatataaaatttgtcataaatgtatcaataagatacataatcgttctgtttaagattattattaaagcgtattatcagattaataaggatagtgataacattttttgtcattttttcaggactctctctaggagttttaaacatggcaatagtcataccacaaatgattgtatcgtttggagttggtcctattgatgcgttatttggaggtgaaaacttaccaggatttgtggttggagctattgcagctctaatcagtagtattgtggcatttaccgttttaccttaa

SEQ ID NO: 162883 - DNA, 2705 bp, Arabidopsis thaliana landsberg
  unsure (1)..(2705): unsure at all n locations
atgaattctgaaaatgaaaggcctgaatctctgtctttcaaggaaggcggttttagtaacgatatttgcacccggccgaatgacatcgccggtccacattatcattccacatgcactctgcaatccctcaatcgattgagagagctttgtcgaatttcggcggaaattatgagggactcccagatgccagaacccatagagtcgccggaagaccaccgtcccgggttcttctgcgtgtacgaaatctatttcaagggttgcggtttgacctttccccttcccgaagccctcgttcggtacttagcggccctcaaaattgccctgcccctgcttacccctaaccttctccggactatcttagggattattactatcgcggcggatgccggatttgttatcagggttcctaaactgaatgaacttctcagcatgaggagttcttcgaagaaagccggatacttctcggcttatccgaacgccaacaggaatctcatctcgcatcttcctaacaaggacgagaactagcagcacccgtggttcctaattaaaaagacccctgcttcaatcggaaatctttccgacctgcttccatcgaagtggactactaagtctggtagatattaggtcatgcatatgatttttatatacatcttgctttatctaaccaccttttaatatccacttcgcagctttcatcgctccaactcttccgactgccgaatttgctgaattcttcagggggaaactctttggaattccttcaccctcgactgattcatagaggccaaccacaagctcaggatgagtccccctggacaacttcttcaacttccgttacctcctcctttacctcatggaacctcgactcgagtcatcgcctcccgacgaaagacgatgtccaaatcgatcgtggaggcttgtgaagcgaacaaatcgttccttacgtcggttattgacaagaaggagtacagcagaaccctgctagttgatgatggcagtgccgaaggagctagatccgccaatgccttcagacccacacctcacagtgaaggtcatggtcgtcgttcacctcagagagactgatcacctcgtcgtgactcacctcggccttcttcttggaataggttgagcagcgaaccgatcgcggacttgcttcagaagaagagaaaaagaccaacccatagcagttcttcccctaagagagataagacgagagcccgaaccgatcgttttcctcaatcatctcccccacctggcttgatgggttccaatcctctagtcatcacatccccctcctctagacctggggttgaatagactggctgtagtgcaaatcctcgacaggaagaggctgagcccgagatgctaaccctaaacccaaggccgttttggttcctcaaactaaatcactcactagtaagaaattactgtttattttccttatttggtatatcgtttaaacccttagtaatgcgtccttcatcccttactttaacagcgatgaaaacagagggaaacgtcttccggcgcttcaagactcggaaagacacaatcctaccaacctttgataagtggcgtcctgcgattcgcgagcgattcttacttcccgcccatcactcatctcgggttagctctttttcctttgcaaagttttatctccactctttgcttatacactaactcacctttgtaatctttgcttcaggcaaacagcgaactcaatgacatgattgagtattacgaaagaatgctgcttgatagggaacgagatgttattgcctggaaagacaagttttcttctcttgagtccgatctctgctcttccactgaagtcaagcaaaaactggaagatcaactagacaaccttttttccgaactcatgaagtcgaacggcgagttgcaggatcagtatcagcggtatgacaagatccaggaggaactctcgaatgctcggggcagactctcggaatctagattcagtgcttacgacttgtccaaccagctatccgaactgcaggccaagtacaaagcaattgccaaacttcgagatgctaagttagcgagattggcatcaaaagccaggaaagaggtaaagggtcgcgggatggaactgattcaaagggcaatcgttttcatccaaaccgagaaaactaggacgaaattggaatcagatatcaaggagtatgaaagcaacctcctccttctggatcaaactcacgatgaggacttctccgtagaacaagaaaggtccgaactggaggctgttttaacagaaaagcgaagtcgtctagctgcccttccttcctcatccttcaacaataattcgaggaattctttacagaatggcctcctttgagtgagtcaggtttagactaggatggtaagttttaaaacttcaaactttaatatcaaaccaaaactagttgtactcgcatttttctgattcaaaatgtttgcccactgaacccgagatggnnnnnnnnnnnnnnnnnactcccgagcctactcccatcttgcctgaagtccctttggtggtaaatagcgaaacggtgatcatcgcgaatgatgaggacatttccgggtttgaactggagacctctactaagcaaccccctattggtgaaacgactgggctagagtcagcagccgctgagacggtcgaccctgaaccgactgtcgccgagtttgagacgcctggtgattcg

SEQ ID NO: 162884 - DNA, 3144 bp, Arabidopsis thaliana landsberg
  unsure (1)..(3144): unsure at all n locations
ctatagctaaagaaatgagtagcaattctgagaactcgatttcgagtacgcaatccgtaagccgttggggacgtgggttaccatcgaagtgtcatcgtggattagacgtggtcatctatacatcaacgtcagcaaagaaccctgaaagaccatacttccgttgtcatacgcgtaaagatgtaagtataattgattttgggttttattggtttcattgttaactggctagtgattgaaaatgcaggaccatttgtttaaatgggtcgaagatggtacatacgaagtggttgtagacagttggcaaaattgtccaccatggacagggagataaacactgccaagtccgaggttgtagtcgagctagaagcattacaggtgatggtgaaagaactgaaggaagaagtaatgaggagctaaagggaaagccagaaatggcaattgatgatcaaactttgctgcttttgtcttggctttattatcattgtcattgtacttggtatcctaatgttcccaaaaaccaacgaacaaaagcttcttcttggctactagtttgtttgatgtttggatgatttgtttgctattggattccattatgtgtttgatgtttatcttgcttctagggttaatttgttttttttgtttaagtattaacttgtaatgaaatggtactttgtgttcggccaagttaatcgaatgttatgactgagttactataatgttattgctgagttaagctaatattatagctgagttaatccaacgatgtgactgagttatactggtaatgttgtggctgagttaatccaacgcaatgactaagttattataatgttgtgtctgagttaagctattgatacaactgagttattataatgttgtggttgagttaatcaattgatatggctgagttatttttgagttacgcttgaattatgataaaatttaacaagtgacatcaagcgataacaactgattttattgagaaggcgatcgtagataataggagatataaaaccattaccaaaaaaaaaaaaagagtaaaatactgagttcataggaatgagataaagggaagacaagtaagagatacaaaagcattcaagacatgaaaccgacatcatctgggccaaattcagtaaacatgtccaccaaatcattccaaattgttggcgtcatcgaccacggcttatctaaaccacacgcnnnnnnnnnnnnnnnnnnnnnnnnnnnnnnnnnnnncaacgttctagccaccaaattaaactgcgcccactcggtatatatatcctacaaagagaaaaaatagtaagaatttggtctatggtttactggaagtgctttaaaacaaaactcgatgcttaccgtgaggaaaaaaaccatcttgccttgaaaacaacgggaatcatccggtacgtcggccacgcatggtgaagttgcgctggagtatatctccaattgcgacagatagttggtgattgaatctgaaccacgtatcaacccatgtacccaagccagggtttagaactgggagattcgcccgatcaggagcagtgagtacggcttcgacatctttgataaattgtccgtcaatgtgaggaacaaccatgtcgtcaggaagagaggatgagacgtgtaaatgatgagatgaagtaacaaatatatagaaaaaaaaaaagacaggtaaaggaatacgaaaggttctgtgtccgaccgtttagcgggaaagttttctaggttacggctaagtttggcggcaaaatatattgttacggctgagttacactcaagacatgtaacaatgttacggctgagttgtcaataattataaaataaaacatttaaaggaatacgaaaggttgcatgtttggcgggaaagttttctaggttacggctgtgtttggcggcaaattgtactattacggatgagttaacccacattacggctgagttgtcaataaagcttgaagttccattcgatttactgactaacccgatttacggttatatccgacctaattaacaacggttcaatacgcctataaaaacggctgctcctataaacttgcgaaggctaaactctcacaaacagaagatcacaatcaaaatatttctttacttttcaaagactcggaatttcatcatggcgtatttcgacagcatttgcgacttgtctcctttcataactagctggacgatttgtgttatggttcttagaacgtacaaaaggttttatagagataacgcatttgaactacgggttgtctttgtcgatgagtgggtaatggaatcttcactcttcttacaagtcatacttaaccttattcgtatcttatttcctatatagctcaccctccaaatgttgttttcatagggaattcaaattgaagctataatcgaaagatatttttctcaatgttacttcgataagctcaaagagaatcaatggaaagaaatcgcaacttttcgtgtcattccaaacagtggaatagtccgagcaataacccactactacatgattgagttcatggaagcaacatcggtcataagttccgacccaaggggaactgcttttttaacagattcacacctactgactacattattgaagacaccgttcataccaatactttggtcggtaagtaatacgtttctaatgcatatttcatactttcacctttgacatgcctgtttttaacttttatttcatactcccagatttggttggtgcactcgtcgatatcggatgtatgagaaatacctcacacaatggtgtcgagattgacggattcagacttcccttcaagattatggacaaatagtaccatttctttcgatcaattccttttaaatttctttcttttcatcatgtatttttcttgagaggggtataattgtaacattgttttatctgtttcagcaaagagagattgaaatgtgaggctgttggctaaatggtggttgactttgatagcaggtttcgatcttttcgcaatgacaatattgttattgcactcacttggtggaggatcgttaggtatcatactggccccaaacacatgaagatttttcaattattcgaccatatcagatgtgactatcgaacccaatattgaagaagtgcaagagataaaaatggtcgtcgat

SEQ ID NO: 162885 - DNA, 3238 bp, Arabidopsis thaliana landsberg
  unsure (1)..(3238): unsure at all n locations
aatttggagaggcagcgagggatgatgaagatgtgagtgatgcagatagtggagatgaaatatgggatgacgagcggattccagatccattgtctgatagtgataacgatgaagatcttgttgatggtgttgctcgtactgaacccgaagatcttgaagagttgttaaagttggggaagacttttagttgcccagaagatttcaagattgcagttctaaggtattcactaaaaactagatatgatataaagctctataggtctcagactctgaaaattggtgcaaaatgctcagataccgatgtcaaatgtcaagggcgatgttattgctcttacgataggaagaaacacaagatgcaaattaaggtttacgagagtaagcatatttgtgtccgatcgggttacttcaagatgttaaagagaggaaccattgcttggttatttttggataggctgaggaagaatccaaagatgacaaaacacgagatggtggctgagataaagagagagtacaagttggaagtaactccaaaccagtgtgctaaagcgaagaccaaggttatgaaagcaagaagtgctagtcatgaaacccactttgcaagaatttggtattatcaagcagaggtgttattgcggaatccggggacagagttcaacatagagacagttgcaggagcagtgattggaagcaagcagagattttaccggttatatatttgttttcaagctcaaagggagtcatggaaacaaacttgcagacccgtaatagggatagatggagcttttctgaaatgggacataaaaggacatctattacccgcagttggaagagatggtgacaatcggattgtccctattgcttggtctgtagtcgagatagaaaatgatgacaattgggactggttcttgagacagctctctacaagcttggggctatgcgaaatgactgatctagcaatcctttcagatcaacaatctgttagtctctattctataaganaaaccttcatatatctactgtaatttgagatagacaatcatcctaaacttgtgttttttttgttgttttgcagggtttagtcaaagctatccataccattcttccgcaagccgagcatcgacaatgttcaaaacacatcatggataattggaaaagggacagccacgacattgagctacaacgtctattttggaagatagcacgcagctacaccgtagaagagttcaataattaccaggcagacttaaaaaggtacaatatccaagcctacacgtctctccaacttactagtccgattacatggtctagagcattctttagaaccggtacatgttgcaacgacaatctcaacaatctgagtgagtcattcaatagaaccattagacaagctaggcggaaaccactgttagatcttctagaggatattaggaggcaatgcatggttaggacagccaaaaggtttatcattgctgacaggtgcaaaacaaagtacacaccaagagctcatgctgagattgagaaaatgattgctgggttccagaatacacagagatacatgtccagggataatttgcatgaaatctatgtcaatggagttggctactttgttgatatggacttaaagacatgcggctgcaggaaatggcaaatggttgggatcccatgtgttcatgcaacatgtgtgataatagggaaaaaagagaaggttgagagctatgtgaacgactactacacaagaaataggtggcgagaaacatatttccgtggtattaggcctgtccaagggatgcctttgtggggtcgattgaataggctgcctgtcttgccaccaccatggagaagaggcaatgccggaaggccaagcaattatgcaagaaggaaaggaagaaatgaagttgcctcttcctcaaatccgaacaaaatgtcaagggaaaagaggatcatgacatgctctaactgcttgcaagaaaggcacaacaagaaatcatgcaaaaatgctactgttttaagtccaccaaagagaccaagaggtcgaccaaggataaatgaggtttgtatatctttcatttctattttcaaaaattctgtttcaaaaactgattgtaatgtttgtattaggaaccacaagggtatgtagaaggatcacatggacatgataatggctcacaagggcagggtaatgtgttacaagggcaggaaaatgtgtcacaagggcagaacaatggctcactagggcagaacaatgggtcacaaacacaaagccaaagaggaagaggtcgtggaacacaaagacaaaggggaacaactcgtggagcacaaagacagaggggaagaggtcgtggaacatcacaagtgtctgaacaaccacaaggagaagcacaatcgcaaggacttgctggacttgcaccatggtttgaatgttctcgtggaacatgataagctagtctcatgtttgtttttgttgtttgaacttgtctttatgacataatctaagtcttgttacttattgttgtttgcacttgtctctctatatgattagcttagtctcagttttaagaagttgaccttttctttcaaatgaaattcattaccattaccaaagctacatgtcattacatagtaaaagcataaccaaacacaaactaaacaacaaagaccaacaacaagagaaacaacaaagacatcacattcaaactaagctcccattcgattacacactaataaccaagaacaaatttctgggtttttttcttatagaacattgatattacaattgcaatcacactaaaacaaaggcacaccaagcatactttcgtcatctttttccatctctgaatttctcttttgctccacattccatcttctttcaactctatcattagctcctttaagtttgcaatttcaacagcaacctcaacttttgcattgattatctcgttatcaatgctggagattttgggtagagcatctataacctcttcatacatacaatcctccacccatttgaacaaatgatcctgcaattccatctcaagcttttatcgaccaaacacaaaaaacatcacattctcatatcaaatctacttacatcttcacagcttttgcaccgaaagaaaggccttccagggttcttagccgtgctcgatgtaaacatgacgacgtcgagcccacatttacacttaacaggaaacccacggctcttgaaacctccagcttcagcattcgaaatcattcctga

SEQ ID NO: 162886 - DNA, 1471 bp, Arabidopsis thaliana landsberg
atagaaggtcctgatccagacgctgaagactccggaagcagtggtgattactctaggttcgagagacgttggtacaattggatgaaatgtcagcttccggtggctccgccgtcagtatcgtcctcttcggatttcaaacgaacggatctgaggcttctcctcggtgttcttggcgcacctttaggtcctgtgcacgttagcgctctggatctccttccacacctcagtatcaagaatacacctatggtgagctcttaattcactgttgtctcctcaaaattaggacagtgttggggatttggagttaatcatgttgaattaagctcttctgtgccataatctagcttgaatttagctgaatcttcttttagttgcctactaattatggagaaagactgcgcaattaattgagatttatcaagttttatctctgctttaatgtgttgagggtaaagtctaatgactcttactaatacttgaattttcaggagacttcctctgctcagtacatacttcagcagtatacggctgcatcaggaggtcaaaagcttcatagttctgtgcaaaatggatatgttatgggaagaatcaggacgatggcttcagagtttgagacaggctcaaaaggttcaaagagcaagaataattcgtcaaaagctgttgagtctggaggatttgtgttgtggcatatgaatcctgatatgtggtacatggagcttgttcttggtgggagcaaggttcttgctggttgtgacgggaagcttgtgtggagacacacaccatggcttggacctcatgctgcaaaaggaccggttagaccattacgacgtgctctgcaggttaggcctcttgtcccaaggaagccttctcatacacttttctttgcttgcataactgaattgttactgttgtcaactttcagggacttgacccgaggaccacagcgtatatgtttgcaaatgcaaggtgcataggagaaaaaaagatcgatggagaagactgtttcattctcaagctatgtgcagacccggcaacactcaaagctagaagcgaaggggcatcagagaccataagacatacgttgttcggttacttcagccaaaaaaccggtctgcttgttcacttagaagactcccagctaacccgaatccaaaacaatggaggcgaagcggtttactgggagacgaccatcaactcatacctagaagactacaaacctgtcgaaggtatcatgatagctcactctggtagatccgtggctacgcttttaaggtttggagatatgtcatcaggacataacactaagaccacaatgcaagaagcatgggtcatcgatgaaatctcgttcaatgtccctggcttgtctatagattgcttcattccaccttcagaactcagatttgattcccacgttgaagacttatctcaaggccccaaaattaggacattgcacggccataaaaatggttga

SEQ ID NO: 162887 - DNA, 2071 bp, Arabidopsis thaliana landsberg
tgaaagagtaagtattgatggtaaaaagaaggttgagctagtgcaacagatccatgagaatgcgaggagaaacgtagaagaaagaaccaaactctatgctaagcaagctaataaagggagacaagaacaaattttcgaagttggagatatggtgtggatttacttaagaaaggagaggtttccagctcaaaggaagtccaaacacatgccaagaatagacggtcctttcaagataatcaaacggatcaacaacaatgcctaccaactcgatctgcaaggtaagtataatgtgagttctaactttaatgtttctgatttggtaccttttattgcagatgaaacggatttgaggtcaaattcttttcaagagggaggggatgatatgatcatggacaacattaacgatatggagcatgaaccgtagcatgaacgtgagcttgtagccgaggaaggagctaagcttgtagctgagaatgagcttgtagccgaggagaagcttgtagcggaggatgttcttgtcacaccggccgtcccaatgactcgttctagagctaagctattcaaccaagccattggcgggatgcttaaccacatttgggaccgaccaaatgacttgagccaagtcactacctctttggttttgattcaagctcaaggacctcatcaagatggataagtgattcatgagtgctctttttcaatgcctttggttttgtcccactggatttttcaaaggaaggtttttaatgaggcttatgttttcgcttcatataatccattttgatgattcaaggcccaaacccactaaaataaagagacaatttcgtggcctttgacattgaagggttacttttgaattttaaactttgtttttaatttctgttgtgtcctaggcagccttggagcttgttccaagacttgtctcttcatcttctcttcttcttctctttatatactcttgtattctcttttgagaacttatttttcttttattcaaaaaccttttctaagaagatcatcttgctagtgtgtatatccagcaaaatccttagtctcttttggtgcgcatatccaaaggatctaagtctcgatatcttgaaacccttccgcaagcttctgtgatatccatcgattcattcaaatctatccatcatcacggctttacagccacctctatcctttgcttaacctaagagtgtcgagtccttgggaggatctcatcttgtggtgatatgtctataatttgcatggtttcaatgtccattcatcatcgttttgagtccagcttcgtatcattcatcactggtttatatcatttctcatcgctcttgcatctttgcatgattaggatagctttgcatacatattgcatttctgagttgttttcaggtgatttggagctgtttgcgaacaaattggaagaaacgagccagaacctgaagacatactcgaccaccaggtagtgtgcatccatcaccatactcgaccctctggttgagtgactttggagccattcttccaatctactcgaccaccaggtcgagtaacctcagctcaggccactcgatgacaccactcgaccccctggtcgagtatcacttcgccacaccacctgacaatactcgaccgttcactctaccacattactcgaccccctggtcgagtatcacttcgccacaccacctaaccacactcgaccattcactctaccaagatactcgaccccctggtcgagtatcatcactcaccaccatcaccatcactcgaccggacactcgatcacgtcttcacagtctactcaaatccgcactcaaccagacaagctgagcacaaggaagagaagaggagaagacaaagtgtttggaagcggcctggacctccatcggatcacgaagcccatctcagcccattatcactctatgggccgggcgattaggttattggcccgtctactatcattttatttcgttttgtataaatagatgtcttagggttctatccggagacatctagtcgacattgagtttttgcttcagttttatttttctgttttactctgctgcgccgcttt

SEQ ID NO: 162888 - DNA, 4060 bp, Arabidopsis thaliana landsberg
gcctgggcaaaatacccgaacccgaaaacccgaaccgaacccgacccgtaagatccgatccgaatgcactttggttccctgcctaatacccggtcggatctttctcttttgtaacttcggttctgggttcgggttcgggtaatacccaagaaccgaaagtacttttcttgatccgaacttatatacacacaatagcattaacccttacttgccttagcttgtttttcttcccaatttttgatttataaaaccctagagcgtatcaacacaaatctcaacaagctggaaaccctaactcatttgtttctgccgtctccttcttcagagaagtcaagaactcgactcgatccgaggtacttttcgtttttctacttctgtgattttgcttttgtttctttgagtcactgattcaaatatgtagtttataattgcaatttcgttttggttatgtatttctctgttgtattcttagttgatttcttctaatttatctgttttcattagttaaatttttcaatttatttgattctatttttgtatctgtggagaaaaaaaatctgagtttgtgtgagttttgatctccaaattttcatctcttaccaccaattgatctgttgtgcatcttaatttttttgaatataaatttacaagagcatcacttacccaaaagcatcgactccctcagattcgaattttggtgatttagctcaactttgggctcatctacaccacttctaactcaaacgttatattctattaccatgctctgtttttttgaagtcataggactctgttttaagcatggactttgtttcttttaagtaagctggtaaatataccttcatattttgatatataacattcacattttatcaaaataaatttatccgactctcttttatatgtatgacagttgtgtgtgtgtatgtgtttgatccaattgttttaaaattattaatagtaagttcactggatcgtgaataatatagtttggtatgtatgcatccaagagtcttatagactattaattcattaattcctagtatgcattcaacgtgtgatagattgcattattaagtgtaactagactattaagttatagtttcatgctagtgctgcaacgtgtgatagcttactttattaagtataattcttattcaattgttaaccgattattgtttatattttttttcttttgcagatggattcttcagcaaatccaaacaatactgaaagtaacacaaaaggaaacgaagatgagggtaggactcgacctattgataatagtaaagggaagagaaaaggcgatatcgctgatgatggtgataatgctaacccttgtaagccaaagaagaagttgcaaacaaggtcttgggtttgggatcacttcccgagaaagaataaagatgatgaccaatgcaaatgtcattactgcaagaggttctttggatgttcaacaaaatcagggtcttcaaacttgaagatacatttggattgctgcgagcattactcggcatgtaaaggacgccagtctcagaatgttattaatcaagagggtaatctacaaagtggagaagtttctgaggaagtgtttagagaagcaaccaatgaaatgcttgtattaggacagatgccactttcattcattgaaagtatagcttggagacatttaaccaccaaatgcaacttgtaccagcctcattctagaagaactgcaacaagagacatctatgagatgtttgtgaagaggaaagatgaaatgagaaaatggatgcgtaaaagtaagcagtgggtctctctcacaactgatatatgggtgggtagcgtaactggtacaagttatatgttcataacttgtcattttgttgacgcaaattggcatttaaggaagctgattatagggtttaagtatgtgccgaatcataaaggggcaacaattgcagctgttttgaattcttgctttgctgactggggtatagagaagatcttcactatcactgttgacaacgcaacaaccaatacatctgctctcatgaaatttgaaagagattttagggcaaagaatgggaacaatgcattcatattagatgctgagatgatgcatatgaggtgttgtgctcacatcatcaatttgatagtcaaagatggattaaaggagatcaatgagaatgtggaagcaattcggaatggagtgacttttgtgagatcctctaccaagagattaatctcatttgatgatagggttgattcagctaatttgcaaagaggaagcttgcctctagatgtcgaaaccaggtggaattcaacatatctgatgcttgaacaagctgtgaagtttaggattgcttttgagaaaatggaggctgaaaataaactatataatgactattttctggaaaaggtggatggagaaaaaaagattggaccgcctatgtcaagtgattgggataatgctgagaggttaattcaaatccttgctatattttacaagtcgacattggtgctttcaggttcaacttatgttacttctcataagatgtacaatgagataatcaacatggctagaaacctaactaccttaaacacagacacttttttgatgagcaactaaagaagaaagcgatagcaatgttaggaaagctgaagaaatattgggatccgtttggtgaaggagtagaaatgaataggttggtgatggttgctactgtttttgatccaagaaataaaatgaagtttgttgagctttgctttggaaagatgtatggtttaggtagtgtggaggttgttcttctttctgattcagtgattcaaatcttgaaggatttgtatgatgagtatagcagggcaaatttgttgagaataaatggaggcagcgattcaatgccatcatctcagtcacaaggatcatggtctcagtctcaagagcaagatagaagtggagcttatgagagaacaatcaacaaaactggtattcaattagaagatatggagaacttatttgatgagattgtgaaagaaacatgtattcataaatcatctaatgagttggatttgtatttgaatgaggttgtcgagactccacatcttctaaagggaatagaatatgatgtgttagattggtagaagctcaatagtgggaagtttccagttctgtcgctaatagctaaggatatatttgctatgcaagtatcgtcggtggcatcagaatctgcatttagcactagtggtagagtgttagatccatttagaagctgcttaacaaattacatatagaagtcttgatgtgcacagagcaatggttaaagtctgagatcagtatcaatgaaaaaggagtgtcaaccattcatgaattgcttgcagatcaagtggaggaagatgagcttatgagaggtaatctattccctttaaagtctctttaaattctggtttaccaattatagcttacaagtttgcttatagtccgtgtttcttaaattgttcatgtgatttagagtttgaacctgaattccacatccatggttttgagtaggccgagttatcgtttcagccttcaggagacaaaaatgcaaaacaaagtcatcacctaatgtcctcatcaactatcgtttagactttaaacttctacttctatgttttccattttcggattgttgttttgcttttcaattactcttgtttgagattcgagaacttctatttgtcatatttgtgttcttgtttgtgggttgccaattaggcttggatttggatgctaattttgtttctcctcatttgttacacatgattagaatatcggtttttcgggtttatgggtaacttttacccaataatacctgaaccgaagaaaacccggtttttcgggtatttaccggttcttatattgattacccaaaccgatccgaacccgggtgtacccgaataggaccgaacccaaaaatttcagtttaccctattgggtaataatttcattacccattcaacccaaacccgaacgggttttacccgaacccgaacgggttacccatatgcccaggcctagcttcaacgatgcatcctcaca

SEQ ID NO: 162889 - DNA, 1131 bp, Arabidopsis thaliana landsberg
gaaagccgtgtcaacgaaagactttgttcacggaacttctggagtatgtgaagaagacatcttatgcgtctggttgctcagacgtgtcttgtgattctgataccggatttggagaagctgtggccatcgccaagggagcggattttgtcatagtagttgcaggattagatctctctcaagaaaccgaggataaggatcgagttagtctttctttgcctggtaaacagaaagatcttgtgtctcatgttgctgctgtgagcaaaaaaccggtgattcttgttctaaccggtggaggaccagtggatgtaacgtttgctaaaaatgacccgagaatcggaagcattatctggattggttatccaggtgaaactggtggacaagcactcgctgaaatcatatttggagacttcaatccaggttagcctatcgcaaatcaaagcatcttctgttcatcccagtttatgaaatgcagaaactgaatactaaagctttttggttgtatatggttttggtttcggttcaagtgtaggtggtagattaccgacaacgtggtatccggagtcattcacggatgtggcaatgtgggatatgcacatgagagccaattcatctcgtggatatccaggaagaacgtacagattctataccggacctcaagtttacagttttgggccgggtttaagctacacgaaattcgagtacaagatcttatcagcaccaatcagacttagcttatcggaacttcttccacaacagtcttctcacaagacacaactacaacatggagaagaacttcgatacttacagctcgatgatgtgattgttaactcttgcgaatctctgcggtttaacgttcgtgttcatgtgagcaataccggagaaatcgacggtagtcatgttgtgatgctgttttcgaaaatgccaccggttttatctggtgttccggagaagcagctgattggttatgatcgtgttcatgttcgttccaatgaaatgatggaaacagtgttcgtaatcgatccttgcaagcagctaagcgtagcgaatgatgtcgggaagagagtgattcctctggggagtcatgtcttgttcttgggagatttacaacattctctctctgttgaattctaa

SEQ ID NO: 162890 - DNA, 709 bp, Arabidopsis thaliana landsberg
ggctcttttcttataccctaaaaagttacttgtagatcaaaatcgaaaatcaatgggaactccagaatcatcgagagagccatgtccggatcggatcctagatgatgtcggaggtgcgtttgcgatgggtgctgttggtggatcagcgtatcacctcataagaggaatctacaactctcccggcggagctcgtctctccggcggcgttcaagctttgagaatgagcgggccgagaagcggaggaagcttctccgtgtggggtggtctttactcaaccttcgattgtgcgttggtgtacgcaagacaaaaggaagatccatggaactcgatcttatctggtgcagccactggaggattcctctcgttgcgtcaaggcttaggcgcgtctgctagatcggctttagtcggaggtgtgttgttggctatgatagaaggagttggtatcatgttaaacaaagttcagagtactgcgcataacgagcagttcatggaggatcatgcagctacttctttaccatatggtatgggtcagatatctggtcagtccgtaccggtaccggagacttcttcttcttcttctggttcggtatcttggtttgggagtttgtttaagaagaagaaagaaacagaggatcatcattcagagagcagaactcacattttggagagctttgatgctcctcctgtgcctacttatgagtttaagtga

SEQ ID NO: 162891 - DNA, 1909 bp, Arabidopsis thaliana landsberg
atggcagtttattacacaagtaatgtcggttgttaccagcaagaaccaatctttctcaaccatcaacaacaaaaccaacaagcttcttcttcatccgccgccgcttctttcaccgtcaccggcggcgatactgttcgaaacgagatggtttttatcccaccaaccaccacaggagacgttgtaacaggaaacggtaccgtttcaagcagcgatctaagctttcacgatggtcaaggactgtctttgagccttggtactcagatctctgttgctccgtttcactttcatcaataccaattggggtttactagtcagaatccttcaatttcagtcaaggaaacgtcaccgtttcatgtggatgagatgagtgtgaagagcaaagagatgatattgttgggtcaatctgatccttcctctggttatgctggtaatggtgggaatggcttctacaacaattatcggtataatgagacatcaggagggtttatgagcagcgttctgcgttctcggtatcttaaacctgctcagaatttgcttgatgaagtggttagtgtcaagaaagaactaaaccaaatgagtaagaagaagatgaaagttaatgactttaacaatggttctaaggagatagaaggaggaggcagtggcgagctatcgaatgattcgaatgggaaatcgattgagttatctactattgaacgtgatgagcttcataacaagaagaacaagcttttaacaatggttgatgaggtgactaacttacatttcttaaaactagcttttggtttataacaggattgatggagtttatgatgatgatttggttgttgtggatgtgttaatgatttgcaggtagataaaagatataaccaatattaccatcaaatggaagcattagcttcatcatttgagatagtagcaggacttggatcagctaagccttacacatcagttgctctcaacagaatctctcgccattttcgtgctcttcgcgacgcaataaaggaacaaattcagattgttagagagaaacttggggaaaaaggaagaaagtcgttggatgagcaacaaggagagaggataccaagactcaggtatttagatcaacggttgagacagcaaagagctttgcatcaacagcttggaatggttcgacccgcttggagacctcaaagaggtcttcctgaaaactctgtttctgttctccgtgcttggctcttcgaacatttccttcatccgtatgtgtttcttctctcacaagtcacaatcttttcaatctcccattacataacatttaagaaactttctgtttcttttctggttgttttatttgtagatatccgaaagaatctgagaaaatcatgcttgcgaaacagacaggactgtcgaagaaccaggtaaaccgagctttttttttgtcttccctaaagttgcattctttgtgtgttatttttgaataactctggtttctatgctctatgattaggttgctaattggttcataaacgcgagagttcgtctatggaaaccgatgatcgaagagatgtataaagaagagtttggtgatgaatctgagttactaatctccaaatcttcccaagaacccaacagcacaaaccaagaagactcctcatcgcagcagcagcagcagcaagagaacaacaacaacagcaacctcgcttattcatctgcagacacaacaaacattgtcttctcatcagaaaccaaaccagatcgtgttctaggcaatgataacgacccacagcaacaacagataaaccggtcatcggattacgacactctgatgaactatcacgggtttggtgttgatgattaccgttacattagcggaagcaaccagcaagaaagtagattctccaattcccatcacttacacgactttgttgtgtga

SEQ ID NO: 162892 - DNA, 4387 bp, Arabidopsis thaliana landsberg
  unsure (1)..(4387): unsure at all n locations
ttggagttaaagccgacgacatccatcaagagagattttattaaggagtttttaactgaaaaatttgggccaggaattcattaaagatggccacacgatgattttggaaaacctatttttatttaacaagataatgcaagaactcacattgatccaagagatgaggaattctgagtagtagtttctcatcatggctttgacattcgtttgatgtgtcaaccaccgaattcgcctgacttgaatattttagatcttggattttttagtgccattcaaacactctaacacaaggtgtgtccaaagacgataaaagatcttatttctatggtagaaaattcatttgacgaacatcccgcaaaacaagtgaaccaaatttttttgactttgcaatcgtgcatgcaagaaattatgaaaattcgaggctctaacaagtatataatcccacatttgaagaaatccatcttggagaaagaaggtaatataccttcacaaatggcctgtgatcctaatttagtactagatatagtaaattacttagctacctaagttttaattaggattttgtgcaaaaaaaactttaactcttccatatttgcaactatgtcctccacctccaacaaatacagattaatcctatccctacaagaaaacagtcaatttgcgaggaagttgccagggaaggcattcctcgcagtttttgcgagggtattgcgagtaacgtgctacacatcggacgcgcgtagcaattccgtcgcaaaacttgcgagggaaggcttcctcgcacatttgcgagggaagtacgatggtttcgcaagaaagatattatccgtcacaaatcccaagcagatacgtcgcaaatctttaccctaaaccctaaaatacataaaaagtgatttgcgatctttatttttcattataaatgtaaatctaaatgactgtataatcatacaagttgattatatggtgatgcacaaaaacatattgtatatgtttcaatatgacatttcatattgaagatgttaaacacttatgattcatattattgaaaacacataagttcatcattgatgtatttgggaaaaatgcacatttgaagtttttgagatgaaattagattctaatgtagatatttaacttcctaatgattcagaataactaatccgaataattttaagtagtgttttcttgtattttttcaaattgattcaacaatacgaggtttttgcgagagatttgcaagtctgtcgtagcagttccctcgcaaatatttaccataaaccttaaattatttaaaatatttagtcatgttttaatttgctgggagtcttattcgaaataggagaatctaaatcagatctgattcaaacactaaatcaaaatggtggagttatttggttgaaggattgcgagggaattgctagacgcactcgcacttccctcgcaaattttaccctaaaccctaaattattaaaaatcataaattgcgagggacttgttaggtgttcttgcaattctctcgcaatatgtggtgcgttttaattggtttaaaaatcttcctcgcaatttcaaagcaaactgtgcgagggttttgcgaggaaataaattcctatatatactcgaagacctagtttgagcggagctcaaaccagccgcatcaaaccctaaccctaaattttttcttcttcttctctgatctcttcggcgccggagctcttcttctccgatctgattccgtcaccgcctctcttcttcttcttcttctctaatctgttatactcatcgccgcctctcttcttctccgatctaattacggcgcagagtctcttcgccgcctctcttcttcttcgatctgtgctccagaaccgccgagtctcctcttctccgactcgatccgttttgcctcaaaggtaacctctgtttctccaaactaagttcttctctcaaatccgacttattcttcttctccgatcttactctttttcccagatctaactcttcttcttcttcttctctaatctgttacactcatcgccgcctctcttcttctccgatctaattacggcgcaaactctcttcgccgcctctcttcttcttcgatctgtgctccagaaccgtcgcggctcttcttctctgactcgatctattttgcctcaaaggtaacctctgtttctccgatctaagttcttctctcaaatctgacctattcttcttctccgatcttacttcttttttcccagatctaacacttgatttgttttttgtgcaagatgccgtcggataatacttatgtccggtttagacaacagcagcgtgacccgttgcatgtcaattctccgcttagtggtgggaatatctcaggggttcaaggttcaggttcaggttcaggttcaaccgttccaccatcgcctccaacgccaacgactcagccttttgtcaatcattctgatgttcaagctgaccgtctcaacaatctgacactggaagagctcctcgatagtcctggtcgtgctggcttgacaaggctagacccaaagcgtcctccgggtactctatggtaaggttaagcttatagtctctggaattaggtcttgtaagttggttagttttgccttagaagtttgatgctgccttagaagtctctggaattaggttggttctgccttagaagtttggtcctgccttagaagtctctggatttaggttggttgtacttagcattgtagtttcttagaagtataaagacatagagatccttatgtgttttgttgctgttgttgtaggtttgacgatgactctacagttgcagcaacagtccgcagcatatttgaaagagatttcaaagaacctcatgccaattggtcacagacatcaaaggctacaatcgatcgatggtatgaaacgtttgcggtaagttttgtgctcttttgatgtttatgcttgttttgtttgctttgtctgttttgtttgctttgctttgtctgttttgtagtctgatgtttgatgtttgctttgtctgttttgtagcaagtatataactgggaccgttcaattaacaaaagagtaagggttgagtttgaagcaaagctaaagtctaggatgtgtgatcaagtgtcaaggtggaagggaaattggaaggagaagggtgatgaagccaagccaaaatggattgatcctgatttgtggaaaggtctagtacagttttggcaagatccaaagtcagagaaaaaaagtaacaccagcagaaatgctagatatcatgatccggatggcaaaggcatccataaacaccgttcaggccagacctcttacaaagctcgtgcaagaaaacgggttagataagtattcttctctccttaccattacttaatctacaatgttatgaatctaacgtgtttatctctttgtgtttcagtgtgagaaactggagaaacaactcctgatttccttgagctgctagatgagacacacagaaaagcggatggaactttcatcgatgggaagtcagaggagatctacaagcaagtgacatctaggatagaagaggaagagtctcatatgtgcnnnnnnnnnnnnnnnnnnnnnnnnnnnnnnnnnnnnntatcttttcatgccaagaacaagatttttactgaggtaaattttctgtgctttttcttggcagcttgttgtgttgtgtacttgtctgaattctgttgtgtacttgtctgaattttgttgtgtacttggcagctgaattctgtcctgttgtgtacttgtatacttgtctgaattctgttgtgtacttgtctgaaatgtatgtgatgtgtacttgtctgaaatgtttgtgttgtgtctctagtgcttgatatcaagttctcgtaatcttggcagcttattcattatactttgtgtcagaattcttttgaacttgttttctcacttgttttctgttgtgtcgttgtgagtttttgtgacctttgcaggttgctccgagaaagaaaggaaggatttatggggttggatctctgcagtttgaagcatcctcagcccatagtggtccaatgcttcctagtgatgatccggtcatactttctcagaagctggctgccgctgaagcatgcattcaatctcaggctgagaagatcaatagcttcgacatcctgtttgactatcttgctgaaaaagatcctgctttagctgcaattcttcgacgtggttcctcgacacagacaggacaggccaacgcaaatgctccacctgtggctactgctccagaacagcaggtggctaatgaggagacaacagttgctgccctagctaaccttgcaataggatcctctcctccatcaactgtattttgaaaacattgtcttgcttttttgccttgttatctctttctttagaacaa

SEQ ID NO: 162893 - DNA, 1820 bp, Arabidopsis thaliana landsberg
atgaggaagaagagcgtgaagaaaatcaagctttcaactcggttctatattcacgaagtgttgactacattagataagttgcagcctgcaatgagcaagtccgagagggaatggtttgagaaccatccgagtttccaacacatcttccacatgccaagagacccaaaccacctacttattgggatgtggatgctccttcttcgcacggcgcgcattgaaaggaagaaagaagcgtggttcatcgtcaatgccggtccaatccgatatgttatattggaacacgcattgatatcgggcttcaattgcaagaactatacacttgggtataaaaatacgggaaatttggatttcaagaagaagcatttcaagaatattgttgtgaaacgcgaagacgcgagaaagaaactcataggaatggtaccggcgggtgaaagatcaaaagaaaggttgaggatgatggtcttgtatttcttaagcagcattatcatagcgcctatcaagaccggagataaggcacctcaagtggatgaatttttcctcaaggtgatgagtgatctcacgttctgtaggaattttcagtgggggaggtattctttcgattacatgttaggaaccatctcacacacggtgaatcattttaatggttcagtcaccaacaacgagaagtacatatggccggttccgggtttctgtcttccgatggaggttagttacaacttatagaataggtgattgtttgcaatactgataatactgggaatactatttgtgatttaaaattgtttttttattctgtagcttcttgcattcgaggcaattccacagttgagggaaacatttattgaggaaattgcagaagcagatccgggatgtcctaggatgtgcaaggtgaggttcaagaagaaccatttgaaaggctttcctcttgataccatttatgtagaattgggtacaactcaggttagttatcttagatatactgtttcacaaacgaatgttattctattttgttataataattcattcataatgttgatctttacaagtcattgattctatcgtcacacctggaattaaggagcacaaactcatgaaagaaatcactgaagaagaagacgacgttgacgtggcttatatggtggttgaaagttgggagaagcgtcgtaaagtgggccgtgtaatcaggtttgatgagctctacaagcatgatattcaagccctgcagatcatcgcaggtccaaagattgcaggtgcggaggatattcccgcagtaggtggacaagaactcccgagtttggtttctgtggttgagatgattgaaaacttggataagaagatggtagaccagctgaatgaaattataacaatgattttatgatttgaaaaaaagagttgaatcgttggaagcattcaaggatgagcagaaagcagaggagggaaaggtacgtattgataattgcgtaatactgagtaacactgtgataactagagtataattgcgtaatactaatataacttcgttcaattgcagaatcaagatgagatggaccaagaggaggctggtgatccgaaagagaaggatcaagaggaggatgttgttcaagagaaagatggtgatcaagaggaggatggtgtcccgaaagagaaggatcaagagaaagatgatgtcccgaaagagaaggatcaagagaaagagaaggacccgaaagagaaagagaaggacccgaaagagaaggatggagatccttcaaaacccgtggaagcaaacgtcacaagaaggatcactcggagaaccaagaattgaatttggttgttcttgt

SEQ ID NO: 162894 - DNA, 1134 bp, Arabidopsis thaliana landsberg
atggttctactctctaaatttccggcggcttctaatggcgacgatccaaacgagaatcctcaagaagaagtagagaatcatcctccgattcctcgacaaatcccacaagcactcatcgcaagcatcgtcgcactcatcccaagatgtcattacccatcgctatccctcgtctccagagcctttcgtcacttaatcacttcgcaggagctctacgtagcacgctcgaacctcggcttcaccgaaccggttctttatgccttaatcgcattccaagcgtatactcccccaagctggttctttcttcgtcagagcaacatcgctttacaattacacagaatccgttcatttcctataatgttatctggagcagctgtggtcacaatcggctacaagatgtatgtaatgggtggttacatcggattatcctgaatcgtcgagagtgattgtcatcgactgcagattccatacttggaagtctctcccggatatgcaaagggctcgttgccatgcagccgccggagtaattgacggaaggatttatgtgatcgggggacgcgagccacaagatgctgattgggttgaagtgtttgatgtgacgactgagagctgggaaactgtgcctactcaatgccctaacgaggctagtgagaatggactgtttgttacatatgcggtgatgcagggcaggattttcattttggatcttgggcgtgtttttgcttacgaaccaagacaaggtttatggcagtcattgggagttatatgtcagttgatgagattttggggctcgtcttcttgtgtggtcggagatttgttgtatacacttgatcctacgtgttcttttggacatccgatagtggtatataatccgaatgaattggtttggagacctgtgtttggtatatttatgattgatttgcccgttctcagtttctatggatctaagatggcgaattttggtggcaagttggtgattttgagcggctattcttcttggtggttatttggtgcatagagattgcgttggagacacgtcccggaggtcatatttggggggtggttgaatcagtctcgcgtgtgtttagaaacgtgatcatgttgccttccattaagctttgtcgaactgttatagtt

SEQ ID NO: 162895 - DNA, 1868 bp, Arabidopsis thaliana landsberg
atgaatttccgtaatctgattgcttccggttctcgcctcggcaagaggttctgtgcaacggtatttgctccggcgtcggcgactggcatcgtcgaagcctctgtttcttctccagcggcggcgaatgtcgtcgaagcctctgtttcttctccggcggcggagaatggcgtcagaacctctgttgctgctccgacggtggcttcaaggcagcgagagttgtacaagaaactttctatgcttagtgtgacgggaggaacagtggcagagacgttaaatcagttcatcatggagggtattactgtcagaaaagacgatctctttcgctgtgctaaaacccttcgcaaattccgtcgacctcaacacgcttatgaggtccctcttcatatctcttaagcaagtatctgattttaacattgaaattggagatatttcattatctatggaaaattactcttaaaggggctggctttagatttagggtttagtgatttcactagttttagggtgtaattagggtcatgctcgttgttgaatgaaatttcacttttttcgaatggatagagattaaaaatggcatttttaagtttgttagagtttgattgagtccattgttgatgaaatttcagatctttgattggatggagaagaggaaaatgacattttctgtgtctgatcatgcaatttgtttggatctaattggaaagactaaaggtttagaagcagctgagaactactttaacaacttagatccttctgcaaagaatcatcagtcgacttatggggcgctcatgaactgttactgtgttgaacttgaggaagagaaagcaaaggctcattttgagataatggatgagcttaactttgttaacaattcgttaccgtttaataacatgatgtctatgtacatgcggttgagtcaaccggagaaggtacctgtgttggttgatgcgatgaaacagaggggtatatctccttgtggtgtcacttactctatatggatgcagagctgtggaagtttgaatgacttagatggattagagaagattatagatgagatggggaaagacagtgaagctaaaaccacttggaatactttctctaatctggctgcaatctacactaaagctggtctttacgagaaggcggattctgcactgaaatctatggaggagaaaatgaatcctaacaaccgtgattcccaccattttctcatgagtttgtacgctggaatctcgaaaggtcctgaggtttatagggtttgggaatcgctgaagaaggctcgtcctgaggtcaacaacttgagctatctagtcatgttacaagcgatgagtaaactaggcgacttagatgggattaagaagattttcacagagtgggaatcgaaatgctgggcttacgatatgaggctggctaatatcgcgattaacacgtatttgaaagggaatatgtatgaagaagcagagaagattcttgatggtgccatgaaaaagtctaaaggtcctttctccaaagcgagacagcttctgatgatccatctgttggagaacgataaagcggatttggctatgaagcatttggaagcagcggtttctgattctgcagagaacaaagacgaatgtggctgtagctcagagctggtcagcttgtttttccttcactttgagaaagctaaagatgttgatggagcggaagatttctgcaagattttgtcgaattggaaacctcttgattctgaaactatgacatttctcataaagacttatgcagcagcagagaagactagtcctgatatgcgagagagattgtctcaacagcagatcgaagtaagcgaggagatccaagacttgcttaaaacagtttgtccctaa

SEQ ID NO: 162896 - DNA, 1473 bp, Arabidopsis thaliana landsberg
ttgtgtgaacatcgagagctcagtggaattcgacccttaagtgctaacgacgatctcttatttgagggagtaagcttaaggcaatttgagctatatcaaatttggcgccattgccgaagttctctttgtttcaccattagactaggtgtcggtttaagtctagactcttcttttctttcattactaattcagtttttctcttctttttctttttcttgtgtttcaggagctttaggaattcaattgcaacacaaagatgttgatagtaatacctgatgctgcaagagtgttaagggacagagctggtctggcatacaatgagtatggtcagaaaatcgatgagcaggaaaacctgatacctgattttgccgagggtgacaatcaacaccacctgggtgtcgctcacaccaaggcgaatgcagaactgcagctgttgcagatggacgtgttattcaacctgatgactacaacacgcctgatatgttctatgctggtcattccagctattctagtcaccaagcccacccttaatccacttctacgagtaggatggaatgcatgctacaacaaattctcaagagccaagtgatgacgaatcaaaggattgatggtctgtataatgatgtacaagatttgaatgctcggttcaacagagaggatgttaatgtagttcagtcaaggagtggaattcagcaccagaccttagagacaccactcgtgaccgcttgccacactaatttgtagaaccactcgacgccaagtctcagtgtcgatcgacatgaccttgatgtcgatcaacactcttgtgaaacagtcaatgcttcaacgtttgaaggagcgagatcaagcgggctcgatagcaaagtgtcatcaacagatgataatgtcgatgaacaatggactgatgttgagttagttgaggttcatggtacaagcaagatccacaagacgcagctgacgaataagctaatgagaatcgaactccagcgatggtgtcgatcgacagccaccacttgtgtcgatcgacacccgacacaggttgagccagagttatttattagagctggttttcgtgttgagttcactgctgatactccaggcattccggtcacgtcaaccaatgcaccgtcactccttgatccacctcataaacggctaaggtactcatctcctcctcctaaaactcctgatttcatcaataagagtttaaaatttccaaaaactgtttcacggtttagcaagccacgagtttctcgtcgagcgcttgtttgttcttttgatgattgtgcaggtaaaaggagtattccatccatacatgagtcccaccctgctgatactcctctcttcctagatagacctcatgcgttaactgcttatacgccagcatggatgatgagaggtctttctctacgatatttactaccaccttctgatccacctgatccccaaactccaccaaagtcaagctattga

SEQ ID NO: 162897 - DNA, 3416 bp, Arabidopsis thaliana landsberg
acaagtatttaaatcattgtcaatatatttcgtttctccttattatacgatctttcttacatgatgataatgatgatgatgatgatgataatccatgaaggtgtatgttgtctatatgggctcacttccgtctcaaccaaactacacaccaatgtcgaatcacataaatattcttcaagaggtcaccggagaaaggtgtggttttattaattcattctctaatctatgattggttataattagtttacgttatgaggattataaaagtgatatacacatatgtatactatagttccatagaaggtcgtttggtgagaagttacaagaggagtttcaacggtttctcggccctactcactgagtcagaacgagagagagtagccggttagtgttcttagatcgagacacattttatgttgaaatgtttttaaagatttaaccatttgaaactcttttgtgttgttagaaatggaggaagttgtgtctgtgttccggagtaagaactacaaactccaaacgacggcgtcttgggacttcatgggaatgaaggaaggtaagaatacaaagagaaacttcgccgtagagagtgatactattatcggtgtcatcgacactgggatttggccagagtcagaaagcttctccggtaaaggatttggtcctcctcctaagaaatggaaaggtgtttgtaaaggcggcaaaaacttcacttgcaacaagtataaaacccttcaaagttataatactggtgtaaggatttgtcattttgtagttgaaatgaatgtgaacgatctgtttgttgtatatcagcaagcttattggagcacggtactacacacccaaactagaggggtttcctgagtccgcaagggacaacacgggacatggctcgcacacagcatccatagcggctggaaacgctgtgaagcatgtgagcttttacgggctcggtaatggaactgtgagaggtggcgttccagctgcaagaatagcggtttataaagtatgtgaccctggtgtcataaggtgcacatctgatggaattctagccgcatttgatgatgccatagcggataaggtggacatcattaccgtatccctcggtgcggatgcagttggtacatttgaggaggacacgcttgcgattggggctttccatgccatggccaagggaatcctcactgtgaatggcgcaggaaacaatggtccagaacgtagaacaatcgtgagtatggcgccgtggctcttcactgttgctgctagtaatatgaatcgtgcgttcatcaccaaagttgttctcggaaacggcaagacaattgtggtgagtaccaagaaacaaatctttgttactttaagacaacacattatcgtacatatcttgtcctctatcaatattactgcttgttgcgaaacagggaagatcagtaaattcgtttgatcttaacggaaagaagtaccctctagtatacggaaagtcagcttcaagtagatgcgatgcttcttcagccgggtaacttcaatcccaagaaacattttctttgcatctattatgctcttcacatgagggtttaaaccgtgattttcgttttcaggttttgctcaccagggtgcctagatagtaaacgtgtgaaaggaaagattgttttatgtgattccccgcaaaatcccgatgaagctcaagctatgggagccattgcatctattgttaggagccaccgtacagacgtggcaagtatcttctcttttccagtctctgttctattggaagacgactataacactgttctctcgtatatgaactccaccaagtaatatccataactctgtcttattatatttcttacaaatactccatcctaaagctcaaacttttgtttgctttggccaggaatcccaaagcggctgttctgaaaagtgagacaatctttaaccagagagctcccgtcgtggcttcctacttttctcgtggcccaaacacaatcattcctgacatattgaaggtatatatagaaaaggagaaaaattaaattactctgtaaatttgactgaaagtgaatatgtattgcagccggatataacggcaccaggatcagagatcgtagctgcttattctcctgatgccccaccaagcatatcagatacaagacgtgtaaagtactccgttgataccggaacttcaatgtcttgtccgcatgttgctggtgtagctgcctacttaaaatcgtttcacccacgctggtctccctccatgatccaatcagccatcatgactaccggtatgcaaaatcacatccactctgttttctgaatattctcatcattttttttactcacaacacacctttcttgtattgcaagaaaacttataatactctgttttttggtgttttttgtagcttggccaatgaatgcatctacttctccatttaacgagttgaccgagtttgcttacggagctggccatgtcgatcccataactgcaattcatcctggactagtctatgaagctaataaatccgaccacatcgcctttctctgcggcttgaactacactgcaaagaacttaagactcatctccggtgaagctgtcacttgcattgacaagaccgtacctagaaactttaaactatccttctatgtcagctaaattgccgaaatctaaaagctccttcaccgtgactttcaacagaaccgtaaccaacgtaggtacctccaactcaacatacaaatcaaaagttgtgataaatcacggatctaagctcaaagtcaaggtctcgcctagtgttctatccatgaagtcagtgaacgagaagcagtctttcacggtgagtgtttcaggcaacgatctcaacccaaaattgccctcgtctgcaaacctaatctggtcagatggaacacataacgtgagaagtcccattgttgtttatactgattatgcatcatcagttgacatcttttaagtttaaaatcaaatttcccattgttttatttcatgacatctcgtttagtatacattaggtttaagatgaaaaaatagtaagtactgtaactcattttgtcattgaattacaatattatgttattggtttattgattctacacaaaatctaatcatcaaattattgtatcttgaattcttgataaggtattctaaaagcctttgagaatctacaagcaaaactaatctacgagaatatgcaaaactctttggcaagcatcgatacataccatttggagagaacgcaatgagcgtaaacatggtacaagacccaacccatctagtcgtcttatcaaatggattgatagacacattcgcaatcaactttcggctctcaaaatcagtggcgatcagaaatacaacaatggactccaactttggtttgcatcaaggaggatacattgagaacagtacctaa

SEQ ID NO: 162898 - DNA, 738 bp, Arabidopsis thaliana landsberg
  unsure (1)..(738): unsure at all n locations
atgaccacagaaaaagagaatgtcactacggccgtggccgtgaaagacggcggagaaaagagtaaggaagtgagtgacaagggcgtaaagaagagaaagaatgtaactaaggccctggccgtgaatgacggcggagaaaagagtaaggaagtgcgttacaggggtgtaaggaggagaccatgggggagatatgctgcggagatccgtgatccggtaaagaaaaaagaaatctggctcgggtccnnnnnnnnnnnnnnnnnnnnnnnnnnnnnnnnnnnnnnngctgccataaggtttcgaggatcgaaagctactactaacttccctctaatcggatactatgggatttcttcggcgacgccggtgaacaacaacctttccgagacggtgagtgatggaaatgccaacctccctctcgttggagacgatgggaatgctttggcttctccggtgaacaacaccctttccgaaacggcgcgtgatggaacacttccatcggattgtcacgacatgttatctccgggggtggctgaagcggttgctggatttttcttagatctgcctgaagttattgcgttgaaagaggagcttgatcgagtttgtcctgaccagtttgagtccattgatatggggttgactattggtcctcaaaccgccgtggaagagcctgagacttcctccgccgtggattgtaagctgcgaatggaaccggatcttgacctcaacgcaagtccctaa

SEQ ID NO: 162899 - DNA, 832 bp, Arabidopsis thaliana landsberg
atgaaaggtcttgttcagtttcttgtagctaaaatcatcttgttggttttagcatctacatttgtacattgttacgatccaaatcctctccaagactactgtgttgccaccaacggaactaatagaggtaatctctaattattattttatacgtaaaacaattagtttatacataagaataaccctatattttttatggtatttgatatggaagacgatgttatgatcataaaacttattatatatctttcaaattcaagtctacatttcgttcttttttttttaattttatcgtagttttcgtaaatggagaattctgcaaagatccaaaactagtaacatcagatgatttctttgcttctggccttaacatcccgggaaacaccaacaaccgccttggctcctttgtgaaccccgctaatatccccggtctcaacactcttggggtcggcatcgcccgtattgactttgcccctggtggtcaaatcccaccgcacatacatccacgcgcctccgagatcatcttagtcatcaagggaaagctcctagtcggttttgtatcgtcgaacgactacaactacacactcttctccaaaattctttatcccggagatgtgtttgttcatcccatcggattggtacaatttcatgcaaacatagggaagacaaatgcggttgcgattggggcggttgggagccaaaatcctggttatatctcggtaggtgatgcagttttcgggtcgaagcctccgattgcccaaagattttggctaaagcttttgcgttggacatcaatatagtaagatgtcttcgaaaagtgttttctcctcaa

SEQ ID NO: 162900 - DNA, 4188 bp, Arabidopsis thaliana landsberg
atcgataaagtgtggatgcatggcgcgatctcacagtctctctgcgacacgattatggaaatccgtagcgccactcgtatgatttgggcctccatagagaaacctttacagatataacgacaaggcacgggcaaggcaagagcacaacgacagacgctctctcacccctggcgacctgtctgtgcatgattattgccagaagctcaagacactctccgatctcctcgccaacgttgactctcctgtctctgatcgtgtcgtcgttacgcatatactcaatggactttctgaaaagtttgacaacatcatcaacatcatcaagcatcgccaaccgttcccatctttctctgttgcccgatccatgctcattgaggaagaacgtcgtctctccaagcaggtcaaaacaggatcctctcactcagccaactcatcgtctcccaatgtgctctatgtaacgtctaatggaaatcaaaactccatgtctcgcgacaacaatcacaacacttatcgtgacaacaacaacaccggctaccgcgacaacaaccacaacaactacaatgggcacaacaacaatggtagaggtcgtggacgtggacgttgcggtaccggcagtaacggcagtaacggcagaggtcgtggacgccaaaactggcaatggaatcctcgcaattggcagacacaacaaccatggctctcaacaccaaccccatatccacactggccacaacaaaactggatgcaaagaccaccgatggcatacttgacagccacgaacccagcagcagggctccttggttcttctccacaagcagctatggttggttcgactaatcaattgacgcaaattcctgcaaaccttgctgcagcttttgggactacaactatgccagatcctacagatgcaagttggtacatggacacgggcgcgacaactcacctcaccgcgcagccaggtaccctccattccctttttaattcgagctcatccccatcggttgtgttcggtaatggatcttctgttccaactaaagccatcggttattcatttttgccttctaaaatacgacctctccatcttcataatgtgcttgtttgtccttatataatcaaaaatctcgtttctgcacgtcaatttactaaaaataattaagtatctgtggaatttgatccatttggtttttctattaaggatttcaatactcggacgaatcttctccgatgtaacagtgatggtcctctctactccatcacgtcgccaccattatcatcatcatcatcgtcatcacctccacaagtcatggtagcaacggttcccgattcttcattgtggcaccgtcgtcttggccatttgggaaacacaactcttcaatctcttatttcttctcgcttaattaagagtttgtttgccaactagtacgtttacagaacataattatgaaactagtacacttactatttacaatatgaaatgtactacaggtggttattgttggcttttttgttaccccggttctgacactacgatttccatgtaattacaaaattgccagtgaaaccaaaaaaaaagaggtttcttctcgactcttcatatttctggtttcttaagaaagttgagagaagttggtttctgtattatgaagaatatctgcaatgacgaagaagaagtcgagtaaatcgaagacaataagccctccagtggtaatgaaacaagaacccaagcggcgaaactccagagcagatgcacagagaggtaagtcgtaatactgatgacggttcctcaagcaattttcgggataatttctgggttaataggggttcataattaggtttctgggttatttgtagatacgcatgcaaaatctctggctaaatctccggtgagtgctcgagggttaagagacgagtctccaatttcaccagcgccggcgaaaactccggcgaaatctggaggattaagaaacgaatctaaacaaggtaaacaaactcttatttgttgtcccttgccggtgaatttgatgaatccgactctatcatcaccgaacattttttttgatttggtttttttctgagatgaataataggagatgagagatgcagagatagtgaatttacaaacccgagcctcccttgccgtttgatgcctccagcggagttcccggatggggacgccttaacatacactcaaagccggagtatttgggaactctggtggaattactagagggttcagaggcgtgggatgagcttattgcgtcccaattcaaaaaattgtttgaacttccagttgctaggtgtcatcactctgcaaaactcattcatgggatgcttacaagacagcttctgacgaagaacaaacatgaattgtggacagtgtatggagggttcccactccggttctctctccgagaattccaaatgaccacagggctgatttgtgataagcttccatctgaatctgaggtagaagattaccacgacccagcatacctgtctgtttggaaccggctgtttggtgcgaaaagtatagtcacggtaatggatgtgatagatatgctaagggaggatgctaaagcggagactcggaagcgattctcaacatggaagaagctgagtcttgcattggtagtgctgattgatgggttgttgtatgcagcaataggaaacaacatcgggttacacgagactttgtagaaatgctgcatgatatagaattcttcttgtcttacccatgggggcgagtttcttttgaatcaacaatggaacggtttggcccttctgctggagaagaagatccaattgcggagctgaaggcccggctgtctcagaaaagcagtgtctgttatgggttccctcttgcactccagctcctggtactcaagtccgttcctgccctatgcagtatgataaaagacactgttgacttcagaaattttatccaaaagctttttgttgtccttggtcccacaattcttctgcgggaatcagatgttcttgacgctgagcaaactgctaatgtaagtaatgttgactattggcttttattctaacattatagcgactgttttgaacttatagatttagggaattgtacagaacaccttaaatccaaaagatgcatcaatagtaagctaatgtgcttttcttttaatcatgtagctgtctgtggaatatacactatatcagtcagaaactgtgaagggggatctgtcgtggccggatgaagaagaggatgaaggggtggagttgataatctctctgatcaagcagaagcaccacttcaaggctgaaacatggcccatacacagcatacaatgctcttccaaagatgctccagcagcagacgccgagtatgttggcgtagcgcttgatactgatgatgtagagttcgtagggacacgaactgttgggccagaagacaaatgtgaaccaagtaaagctgtgaaacgggcaaagaaagaatactaccccatccgtctcaagcctttcacgcgttcaagtaagaaagaaggattgaatgttgaacccctgcctactcaggataaagctgctacacccgttggaaagactgtccataaaaagacagcaaagcaagatgcaacgcagactgatcaagcaagctcctcttctcagtttgttactcatggtgaattggctgaatgaagaaatggtttactcaacaacttgaagacctccgctacaacataagtaaggatcttttgaaaaatttgaaggagaaggccaccgaaactgctgcaggggctcctgagacccctaaatcgaaaagcaagaagaagaaggagacaaagcaacctgttacacggaaaaggaaaagagaggaggttacttctttatcttctggaagctcatcctcggggctgaaccatggaccagctgtggacactgacataggtgtagatggtggaggaactgtaaatctagaaggctctgttgatccatgggaactttatggatcagcaaaaaatatttcagaggtaatacttacatatacaaaagcaaaacatggttttatgtagatttttgcttatttaattatgcaattctccatgatgatacttttatgttgggactttatagaagatagctacagagatccttacatctcccattctaaaagacgggctaaatgaggaagaatcagaaacagcccagaatgaaaaatgtgcagag

SEQ ID NO: 162901 - DNA, 3450 bp, Arabidopsis thaliana landsberg
ataaaatccaaatctacaaccacctttttatcgcaatccaatgccggaagattcttcttctttagactacgcgatggagaaggcatcagggcctcaattctccggtcttcgcttcgacggccttctctcttcttctccacccaattcctccgtcgtctcttcactccgatcagctgtttcttcttcttctccgtcttcttccgatcccgaagcgcctaagcagcccttcattatcggtgatttctcaaaccccatttcgctctagcgttgtttaggttttatcaaatttgggaaattgggttctgtctctcttgatttcgagagtttcttctgcattaacttcgttggaatctagggttttgatgatagaacctctgagtatggtagcattttttgtgctcctgagatttaacagaactaatttggtttcaattgtattaaagtatcgttttttttttttttgacgttttgtttgatttgaccttttgacaggggtttctggtggtacggcttctggtaagaccacggtctgtgacatgataatccagcaacttcatgaccatcgtgtcgttttagttaatcaggtttgattctattgcttcaatcttgttctcaatgtcccactttattctgtatgagattcacatcttataatgtttgatatcttttgttgattaggattcgttttaccgtggtttgacatctgaagaacttgagcatgtacaagaatacaattttgatcatcctggtgagttgttcttttgatttgtaaacattgatgttttggtgaaattttttaacgtctcttgtttttcattttctgcagatgcctttgacactgagcagcttttgcattgcgttgacatactcaagagtgggcaaccctatcaaattccaatttatgacttcaagacccatcaacgtaaagtagatgcttttcgccaggtgcatggatcttcttttgtttgacctccttatatggttcttttctgcggttttatgggtttagcttgtaatgtcatgtggctgaatcttcggattatcgtttcttaaaaccaatcagttgtcgctttggtcaggtcaatgcttgtgatgtcatcattttggaagggattctagtttttcatgactcacgagttcgggacctaatgaatatgaagatcttcgttgacacaggttaactagctgcagtatcttgtctctccttctttttggttctcctttataatatgaccttatttgttctgcacaactataaatgatatagtgacaattttatagtttgatggaaactgtccactttctgttctggctgatgcctgatggggcctttgatggattaactcactagtcccactttcgccatttcatcacttgttgaccattaaggactgaatgaattccctttggagctatatacttagcaaactttgaatctttctgaaatgtcaataatcctctttgaagttaaaaagttctcatcttagccatttattggttccagatgctgatgtgaggcttgctcgcagaatcaggcgtgacacggttgagaggggtagggatgttgactctgtgcttgaacaggttagtctttgtttcaggttttggggtaaaatttgtcactaaggttcacctatcttagttagtgctctaatgtgtgaatacaagacaaagaattatagcagcctatgggtttttgtgaaatactgaacaattcaatgtctctcttgttgttcgagtgactctagcttaattccgccctttgaactattcttctttataacagtgtttctttctgagattcctttattttccaccttatcttgttttgagagtgttatgttcatctgcagtatgcaaagtttgtgaagcctgcgtttgatgattttgtgctcccctcaaagaaatatgctgatgtgatcattccacgaggaggtgacaatcacgttgcagttgatttgattgtgcaacatatccacacaaaacttgggcaacatgatctctgcaaaatctacccaaatgtttttgttattgaaacaacatttcaggtaatttctgccttttcctgctgtttgatgcttgattcagatggtaaggcttaaaaccatattctcactttaagatcataactgcagataagaggcatgcacactctcattcgagagaaggacatatcaaaacatgacttcgtgttttactcagatcgcctcattcgtttggtactctttttactcgtgtcatccctttaaatgttactcagcttccacgccttgtcatttcaattgttgatgcctttatttcaggttgtggagcatggtcttggccatttgcctttcactgagaaacaagtagttactccgacaggtagaagaggagaatgcatgagctgtaacaatactgtatacactttcttatataacttggtcatcagatgtccgtctccttcacgtcaatctagttagagttagcttattcaactcatttaaacttatcttttccacaccaggagctgtatataccggtgttgatttctgcaagaaactttgtggggtctcaattattagaaggtgagcctttgaaaggtattgtatttggttaagtttgatatgataagatgcttattcttccaactgttttacatcatgcaaggcataaatttacttgtttgcgattaaattatctctcctaagtggtttctgttttgtatgtttttcctagtggtgaaagcatggaaaatgcattacgcgcttgctgcaaaggaattaaaatagggaagattctcatccaccgtgatggcgataatggaaaacaggtcttcctattaatattttgctctgtttttaaaagtatcaagtataatctctttttataaacacgaattttgaagtttctcttgtcgtgataatcagcttatttatgagaagcttcctcacgacatatctgaacgccatgtcctgcttctagatcctgtcttagccacaggtactctgtctctctacgctgtatatttcgattttggtcctttttgatggatttttggttctcgaaattcatatctcgtgatatttctttttcttgaaggtaactcggctaatcaagccattgaactactcatacagaaaggtgttcctgaagctcacattatattcctcaaccttatatcggtgagtgtaaaaagctatatatcgatctttcgctcttttgtgaatgtagaagctaaagatctcattatgtatctgcttctctatctctttgcttctctctttccctcgtcatgaccttgctttctgacaggcgccggagggaatccactgtgtctgcaaacgttttccagcattgaaaattgtgacgtctgaaatagaccaatgtctgaaccaagaattcagagttataccgggcttaggcgagtttggcgatcgttacttcggcaccgacgaggaagaccagtag

SEQ ID NO: 162902 - DNA, 1829 bp, Arabidopsis thaliana landsberg
atgaggaagaagagagtgaagaaaatcaagctttcaactcggttctatattcacgaagtgttgactacattagataagttgcagcctgcaatgagcaagtccgagagggcatggtttgagaaccatccgagtttccaacacatcttccacatgccaagagacccaaaccaccgacttatgggtatgtggatgctccttcttcgcacggcgtgcattgaaaggaagaaagaagtgtggttcatcgtcaatggcgttccaatccgatatagaatattggaacatgcattgatatcgggcttcaattgcaagaactataaacttggctacaaaaatacggggaatttggatttcaagaggaagcatttcaaggatactgttgtgaaacgcgaagacgtgagagagaagctcataggaatggtaccggagggtgaaagatcaaaagaaaggttgaggatgatggtcttgtatttcttaagcagcattatcatagcgcctatcaagaccggagataaggcacctcaagtggatgaatttttcctcaaggtgatgagtgatctcacgttctgtaggaattttcagtgggggaggtattctttcgattacatgttaggaaccatctcacacacggtgaatcattttaatggttcagtcaccaacaacgagaagtacatatggccggttccgggtttctgtcttccgatggaggttagttacaacttatagaataggtgattgtttgcaatactgataatactgggaatactatttgtgatttaaaattgtttttttattctgtagcttcttgcattcgaggcaattccacagttgagggaaacatttattgaggaaattgcagaagcagatccgggatgtcctaggatgtgcaaggtgaggttcaagaagaaccatttgaaaggctttcctcttgataccatttatgcagaattgggtacaactcaggttagttgtcttaagatatactgtttcacaaatgatagttattatattttcttataataatccattcatactgtttatctttacaggtcattgattctatcgtcacacttggaattgaggagcaaaaactcatgaaagcaatcactgaagaaaaagacgacgttgacgtggctgatatggtggttgaaagttgggagaagcgtcgtaaagagggccgtctaatcaggtttgatgagctctaccagcaggatatccaagccctgcagatcaccgcaggtccaaagattccgggtgcggaggatattcccgcagtgcttggacaagaactcccgagtttggtttctgtggttcagatgattgaaaacttggataagaagatggtagaccagatgaatgaaattataataatgatttctgatttggatagaagagttgaatcgttggaagcattcaaggatgagcagaaagcaaaggaggaaaatgtacatattgataattgtgtaatactaagtaacactatgataactaaagtataattgcgtaatactgatataacttcgttcaatcgcagaatcaagatgagatgaaccaagaggaggatggtgatccgagagagaaggatcaagaggaggatattgttcaagagaaagatggtgatcaagaggaggatgttgttcaagagaaagatggtgatcaagaggaggatggtgtcccgaaagagaaggaacaagagaaagagaaggacccgaaagagaaagagaaagagaaggacccgaaagagaaggatggaggtccttcaaaacccgtggaagcaaacgtcacgagaaggatcactcggagaaccaagatttaggatttcaagccttgtg

SEQ ID NO: 162903 - DNA, 3257 bp, Arabidopsis thaliana landsberg
tgtacgtcaaagaacacaattcaattgtataatttgtgattttcttccttctttattattaactaaaaaaatcggaaactaatccaaaagtttgctttttctttaattgagttcatattaactgtgagtaaatagatccatagatagatatgattcctaaaactgtaaagaatgttatcatttaattgatacagattttattaaaattagagtaagatataatttgatccttatttataacaatttaaagtatcaattaaagataaaatccgaggaattgcattagataaatttttttttttttttttgacacggtgcatgtatgatctctcctatataaagatctttcatgttcatcataatagacactaaacattacagtaattttctttaaagcaaatggcgacgctagcagcttcctcttgcctcctctcatgtctacttgttttgttcttgagttcagtttcagctgtcacagatgataaacaggtataaaaattgtcgatgattcatatcattattaatttattatgatgaactattgcttctccatgtgatcatccgttatatatacatggtgatcttgattattatatatgatccatgaaggtgtttatagtctacatgggctcactttcgtcccgagcggactacacaccaacgtccgaccacatgaatattcttcaagaggtcaccggagaaaggtgtgttttgattaattcatctctctaattatggttttagttataattaaatttaaataccgttacgaagattttaatacgtgatatatattttctagttcgatcgaaggtcgtctggtgagaagttacaagaggagtttcaacggttttgcggccaggctcactgagtcggaacgagaaagagttgccagtgagtgttcttcgatcgagacatacttatgttgaaattaattctaaatgttaaacaattaaactcttttgtgtattcttagaaatggtgggagttgtttctgtattcccaaacaagaagttacaacttcaaacgacgacgtcttgggacttcatggggttaaaggaaggaataaagacgaagaggaccctaccgtcgaaagtgatcaattattggagttatcgacagtgggatttggccagaatccgagagctgtttctgatcaaggctatggtcctcctcctaagaaatggaaaggtgtatgatccggcggcaaaaacttcacgtgcaacaagtaattctcttgatttctctaatagcattgttttaggcaacaagtagttctctataatagattgaggtgctgacaatatttcagcaagttgatcggagcaagagactacacaagcgaaggcactagggacctccgaggtcacggtgctcacacagcgtccacagcggctggaaacgcagttgcggacgcaagcttctttggaataggcaatggaacggcaaaaggcggtgttccagcctctagaatcgcagcttacaaagtctgctcagagaaagattgtaccgcggcatctctactgtctgccttcgatgatgcgatagcagacggtgttgacctcatcagcatctctctcgcgtcagaatttccccaaaagtactataaggatgcgatagcgattggggcttttcacgctaatgtcaaagggattcttactgtgaattcagccggtaattccggttcgtttccatccacaaccgcgagcgtagcgccgtggatattatcggctgcagccagcaacacgaaccgtgggtttttcaccaaagttgttctgggaaacggcaagacacttgtcgtaagtattcaagtaacacacttgtttttgtcatcattgtagctctgtcccttgaaatatcctttttgcttgacagggaagatcagtgaattcttttgatctgaaaggaaagaagtatcctcttgtgtacggagataatttcaacgaatctcttgtgcaaggaaagatcttggtttccaaattcccaactagttcaaaagtagctgttggatccatacttatagacgactatcaacactatgctttacttagctccaagcccttcagtcttctaccaccagacgactttgactctctcgtctcttacattaactccacaaggtagctaacggtcttctcgcaaaaactctagattctccttctttgtcctgatacctctgtgtttgttttctcaggtccccgcaaaggacttttcttaaaactgaggcattctttaatcagacagctcctacagttgcttccttctcgtctcgtggtcctaacttcatcgctgttgatcttcttaaggtatattattatttctgctcttgattatttttttatctttcctggcctgagagacaatggttggtggatggattgcagccagatatatcagcaccaggagtggagattctcgcagcctattcacctttgggttcaccatctgaggaagagagcgataaaagacgtgtaaagtactctgttctgtcgggaacttctatgtcttgtccgcacgttgcaggtgtggctgcgtacatcaagactttccatccaaaatggtctccttccgttatccaatctgccatcatgacaaccggtaagcgaaaactaaatccactctgtttcgagcatactcttttttttctcactcccaacataactttcttgtattgcaaggaaacttataatactctttttttttttttggtgtttcttgtagcttggccaatgaatgcatctacttctccgtctaacgagttggccgaatttgcttacggagcgggccatgtcgatcccatagcagcaattcatcctggactagtatatgaagctaataaatccgaccatatcacctttctctgcggcttcaactacactggaaagaagttaagactcatctctggtgatagcagcagttgcactaaagaacagactaaatcgctaacacgaaacttaaactacccttcgatgtctgctcaagtatcaggaacaaaacccttcaaagtgactttccgtagaacagtcactaacgtcggtagacctaacgctacatacaaagcaaaggtagtcggatctaaactcaaagtcaaggttgttccggcagtcttgtctttaaagtcattgtacgagaagaagtccttcacggtaaccgtttcaggcgccggtcccaaagctgaaaatcttgtctcggcacagctgatctggtccgatggtgtccactttgtgagaagccccattgttgtttatgcttaaaac

SEQ ID NO: 162904 - DNA, 7055 bp, Arabidopsis thaliana landsberg
atgcttcccgaagcatcacatccgttccttgcacccttccgaaaggtcacatccgttccttgtatccttccaaaaggtcacatccgttccttgcatctattgagcgatgcaaccgttcgttggtacccgctcgaccttacaccttttggccgagacacctcttcacccgtgagctaccacagtccaccagctcgagtgtcagctgaccggaccacccagctgggtcagaacatgatcagctcactgagctcaatcgagctgtcggtcagctcacctagctgagctagctagtcttccagctggtttagctcacctagcttagctagctagttcatcctagcttgtccagctcacctagctagttcagcttgaactttctcgttcttccgactaagtattttagtccatttctttaccatggtctagttttttcctaaaacaacctggcctctttatgaacgctggatgctgtcgttacaagtctacccccttaaactgaattcgtcctcgaattcggcgtgtgtaagatcttgcttactccctaactcgggacacgggcgttacaacatcattcggctagcgcgatccgagccgctcaaccatgatctgagggtcagctcaacccggctccgaagaaacttcagatcgggtcagaaaaccttcacccgaagaaaggacttaatcaatacaagatcgacataccatttccgaaaagctcggaaaagataataaagaatctccgaggatattatcaaatatagaagctcccacaatcttcggaagataaagacaatctccttcgctgactctaagataaacagaaatctcccgagaatatcgcgagaaggatctgccaaagccctatataaagcacctctaaggacaaacaaaaagaggatacgcactaaaacgctctcaactttaggctatcaaaaacgctctgattttgaaggcaaaacacttatatttcatatttctaaacacttgtacgatcaaatcctcattatttcaataatataaccaagaacaccgtccgcggtaatcagcaattctgttgttctttgagaatctcacaaagatccgttctttgaaggaacccttagtacaatttctattgtgcgagttttgactctcacaatttggcgctagaaggaggggaactatcgagatttctcttactcccagaacacagaaccaaccctaaaccctaaaccctaaaccctaaacccgaaaccctaaaccctaaaccctaaaccctaaaccataaactcttaaccctaaatccttaaacttaaacccttaaacctaaaccctaaatcatagatcccaaactttaaaacctaaatcccactttaggcttccggaatccggttgcggttttagttcttatgctcaatgatacacaaaacatctagtcatatttgacttcaaatccgctaaccaagcttattcttgattctcaaagctttgatagtgaagccgaatccttatgagtttttggttttgaatcgtttaacaaggaagcactactttacttttcaggatctggttgatgtggatgtcggattcacactcaagtatttattcttgaggacaaatatactagaaaataaatagatgattatagagaaaactatgagtattgtaaaagaaagtgtatagctaatttgcaccaagaaatgcgtgtgtctttacatgatctttggctcacagtatatacccaaagaatacatttaatttttatttaatctcaatcattctatcttaaacgcatccgtttccaatcttcgaattaattatttgaacgtttaaatttgaatccactctgggccattcggcctcttcaatccgagtaatcttgacttcgattcttccctcacttcgtaggtcagcacctcatccacactctcatttcgaggaaacttgtgggccttttatcttatgggcttcttttacccacgtagcaatctttcgccggatccgagcccatggtgcgggatccgacaccaacaattagcccccaagtctttcaaagtactactccagttcggaaggctttaatgctataagggcaaagattgcaccaaatgattcttgtgatttcccgcctaaattacgtgattgcattgatctcggaattttcccatagttaatgatgtgacacctgtcacaattatgaccgtatatagtttatttactattaaagcgaggaaactcttccacttcctccacgactcccaaggtggttccgtcatcattactggttcgcgtgtaggtaaattcactttactctttccttgtcattttatttttttacgcttctctctcaaagcaaagttcttctctttctccgacccttcaatcttcctattctctacacgatgaattccgaaattgaaagacctgaatccccctctttcgacgacgccgactctagtaacgacctctgcacccggccaaatgacatcgccggtccccactatcaatccacatgcactctccaatctcttaatcgattgggagagctttgtcggattgcgaccgaagtaatgaaggattttcggatgccggagcctaccgaatcgccggaagaacaccgaaccgggttcttctgcgtgtacgaaatttacttcaaagggtgttgcttgactttccctctccccgaagccctcgtgcgttacttgtcggcccttgaaatcgccttacccaactaacttgcaacctcctccggactattcttggaattattactattgcggctgaagctggatacgccatcggggttcccaaactgaacgaacttctcagtgtggggagttcttcgaagaaagtcggatacttctcggcttatccgaacgctaatagaaatctcatctcgcaccttccgaacaaagatgagaattggcatcacccgtggttattagttaaaaagagccctgcctcgatcggaaacctcctggacttgctcccctcgaagtggaacactaagcccggtagttattaggtcatgcatatgaacttttttttatttcatgccttatctgaccatcttctattttccacttcgcagctttcatcgcacctacccttcctactgctgaattcggcgaattctttaagattgtcatcgagggagaaaccctttggaacttcttcactctcgaccggttcatagaagccaaccacaagcttaggatgatcccccctggacatctcctccagctgccactgccccctcttttacctaaagggacttctgctcgggccatcgcagctcgatgcaagacaatgtccaagtcgattgtggaggcttgcgaagtgaacaaatcattcctccaatccacagtcgacaagaaggtatatagcagaaccctgctagtcgatgatggcagcgccgaaggggcaagatttgccggtgcttacagacccactcctcaccgcgaaggtcatagcggccggtcatcccacaaggagcgatcacctcgacgtgactcaccccggcccacttcccgaactggactcagcagcgagccaattgctgacctgattcagaagaagagagacagaccatcccgcagcagcttcttccccaaaacagacaagacgagggcccgaactgaccgctctcctcgaccgttgtcgccaccccgatctatgggtcctcctcctccagtcaccgtatctcctttgtccggatcaggaggtgaaaaggcatagcggagtgctaaccctctgacggaatgaaactgaggtccgagatgctggaactaaagctgttttggttccttagacaaagtcgctcacgggttagaaatttcctcccatttttattattgcattttttaccatttcgacttattgacttagcgttccttgactggtccgaccttctttaacagcgatggaaacggagggaaacgtctttcgatgtttcaaaaccggaaaagacaccatcctgccagccttcgataggtggcgtcctgcaatttgtgaacgattcctactccatgcccatcactcatctcgggttagttcctttttcccacaatagatcttttaatctttgctcctttgctctgtcgctaaccccttctcgttcttatctgattcaggcgaacaacgaactcaacgacatgattgagtactacgaaaagctactacttgatagggaaaaaatgttatggcgtggaaagataagtcttcgtcccttgagtccaatctccgctcttcaaatgacaccaggctgaaattggaggatcaattggacaacctctccaccgaactcatgaagtccaacggcgagctgcaggaacagtactaaaggtacgataagatccaagaagaactctcaacttcttgggacagactttcggaatcctaatccaatgcctacgaattgtccaaccagatgtccgaattgcagcataagtacaaagcggtggccaactatcaggacgctgagttggcgaggtcggcatcaaaggccaggaaagaggtgaaaggtcgcgggatggagttgatccaaggggcaatcgtcttcatcaaaaccgaaaaggctagaatggagcttgaatcggacatcaagaagtacgagagcaatctcctccttttggaccaaactcatgaagatgactttctgaagaacgagagagggaagagttgaaagccgttctggaagagaagcgaaatcgtttacctgcccttccttcctcgtcgttcaaccctcagcagttcgaggagttcttcaccgaatcgcctcctttgagcgaatctggtttagactgggctggtaaattccgactcttctctttatttttcaaaaaaaaccgatccacagcgaattactcttgtgttaatccaagataattgcctcaggtgtcagcgattccgttgaacccgaagtgcctattgcaccatcatcagttctggaggcgataatcaccccgtctgaaattcctccatccacgaactcggagacagtggtcatcgaggatgatgatggttcagactccgtgattcgtggcgagcagccgctactgacgagccgggtgagactgagacagctgccgcagatcctgagtcagtttgaaccgaacccgagatacccaagaacccgtagtggctgtgtccacttaatggggattgtcccttgaactcgaaattcattattgttgtttttctttttgaattactttatctgcctaagtaggctttaaacaaatactttgcctgaggaggctttaaaccttttctttaagattatgatcccaaaagggttttccttgtgctaattttgagtatggatttgcaaagtccatctctttaaatagcgtttttgtttaccatgtggtcaagttacggtatttgtaggttgatcagacctatccctaaaaatgcggacttgaatccgcgaattccccaactcgggtttagtcagttcgattatttttgcggtctctgagcctttactatttactttgcatttaatggcccacttatcttaaatgtgacagttgcctttttgtccttggaaatctggaaaagtgtcacgcttctaaggcaataattgccttttcctcgatcccaaaaatggataaactcattcggatacgccacaattattaactttgtggtttcgagtaaaaccctaaatcactataaataagggcataaactttcttaactctcgaaagacatgttcgcagaaatttacttgaacaacacctatagaatggaacgcgaaggagcaaccaccgtctgcccccatgaccccgggagtcccttgtttttgcccggcgatggcttcgagcccgccggtgtcctctttccacacgcttgtttccactttccttcgaaggaaaagaaggaggcatacgactttatggacaaggtaaagcctctcttgttctctttttcggaacgagttctacttgttttctaaccagttcgtactttaggtcgtcgataagcatcgccgcctgtgcgatgaaaggcagcgtttaggcctcaagaggcaaacgcttgaggcccaaattgcttgcatcgagaggcagataagggccatggagagcgacccttttcagtgggagtggaggaacttcgactgcgtggcgaagatctcgcacatgcttcggatgtacctccgtgctcgaggccaagtccccggtcctgtaaacgctccggttcaagtgatcccgtctgacaatgaagacggtgaagattaggaggaagacagtaacccctggaagcgcgtgaagtgaacccgacgtggacgacaaaaacgaagcgtccactttgaaccccgaaccggcgatgaaggagcctgttcctgagccccttccctaaatgttcccgagactaaaaaccctcttttttattttcgcatggacctaactactgggcttcggcccatctatttaagagaactttctaattttccttgattcatcaaatttttgttttggagatactctttgaatgaagggcgaccaaagcgacgtgaatgcctccgcgaatcactccggctctaaatggagtcaaatctttgaaagctacgaaaacttcctataaatttcttttctaggtcctctttcattcctcacttacagtacaatattttttttttctttcacagttatggccttcaacctccgatgctcggaatccatgaggacatttcgaatgaggacattccgaatgtactagacagaggacgccccccacttcgcagcttcagatcccagatccgagctccgtgtgcacttatcaaggacctttagagcagagatcaagacatcgcgatgtccttcatcaaagctctcgcggctcaacacaaaaaacgctcaacggaaaagaagaaacttcgaaagaagatcaaccaaatgctacgaagagtcactgtgatatcaagggagttacacaccctcaactctcaccccagagattggatcgaactcgaaatcgcagaatttgctagcatgccggattttatgatgcccattcttgacatcgcgagtcaaggggtcgacgtgttctgcaagacgaggaggatttcc

SEQ ID NO: 162905 - DNA, 874 bp, Arabidopsis thaliana landsberg
agccttcacggttaacattgttcgtcatcatgtcatccggagaaagagctttacaccttacaacacccgacgatgaagctataagaacgtgccatttacttctacggtttggagattttaggggagttcgagacatcatcaacacgaacaaggttgtaatcagtgaacggctagatacgtttgagaaagcggcagctatctcggatgttctctcggccgcagagaccccgcttcccaacggggcgactgattggtacgggatgattcgaatgaaacagccgggaccgattgtatcggaggacttcgagaagttgatgaatctcttgaactcgagtaacaatcctttcccattttgccaggaagctcgtgttaaagcctcgttagcttggtcgtttctgtccgatccaaccaataaggcgaagtacgataagtctttttccagcgtggacaaccttgttatcgaagaagaccaaagcggtgacataaccgatggtggtcgtgtttgcggagagggtagcgaaggtgaagtggacacaagaaaacgaaaggcggagagtctcattttctctgatttgccagcattagagaacttgaaagagtttcaggaaacggaagagagtcccttgccggtggaggagaaaaacaatgaagttccatcgaaagacacttcgtttgtcccggagaaacgtaacgttggtccgggacctgacgatgaggttgttgtgatttctgatgacgaggatgaggaatacgtgggccgagatattatctcaatggctagaacagcgaaagtgcgcatagttgatggaaggaaagtgaaatttgtcccattgaggaagaagcaaaaatagggacaagaatgttataccaaaaa

SEQ ID NO: 162906 - DNA, 1971 bp, Arabidopsis thaliana landsberg
atgattagaccaacgtttggtttactagtctttttggctatattcctttttccggcgattgaatcccggagtcaccgaaattcggtgacttccaagattgaattttcagcgctgaattgccggaaacatagtgcaatactgactgattttggtgcggttggagatggaaaaacttctaatacaaaagcgtttagaaatgccataagcaagctcagccaaatggcaaccgatggcggagctcaactcgtagtacctcccggaaaatggcttaccggaagttttaaccttacaagccatttcactttgttcatccagcgaggtgctaccatcctcgcatctcaggtaagtgtgtttaaaaccgtttcattcatatttttaaaaaacttaagaacaatagtgactagagtgtaattgaatagaattaaacgtttctacgtttagtttttggtttaggttgtgttggatccgaattaaacgtctctacgtttcatataccataacaatctatactgatgaccaaatcacactactcctaatgaatcaaattttgcctagtagagacgttgacgttagaattttttctaaagcacctcgcacatttaatacacatatctaaatattgcacccggtttgttttcgacctatataacgaattaatatgtctttacaaaaaccaaatccgttcttgacataaacaggatgaatctgaatggccagttatcgctccattgccatcgtacgggaaaggaagagacggaaccggaaccgggagattcaacagtctcatctccggtacaaacctaaccgacgtggttatcactggtaagttccaacgcaatatatcacaccatgatatgcttgatgcatatattccgattcttattttgattgttttcttgattataggtaacaacggaacgatcaacggacagggacagtattggtgggacaaattcaagaagaagcagttcaaaataacaagaccgtacttgatcgagatcttgttctccaaaaacattcaaatctcgaacatcacattgatcgattcgccgtcgtggaatattcatcctgtctattgtaatagcgtcattgtcaaatccgtcaccgttcttgctcccgtcactgttcccaacaccgacggtatcaatccaggtaatgtttatcctacgtggcaaccttattatcctacctggcatttctaaaatctgacttggcacaatgtcatcctctgtttttgttgggtttccaacggctctgtttcttgttttttcagattcttgcacaaacacattgatcgaagactgttacatagtctccggagacgactgcatcgccgtcaaaagcggttgggaccaatacggaatcaaattcggaatgccgacgcagcaactctcgatccgacggctgacatgcatctccccaaagagtgcaggagtagccttaggaagtgaaatgtccggaggaatcaaagacgttagaatcgaagatgtaactctaaccaacaccgaatccgccatccgaatcaaaactgcggtgggacgtggcgcttacgtcaaggatatttacgctaggaggatcacaatgaagacgatgaaatatgttttctggatgagtggaaactacggtagtcatcctgacgaaggatttgatcccaaggcgttgccggaaattactaatatcaattaccgcgatatgacggcggagaatgttacaatgtcagcgagtctcgacgggattgataaagatccgtttacgggtatttgtatctcgaatgtgactatagctttggcggctaaggctaagaaaatgcagtggaattgtacagatgtggctggagttaccagcagagttacgccagagccatgtagtttgttgcctgagaagaaagctcaggcgaagaatgttgactgtgcgtttccgtctgatttgattccgattgagagtgttgtattgaagaagtgctttctttga

SEQ ID NO: 162907 - DNA, 3234 bp, Arabidopsis thaliana landsberg
atgagtacaaagaaactgttcttccctaaaagattgttccaaccaggcagcgaagtagataatattacaagggtatcaaagcattcatccttcaaaattgtctcgactattaggaaagctttagagccgatagagttcaacacattaatggacacattcttgggtcctatagtggaattcgctgaaatggacttagtattttcaagccatattgttcatcatttactgcagagaagaatactaaccaacaatgacgaattgtggtttgtatttgctgatcaacctatgcgattctccctgagagagtttatcataacaacaggacttccaatggatgatgcatcaggaagcagtccaaatgtgaagagaaagaagaaagaaaagtggtggataaaagataatcagactttgaagggaaagcagaaaaaagatgtgtggattaacaaggaaatgacttttttagatcttacatatgttttggaaaagcgttccaaaaaaatgcagccagaggagagactgagattggcgggttcgttactagtggagggcatattgctagctcgaaatccgactaccatgctgccaattgagaatctgaagagagctactgatttcgaaaagttctgtaagtatccatgggcgcagattgtgtactcatatttggtaactgaagtgaagagaatcggtaatgactatttgttaaggaaacaatatggtctatttggatttgttcaatcaattcagatatgggcattatcatcggttcagaagttgggagaaaagtttggcactagagatgaatcatctagtggaaatattccattaattctccaatggagatcaacatcgtctccaagtgcaaaagctataacaatgatagcagatggtgacaaggtacattttcttagctgtggctttttttatgttttaaacactgtttataaataaagagtatgttttacaatagtttttacaatcaagttttaaggatttacaaagggttaaaagcaatttaaactatttacaacggattttaaaaggttaattaagaattgtgcattatttttacacagtttggaattttgtttatctttgcaggttgaagtgacactaatagttggtgttcatactcatgaatacgaccacttggtttcacagaagaatcctgaagacaaggatctgttggatgtttttgatcttgtgatcaaaggatatagaatgagcaagaaggattggtgtcagggatggattcaagtggaacaaggacatcaaggaagaattgatcatgtcttgaaacctgcaattgaaacagttgtgcatcaaagcagaaaaaggaaatcaatgtcctttggtgagaaggtaaaactggtatatgaaaattgtgaggttcttaagaagaaagttggaaggctggagggctatttaggcatcaaaagagttcctgccagttatactagagaagaacaaaaagaagaggacgaaaaaaaggagcaggaagaagaaaagcaagaggaagaaggaaaagaagaggaattagaaaaggtatgtgtttttacaagggattttaaaagcttataaatcgtgttttaaagatttttagccgtttttaaaagataggcagtgttagatatgtatttacaagggattttaaagacttcttaatggggttttaaatgatttaaattcgtttttaaaggataggtagtgttcgataagattttacaacggattttaaaagctttttaaaagtgatttacatgactaataactgtgtcctggcttgtatttgggaacttgtaattatttatacaggttgaatacaaagatcatcattctacttgcaatgttgaagaaacagaaaaacaagagaatcccaaacaaggcgatgaagaaatggaaagagaagaagcaaaagaagaaaaagtagaagaacatgatgaatataatgatgctgcagatcaagaagcatatataaatttctcagatgatgaagaaaatgatactgcacccacagagaaagaatcacaaaaaaaaaaaagaagaaacaaatgtctgctttccttaactttttaaaaaaacatgataaattgtcaaaaaataaaaattttgttttgatcttttggtttacaggttttaaaagaagaaaacgtagaagaacatgatgaacatgatgagactgaagatcaagaagctaatgggactgcacccacagagaaagaatcacaacctcaaaaagaagaaacaacagaggtatgcattctttaattgtttaaaaagacatgataaaattgtcaaaaaataaaaatttgttttgatgttttggtatacaggttcctaaagaagaaaacgtagaagaacatgatgaacatgatgagactgaagatcaagaagcatatgtaattttgtcagatgatgaagataatgggactgcacccacagagaaagaatcacaaactcaaaaagaagaaacaacagaggtctgcattccttaattgttttaaaaaacatgataaaattgtcaaaaaataaaaatttgtgttgatgtttttgtttacaggttccaagagagaccaagaaagatgatgaagatgttaatcaaacaccactctctacgcaagaagaagaaatcacccagggacagagcagtcgtaagttctttttacattcacatatgatttgccttgataaacaacttctaaattttttttttgtttgtttttgtatcagttcaaactcctttgacgccggtcatgttgagtcaggaagtaatggaagaaattgacctaaaagttaaaaaatgggcgaaaaacaaattaataagagatctactatcgtcagttgaagaagtaagttaaattacatcattgttttgctgtaaaagattttaattctaatcattttggaatttttacatttcagattctttggcccgacagtaaatggcaaaacgtcaaaatttgggaaatgtgggacgagaagaaatacaaattagcattaaagaaagcaatgttactcattcatcctgacaaactgcctcgagctcatccagaagtgaaatacctagctgaacaaatctacaagataataatggttagtgttaaactcttcctttgtataacgatatatctttaaaaacttgaatattataattatgcaaaaaataacttacagtttgaattttatttgcaggtagagaaggacagagctactaaggtaaaaatggatttagttctt

SEQ ID NO: 162908 - DNA, 1181 bp, Arabidopsis thaliana landsberg
atggatactactaattctagccgctggtcagagcttcctatagacatcttgagatctctcctcgaacgtttgagatttgtcgattttcaccgcgctaagatcgtgtgttcgtattggtattcgtgttcaaaacaatcgttgctacgaaaaacctgatctccatggctaattctctttccagaaaaaggtggttgtgctatatacaacccggacgaagctaaagattacaaaacaaaaagagactcctcagggattcgattcttggcaaactcagttaactggttcttggtgctagattctcgttccaatctctatatcatagatgtgtttagcgagaaaaagatcgatcttccacccctagaatcaatcaagaatggcctttatagtcttgagcaagtaggaggtaaagcatttaaggcgagattcaataatggtagttcatatatattccatacataatgcggaagatctatgaggtcttttatgggtagacgagaagaagaaagaatacattgtagtgtggtttttcgacaaaggtaccgaatataaagccttttgcaagaacggggaagatcattaccgcgacattccgatacgaaaaaatgtttgtaaagagttacaaggcttatatgatatgttactccatggtggtgacaatctttatatctcaaagactcgtcaatctattcggaagcttagattttttgaacaagaaggtttcattgatgtcgacaatagtgagatattaccatttcgtaaaatctccttttacattgatggagcaagatttagtaataacattgccgttacaacatcaagagaggttttgttggttcagaacttcttttacgagacaacaagatataggagcttccgtttgtacaagaaagatcctaatccggacttgaatgctactatcaacaacccctacccgatggttgagttatgttctctaggtgatgtctctgcttctggatttgggtatcaccgtacatgcggacggtacacttggtatcgaaccaaactccatctacttcactcgtcatgaccgtgtctgtagtgaccggaaacgttcttgtctggacatgtgtatgttcaatcttgtgacaaagaaacttaaacgattcccggatctttccaacttaaagctcacggatgctcgatggtttctcccgtcttga

SEQ ID NO: 162909 - DNA, 1165 bp, Arabidopsis thaliana landsberg
atgggctcacttccgtctttactggaatacacaccactgtcgcatcatatgagtattcttcaagaagtcaccggagataggtgcgatttaattaattcattctctaaccattgattagtcatgaggatttataactatagtgatatatacgtatgtacactctagttcggtggaaggtcgcttggtaagaagttacaagaggagtttcaacggtttcgcggcccgactcacggagtcagaacgaataagagtagccggttagtgttctttgatcgagacatattttacgttgaaatgtttttttaaggttaaaatatttgaaacccttttgtgttggttagaaatggagggagttgtgtctgtgtttccgaacattaactacaaactccaaacgacggcgtcttgggatttcttggggttgaaggaaggaaaaaatacaaagcgaaacttggccatagaaagtgatactattatcggattcatcgacagtgggatttggccagaatccgagagctttttctgatcaaggctttggtcctcctcctaagaaatgaaaaggtgtttgttccgccggcaaaaacttcacttgcaacaagtaattctcttaatttctctaatagtattgttttaggcaacaagtaattctcttaatagattgatgtgttaaaaatgattcagcaagttgattggggcaagagactacacaagcgaaggtactagggacatggacggacacggtacacacactgcgtccacggcggctggaaacgcagttgtggacgcaagcttctttggaatcggcaatggaaccgtaagaggtggtgttccagcctctagagtagccgcttacaaagtctgcaccccgacagggtgtagttcggaagctctactgtctgcattcgatgacgcgattgctgatggagtagacctcatcaccatctctatcggagataaaactgcgtccatgttccaaaatgacccgattgcgatcggggcttttcacgctatggccaaaggggttctcactgtgaattccgccggtaacagcggtccaaaaccaatctcagtatcgggcgtagcgccgtggatcttaactgttgcagccagaaccactaaccgtgggtttgtcaccaaagttgttctcggaaatggcaagacgcttgtc

SEQ ID NO: 162910 - DNA, 1308 bp, Arabidopsis thaliana landsberg
  unsure (1)..(1308): unsure at all n locations
aaggccactaatccaacaccccaggaggacgagttggaccaagaaatcagaaacatggagatgcttcatcaacaagtacaaaggaagaaggagaagatggctcgactagccaaccttaaaaggcagattgatgaagccactaaagaagtatgccatcttgctcaagatgaacaagaacgaaggccccaacacagggagcttcatcaagaagacttgttcgataatgatggatggtatgatgattttaatcatggtacctttacttttgccgatgcttctcctctgtccgctgaactgcaggctacaccttggcccccgtcctataagccaccccaacttcccatcttcgacggccattcagacccgaagcagttcttgatgagctacgaagcaacagtgtcttcgtatggtggcaatgctgcagtcatggcaaaatcttttgttatggctgtcaggagtgttgctcagacctggtattcttctcttcgaccagggaccatcacttcatggcagaagctcaaggatatgctagtgacaagtttatagggctttccgacgaagccagtcacagctcaagctctgtttcaatgcatgcaagatcatgaggagtatctccaggcatacgtccgaaggttcttacgtctgagagcacaagcgcctacagtgcccaatgaaattgtcattgaggccatgatcaaggggcttcatccaggacctactgcccagtattttgctagaaagcctccacagactttgcagaagctgcttcagannnnnnnnnnnnnnnnnnnggcggacaacaacttctgccaaagaagggaagaagcttatagattgtctgaaattactaggggcttcagaggaaaaatccaccctaggcatgtcagatcaatcaacagctccagtcagaatgatgacaaaggaagccagcttcagaggccacatcacacctcacagtcttcgggacagcagcaaagctccttcaggccgctagctccaagtggcagaggcgccaggggcttcagaggaagatatggggatcagcccaggaaaatctattgcttattctatggtgaggacaagggccatactacaagaatgtgccaaatcactattctgaagcaaaaggagatcgctgaagccaaagctcggtagaatcagccgaagcaggtcctgcacactgcttcgtgtcattcaccctacataccagaatatgtgagtaatcatcccgcagcttctgttgcttcggctagtcagccgcaagtttcttggccacagcttccacctctgccgccactacagcctgcc

SEQ ID NO: 162911 - DNA, 3857 bp, Arabidopsis thaliana landsberg
attttttttttgaacatcttataaaatacccaaccgtaacaatgtaaaaaattcataactcagatcacaacatttatttacgaacaaaaaaaatcttttctaaaaataagacttcttacgaaaataataatgtattggggtggagagcatgagatttacacattacgaagttggatgtacaaccataaagatcaagcgaccggtgaggtgacgagagagtattatgagggaatgcgcggtttcatgtatcaagcgacaaacgaaccatttgctcgtgagaacggtacaatattctgtccatgtcgtaagtgttattgagaaatatttggaatttaatgtagtgaacaaccatctttataatataggatttatgccaaactactatgtatggttacgtcatggagagggttgtagagatagcgcaggaactagtaatacgaattatggtgtcgcaacctagtaattttaataatgatgcgaattatggtcaacaagtacctaatcaatttgattataggcataaccaggaaaatagatttcatgatatggttacagatgcatttcatgaaactattgctgtatttcctgaaaatattagtgaagaacccaacgtagatgcacaacacttttacgatatattagttgttgcaaatcaaccaatctacgagggatgtagagaagggcattataagttatctttggcatctaggatgatgactattaaagctgataataacttaagtgaaaattgcatgaattcatgggcataattaattaaggaatatttgccatcggataatatatcggctgagagttattatgaaatacaaaagcttgtttcgagtcttggattaccatcagaaacgattgatgtatgcattgactattgcataattttctgggatgaaaatctgcatgaatgttaattttgcgaaaagacgagatatcagactactggcggaaggacgcgagtgccatataaacggatgtgatacttgccaacaattgatagattgaaacgcttatatcaatcggaaagaattgatgcgaaaatcagatggcatgctcaacataccactgcagacggagaaataacgcacccatcagatacaaaggcatggtaacactttcaaacggtatattctgactttgctaatgagtgcaggaatgtgtatcttggattatgaacagatggatttagtccctttggtttgtctgggcgacaatattttggcctattatcttgacgccatacaatcttcctccaaatatgtgtatgcaaagcgaatttctgttcttaagtattctagtgcctgggccaaaacatctgaaacgagtgcttgatgtcttcttgcaaccgctgattcatgaactcaaaaagttgcggtatgaaagtgttcacacgtttgattactcgagcaaacaaaatttcaatatgcgggcagtgctaatgtggacgattagtgacttcccagcatatggaatgttatcaggatagacaacgcatggaagattatcttgtccctactgtatgggtcgtaccgatacgtttcagctaaaaaaaggatgaaaattatgttggtttgattgtcatcattggtttcttcccctgcaacatccgtatcacaggatcaacatattgtttaggaagaataaaatagtttgtattccgccgccatcttatgtttctggaaatgatttgtttgaaaatatcgattattatggtgcttaggaaacatgtaaacgtgggggtaactggcacactccggcgaatatgcctgacagatatggaagtgcccacaattggcacaaacagagtatcttctggcaactcccatattgaaaaaatctcctcttgcgccatcaccttgatgtgatgcacatcgagaaaaatttctaagataatttcatgattacgcttcagaatgtgcagggaaaaactaaagatagtttgataacaaggttggacttggcggaaatatgtagcagacctgagttgcatgttacacgagatgggaaattaccggtttcaaaattccgcttgtctaatgaagcaaagaaggcgttgttcgagtgggttgttgctgaagtgaagttcccagatggatatgtgtcaaaattttcaagatgcgtagagcaaggccaaaagttttctggtatgaaaagtcatgattgccacatattcatgcaacgattactaccatttgtattagtagagttgctaccgacaaatattcatgaggcaattgcaggtaatatatttatatatttattatatatatacatactatatgttttttttactcaattattacttggtcattattaacttactttaattaaatacatgataggtatcggagtatttttcaaggacctatgtacaagaacactgacaatagataccatagaacaattagacaagaatatcccagtgttgctctgtaacttggagaaattattttcccctgccttttttgacgtgatggaacatttgccaattcatcttccacatgaagctgctcttggtggaccagtacaattcagatggatgtatccttttgagcgattcatgaaatctcttaaaggaaaggcaaaatatcttgctagagttgaggggtcgatagttgcaggaagtttaaccgaggaaacgtctcacttcacatcgtattactttagtccaagcgttagaaccaaaaagactcgtcctcgacgctatgatgatgtaggtgttgcacctacatataacgttcccgatgttccagatacctttgcccaaataggtatactcgcagggaagttgaaagaagtttggtgggacgaccatgcgctttctcgagcagctcacaattacatactccgaaatgttgattacattcaaaaatttgaaaggtataaagtatcctagttttattcctaatttttataattaataattagtgtgaaattaattaaggaagctaattaagcagctacgttgtaatttgtaggttatttgattcacaaatccgtgaagcatgtcctgaattagaagaaaaagaatatgaaacttacaaagatcgtgattttgctggatggttaaaatactatacacgtataagaatgtttggaaaattcgtttacttaataacttataaaaaatgataattaaacttaacattttctttgtgtacgttgcaaacggatgtggaaacgaaccattatcactttggttgcatgagctcgttcaagaacaaagatctaagatcacaacttctctgatgtacttcactcatggctatactttccatacgtatccatatggaagtcgaagggcaactgcgaattatggaatccatgttgaaggtgggactgaaggcgatcggttactacagcaaattctagaagtcgaatatccaggacttttgaatttaaaatgcgtccttttcaagtgtgattggtttgatccggtgatcggtcgtggggtacggaaaaatagcttaggcgtggtcgatgtcaatgcaaacaagacttatgccaagttcgaaccatttatcctagcatcacaagcagggcaggtaagctttctatcttacccgcgtgtaaggtcacggcgtgaagtgtggttatccgttattaaagtgaatcccaggggccgtatagtcggtttagttgatgatgttgtgatgcaacaagaaagcattagagaagtttccattcaagacataacaacagaagatgttatccacattgacctacagaacagagagttagaagacatcaccacagacggttccgaagaagaagaacaagaagacaaattcgacgaatctgatgaaaacgttgagcaagaaaatgattataatgattaagaaaat

SEQ ID NO: 162912 - DNA, 2596 bp, Arabidopsis thaliana landsberg
  unsure (1)..(2596): unsure at all n locations
aagtccagaatgatgcagctaatcgatcgactccacaacatgaccctccaagttctccaattcagaactctcatgccagtcaaccatcttcccaaggtaacaacttccaagaacgtgttagttccatgttaccggaactccaagccgataacgtaaaggctctaaacgacattcttcaagtgcctggtcgtgaggcgtggacaactgttctttctcccatactgatggaaaaaacaacttggttagtcatcgttttatctggttttcaaatattatttaggaggttggtctctagtttagaattaagtgtgtttggtctttgatttcttaacgtttagttgatgtgtctggttttgatgtgtgaatgtattgattagagtccgagtgtattgatgtgtgtgagtgtattgtgaagtgtctagtttagttgtgtaagtcctaagagtctgagtgtgatggaaatcgatgaagtttgtttctttctttcctaacattagctttgaaatttgagttaagacagtaaatgagaaatcgagtgttggagtaaagattcattgagtattgaacctatggaacttgttttgataggagaatgatcgagtggtcgttgataacacttgagcagtctccatgctttgataacctctggaacttgttttgatagcttttgtgtaaagaggttctagttagggtttatgtttagctcagtctccatgcctttatgtgtttctttctcttttagctcattagctagctgtgctaagatttagtgaagtgttttggttacttgttatattttggttttgatgtctggttttgattgaagaattggttttgatgtttggttttgatattgtcttgtttctttcttaacaatgtattgattagagtccgagtgtattgtgtaaatgtattgtgtaagtgataagagtgtaagtttattgtgtaagtgataagagtgtaattttattgtgtaagtgtattatttagttgtgtaagtgtctggtttatttgtgtaagtgtctggtttagttgtgtaagtgtctggtttagttgtgtaagtgtgttagtgtattgtgtaatgtgtaatattaagtgtctgctttagttgtgtaagtcataagagtgtaagttttttgtgatgtgtctgcttagtaataagagtccgagtgtattgtgtaatgttaagtgttaaacttagttgtgtaagttgtgtgggtctattgtgatctctagtatgcgtctggttatgatgtgtgagtcaattatgatctatggctttaatgtgttagtgcattgtgatctctggtttagaaatgtgagtgtcttatgcatttgatccgtgtattcttgtcatgtctttgcaggttactcgtgacacatcttcgaggctgattcgaaagattactagagtatggacaaacaaatttgatggtgtcttctatagctggtcatgtgttccacgggatcgacgagaaatatactttctcgagtttgcggtatagttttttctcttgcattcacttaaatgtttagctgttaattatcttcactaacatcatgtctttgtatttgtagaaaacacaccattgggatcctttgattacaggaacagttcagtactattttgaagatatatgtcaaagacagatgaaagatatgattagcactgtgaggactagtcgagagtgtcctaaatggatcatcgattcccatatctgggaaacgatgtgtgcatactgggatactgaagaagcaattgcaaagagtctgacatattcccaggctcgcatgtctgaccgtaatgggctcggtcctcacatccatttatcagggccgacgtcctatcaacaaatccaatcagaaatggtaaataacttcttgttctctctgttatttgttttacatagtccattgcaagtttagatgttgtcttagtccttgttcatttttaacattgcaggaagaggaattaggaaggacagtgggtattggtgaggtctttgtcaagacgcataccaaaccagatggcacttatgtcgataagaaggctgagaagattacaaagaactatgagcagaaattgcaggagaaagtttctgaaatggaggcagagacttcaaatgtttcaaacggggaatcatgacctcgggagctcacatcagatgactgtactctcatcttcctacaggtaaagtttacattttcataattatggtctgcatattctcatgctctttagtaattgtttgtctctttcttttcacagtccacagagacagattcacgaggaaactattatggactgggcagtcttaaggagaatcttccggatctagtcactggaaaacgcaaacatttaggagaatcttcttctttcgtggcattgcaagtgcaactgaaggaagctcaacaaaaaatnnnnnnnnnnnnnnnnnnnnnngcaaaacgtgaggaagagcaaaccaaggttgtagctgagcagaaggacaagttggcacacttgtccttggttgagaagtatttgcgccaaactgatctggcctttctccacttcatcgactctcattcacctgaatcaactacagagcctatc

SEQ ID NO: 162913 - DNA, 2260 bp, Arabidopsis thaliana landsberg
atgcttagaggcatctttcacatttgcctcttggcctcatttcttcttctaccgttctcctccgccgtacatgatagtggcttcaccggtggtaccgatgctcctcctccgtgggaccataatgtttccccaccaccagaaaccgcaccatccccaacccccacctcgagtccctctacaacctcaccgccatctcctggaccggtggctgcgccatctccgatcaacaacggctctgtctccggggacatgacatggtggtgcaacaagactccacacgttgagacatgcaattactacttccggaagagctcacaaaacaacattaacctacgaccaccaaggttccggtccgagttcttacggatgctggtcaaggtagcacttgaccaagccgtgatcacacacagtcaaaccgttaagtttggaccgagctgcaccaacaaccaaaggaaagccgcttggtcagactgcgtaaatctcttccaaaacacggtggctcagctgaaccgaacgctcaagggacttaacccggcggcttcgagtgatgtcaaatgtacggacttcgacgcacaaacgtggctcagcacggctcagaccaacatcgagacgtgccgttccggatccgaggatcttaacgtctcggatttcgtcatgccggtgatatccaacaagaacttgtcggatttgattggaaactgcttggccgtcaatggagttctcatgaagcaacataatcatacgactactggtacgttctatgaatattataattactttgagtcaaagcaaaaaattatcaaaattacttcaattaattagattcctcatttacgaatatgcatgccaatttgttcaaatttatcgttttctgcttataagttgtctcgtaataaatttattttgatacaacaattataagtaaattaaagtgttacgtttaacgtaatctttgttcacacgtaatcagattaatcatgcatgaatactaatttacaccttaggctataaaattttattttcctccaaaatacacctttttcatgttagacggtatattaatttgagctgaatacggttaatatgtaacatgactttatctaacacggccaaattccaatttgtttggtttgtcaagctaaccacaaagaatacttcccaagctgggtttcaagacatgagagacgattactcgtatcagcctctttagcgaaatcgagtccccacctagtggtggcacaagacaggtccggccatttccggtcgatccaagctgccataaacttcgcagcgagaaggagattcaagtcaagatttgtgatatatgtgaagaaaggtgtttaccgagagaacattgatgtcggcaatgataaccacaacatcatgctcgtcggagatggcgagagaaaaacaatcatcacaagtggccgaagcgtccagcatggctacaccacctataactctgcaaccggcggttaaaactctatcttaaaatcttggctaaatccaactttaagacttctaatggtactaataagtcttttttcccaactcttttgaaggctttggaggccaaaggtttgtagcaaaagacatgacattcatcaacacggccgggccattacgtgggcaagctgttgcggttcgatcatcctctgacctctctgttttctaccgtgtcggtatccatggattccaagacaccctctacatccattcacaacgccagttctttagggaatgttatatctcaggcaccatcgacttcatcttcggaaatgcagctgttgtcttccaaaactgcatgattctcgttcgcctgccactcaaaggtcaagccaatgtaataaccgcacaaggtcgtactgatctatttcagaacacagggatctctattcataactcaataatcatacccgctcctgacttaaaaccggtggtccgtagtgttaagacatatatgggtcgaccctggatgatgtactcccgcaccgtggttcttaagacgtacatcgatagtgttgtgagtcctgtcgggtggtctccgtggactaaaggttcgacgtatggtctcgacacactgttctatgcggaatataagaatatcggaccggcttcatccacgaggtggcgtgtccgttggaaagggtttcatgtgttgagtaaagcttccgatgcatctgctttctctgttggaaaattcatcgctggtactgcgtggctcccaggctctggtatacccttcacttcagaactctaa

SEQ ID NO: 162914 - DNA, 2460 bp, Arabidopsis thaliana landsberg
aaaaatccaccattttcaatggaagacaaaatccagtcagatgatttcacttcccataaaaacccaactcttcctcaagtcattgaagagctaaaagagctctgggctatggttttaccaatcacagcaatgaactgtcttgtctacgtgcgcgccgtcgtgtctgttctcttcctcggccgtctcggtagcctcgagttagccggaggagctctctccatcggattcaccaacatcacaggatactctgttatggttggactcgcctcgggtctcgagccagtgtgtagccaagcctacggtagcaaaaactgggatctcctcacgctctctcttcaccgtatggtcgtgattctcttaatggcctctctgcccataagcctcctttggatcaaccttggacccatcatgcttttcatgggtcaaaacccggagataaccgctacagcggctgaatattgtctctacgcgcttcctgatcttttgaccaatactctccttcagccgttacgtgtttatctaaggtcgcagcgagtgacgaaaccgatgatgtggtgtacgctagcagcagtggcgttccatgtgccattgaattattggcttgtgatggtgaagcattggggtgttcctggtgtggctattgcgtctgttgtgacgaatttgatcatggttgtgcttttggttggttatgtttgggttagtgggatgttgcagaagagagtgagtggtgatggtgatggtgggtctactacgatggtggcggtggtggctcagtcgtcgtctgtgatggagttggttggagggttgggaccgttgatgagagtggcggttccgagttgtttggggatatgtttggaatggtggtggtatgagattgtgattgtgatgggtggttacttggagaatcctaagcttgctgtggctgccactgggattttgattcagactactagtcttatgtatacggttcctatggctttagctggatgcgtctctgctcgggtatgtatctttatactttctgttatgtgaatgtaactggtcaaaattatagttaaattaaagatgattaagtggtcaaaatttgagtcaaagctacaaagttgatttgagtcatgattagactaatgattagtgattaagtggtgaagatttaagtctagaaaactatttgactaagttgatttgggttttgcatttgaaggttcaaaatcatgaaacgtttgaatattaatttcgtttttttttaaaatgaattatgtggtgtttataattgatattggaaagagtggaagtaattatattaaattaaagactaaaaagacaaaagtcttggaacttgaaggtaccaaaacatttcagtagatgcaagaatgttttattcaagaaagatatgaacttttgttcttgtaattgacataagttcttttttctgtgtgtgtttttcgaggaccttattatgtgtttagaaggttctctgtttcctagtgattcgtattttgttcgagaaaattttgaattttgttcttgtatctaattatggatttactcaagggaagttcttagaaggctctttgtttcctagttgctgtttttttctttataagtttcttaacgctttttcgaaaagaagaaaagagatgataaaaacgtgcaatgtaatgggaaaatgttacatcaacttccattaataggtcactccgtggtatgtgattggacgttaacatacctaaaaataaaaatatataaaaaagtggttgaaaagagagtagtcaagtgtggtctattttattgttgccaatctcatgatactgttcaacctcattgatgtccttatctttcctttacacgtgacaaaagtttggcttcaataacttttttaagatttggtttcattgattttctcaggttgggaacgagctcggtgcaggtagaccttacaaggccagactagccgcgaacgtggctctagcttgcgcgtttgtagtaggagcattgaatgtggcttggacggttattctaaaagagcgttgggctggactattcactggctatgagccactcaaggtcttggttgcttcggttatgccaattgtcgggctatgcgagctagggaattgtccacagaccacgggctgcgggattcttagagggacaggtcggcctgcggttggggcacatgtgaatctcgggtcgttttatttcgttgggactcccgtggcagttggactagcgttttggttgaaaattgggtttagtgggttgtggtttgggttgctttcagctcaatcggcttgcgtggtttcgatattgtatgcggttttggcgaggacggattgggaaggggaagccgtgaaggcaatgagactgacgagtttggagatgaggaaagttggacaagatgaagagtcttcattgttattgttggatgatgagaagttgggtgatgttttgtaataa

SEQ ID NO: 162915 - DNA, 1033 bp, Arabidopsis thaliana landsberg
atggccttgaaattctctggtgcttataaacaatgcaagccatgcactggttcctctagtagtcccttgaagaaaggacatagatcatttccggattatgacaatgcctctgaaggtgttccataccctttcatgggtggaagtgctggttcaactcctgcttgggacttcacaaactcctctcatcatccagctggacggttagaatcaaagttcacttcaatatatggaaatgatcgagaatctatctctgcacagtcttgtgatgttgtactggatgatgatggaccaaaagagtggatggctcaagtagaacctggtgttcatatcacattcgcttctcttcccactggaggaaatgatctcaaacggatccgtttcaggtatttgaactactcaaaacaatctctatatcttcatggcattcaaagctggaacatgagataaaaactaaccattacttgtgtcttgttttgaaagccgagagatgtttgataagtggcaagctcaacggtggtggggtgagaactatgacaagatcgttgagctttacaatgtacagagatttaaccgccaagctctccaaacgcctgcaagatccgacgatcaggtaaacacatatatccttagatcccttagtctttcttcagaacaggatctatatgaatcttgtcttttaagccagagagggtaacacaagtttatatttcagtcacagagagattcaacgtactcaaagatggattcagcaagagaaagcaaagactggactccaagacacaacttcagacctccaggatctgtcccgcatcacttttatggcggctctagcaactatggaccaggaagttatcatggaggaccaccgatggatgcagcaagaaccacaacttcttccagagatgatccaccttccatgagcagtgctagtgaaatgcaagctgagtggattgaagaggactagcccggtgtttacattactatcagacaattatcagatggaactagagacctacgccgcgtcaggttcagg

SEQ ID NO: 162916 - DNA, 1444 bp, Arabidopsis thaliana landsberg
atggagaaaagggcagagaagagaaggattgtgttagttccggttgctgcacaaggacatgtaaccccaatgatgcagcttgggaaagcccttcaatcaaagggcttcttaattactgttgctcagagacagttcaatcaaataggctcatcattgcaacactttcctggttttgactttgtcaccataccagaaagcttacctcagtctgaatctaagaaactaggaccagctgagtatcttatgaatctcaacaaaacaagcgaggcaagcttcaaggagtgtataagtcagttatcgatgcaacaaggcaatgatatagcatgtatcatctatgacaagcttatgtacttctgtgaagcagcagctaaggagtttaagattcctagtgttatcttcagcactagcagtgctacaattcaagtttgctactgtgttttaagtgaactcaatgcagagaagttcttgatcgacatggaattgtttacaaaaactagcttattacccattatgcttacactccttatgttcaacataattttgttttgactttgcagagcatgacgtgcaaaacaaggtagtggaaaatatgcatccattaagatacaaagacttaccaactgcaacatttggagaactagaaccttttttggagctctgtagagatgtagtcaacaaaagaacagcctctgctgttatcatcaacaccgtgacctgtctagagagctcgtctctcacaaggctgcaacaagaactccaaattccggtgtatccattaggccctcttcacattacagcttcatcgacaggatttactgtgctgcaagaggataggagctgcgttgaatggctgaacaagcagaaaccaaggtctgtcatatacataagtttaggaagcatggttctcatggaaaccaaggagatgttagagatggcttggggaatgttgaatagcaaccaacctttcttatgggtcatccgacctggatctgtctcaggctccgaggggatagagtcattgccagaggaagtcagtaagatggttttagagaaaggatacattgtcaaatgggcaccacaaatagaagtactaggacatccctcagtgggaggcttttggagccactgtggatggaactcgacactcgagagcattgtggaaggagttccaatgatttgccggccttatcaaggcgagcagatgttaaatgcaatatatctagagagtgtatggagaatagggattcaggtaggaggtgaactggaaagaggagccgtcgagagagctgtgaagaggttgattgtggataaagaaggtgcaagcatgagggagagaacccttgttttaaaagagaagctcaaagcctctattagaggtggaggctcctcatacaatgtattagatgagcttgtcaagcacttgaagacagagtgaagaattaga

SEQ ID NO: 162917 - DNA, 3181 bp, Arabidopsis thaliana landsberg
atatcttgtagatttttccctgcagggaaaaatgatgagctctatagtctcatggtggtttttttgggtaatcagtgctgtatgtattctcaaagtggagtttaacattgtggaaggaggagcctatgaagagactaaggtatatattatgtaacaatttccttaattactcatggagacaaacgaaaaacgtttgggtaaaggaatgattatacatatataggtccacatagtataccttggtgaaaaggagcataatgatcctgagcttgtaaccagctcgcatctcagaatgttagaatccctactcggaaggtaccaacaaaccaagattagacaagtaaaacagtatgttgttggaaataaaataattagaagtaatatttaacagattttgtggaaatatggttgcagcaaaaaagacgctagtgagtccatagttcatagttatcggaatggtttctccggctttgctgcccatcttacggattcccaagcggaacaaatctcaggtgtgtacatctaatgactttttagtagaaagatataggaagcaaattagatcaaaggttaattaatgatttttaatcttcataattatgattagagcatccagatgtagttcaagtaacgcccaatactttctatgagctgcaaacgacaaggacatttgattacttggggctttctcatagtacaccaaaaggacttcttcatgaagccaagatgggcgaggacatcatcatcggtgtcttggactcaggttcgtttttcgatattaaatttccgacaattggacacaactagtatatacatgtacgtgtgtttgtaggtgtgtggccagagtcacagtcgttcaatgacaaaggcttggggccgatcccaaaacggtggaaagggatgtgcgtggacggtgaagatttcgactcgaagaagcattgcaacaagaagttgataggagcgaggtattacatggatagtctattccgaaggaacaaaacggatagcggaataccggacacggagtacatgtccgcaagggaaagcttgcctcacgggacccacgtggcctccacagctgggggatctttcgtctcaaatgtgagtgacaacgggtttggagtgggtacaataagaggaggagcccctagggctcgtatcgcggtctacaaagtgtgttggcaaagagtagaccgcacctgcgcaagcgccgacataatcaaagcgatggacgacgccatagccgatggagtggacttgataacgatctcaataggcaggccaaaccctgtgctgactgaagttgacgtgtataatcaaatctcgtatggagcattccatgcagtcgccaaaggtattccagttctcagtgcgggtggaaactttgggcctggggcttacaccgtccaaaacatagctccatggatcataacagtggctgccaccactctagaccgatggtatcccacacctttgacactaggcaacaatgtgaccttaatggtaaaccaaataaaagaaaactagctagtgtatgtgtagttgattctcttttgacatttaaatgcatgtgatcttctaatctatattactatgtaggcacggaccccgtacaagggcaatgagattcaaggagatctaatgttcgtatatagcccggacgagatgacgagtgcagcaaagggaaaagtggtgctaactttcacgactggaagtgaagaaagccaggcaggttatgtaactaaactttttcaggttgaagcaaaggctgtaattattgccgccaaaagaaatgatgtcatcaaagtttccgaaggtcttcctattatcatggtcgactatgaacatggatctaccatatggaagtacctaagtatcaccaggtagttattaaaaccatactgcttattttgacctttcttattatatgatttgcattgtgtttaatattgattgaataaccacttaattacagaatgcccaccataaaaataagttctgccatcgcgctcaacgggcgtcttgtagccacaaaggttgctgatttttcagggagaggacccaattccatatctccatacgttctcaaggtaaacttgatttttctgatccatataatgataacatattacccaattttaaatgatcgaataataataatgaaaaaaaaactctatttatcgatatttcttttttgcatcacacatagcaacattaactttttacagcctgatgtagcggctccaggtgtggccatagtggcagctagtaccccagaaagtatgggtactgaggaaggattcgctattcagtcaggaacttcaatgtcaacaccagtagttgctggtttagttgcactacttcgagctgtgcatcctgattggtctccagctgcgcttaaatcagctctcatcactacaggtaaactaacaccttttttttttgttttttgtttcttttttctgtagtttttgtttagcagaaaaccttatacaggtttgaatacgtatagtgacataataacattattaatacagaccgaattaagatattaagtcaagatgtgtatagtaattaatctaattagttactcatttttattggttaagcttccacaacggatccctacggagaacctatcttctcagaaggaatgacacgataactagccgacccatttgacttcgaaggaggactagtgaacccaaacaaagcagccgaccctggtcttgtctacgatataagcgcagaagactataggctttttctatgtgcatcccattatgacgagaaacaaataaccaaaatatcaaagacacatacaccatatcgatgtccgagtccaaagccttctatgcttgatcttaatttgccttccataaccattccattcctcaaggaagatgtgactctcactagaaccgtcaccaacgtcggacccgttgactctgtctacaaactcatcgttgaacctcctttgggtgtcaaaatctctgttacacccaacacactgctctttaactccaatgtaaagatactcagctataaggtcactgtctccacaactcacaaatccaactcgatttactattttgggagcttgacttggactgatggatctcacaaagtcactatcccattatctgtcaggacacaaatgttgatgtacttcgaccagtga

SEQ ID NO: 162918 - DNA, 665 bp, Arabidopsis thaliana landsberg
atgtttaggatagttttgcatgcatgttgcatatttgcgttgatttcaggtgatttggagctgttgacgagctatttggaagaagcggacctgatcacgacaaaccactcgaccaagaggtcgagtaggagcttcaggatctcaagagaccactcgacccacaggtcgagcagaggacatcaccacttcacttcaccactcgaccatgaggtcgagtgccctcatctccatcaccagaccatcactcgatcacttcattcgaccatgaggtcgagtgccttcaccttcactgccagaccactactcgacctcgtcactcaacctagaggtcgagtatcgccatcacaacacttgactgcatactcgatgacaagcttcagagccttcttcattccgcactcaaccagacactcgagcacaaggaagaaaagaagactccagctattcactcgacctctcactcgaccacctgggtcgagtacagttcttaacccgtccaaatacatcatcgttttgagtattagggtttcgggatattttgctataagtagcatgtacttctcattttcgcagacaagaagttttttacctagttttatttccgcagaccttgtgttctagactttttgtaatccagatttctcttcagtattcagcttttgttc

SEQ ID NO: 162919 - DNA, 1522 bp, Arabidopsis thaliana landsberg
atgaatattcagaaggacgattggatggatcgccgtaaaatcgtccgacgcaatacacagtcatcagcttcaacgtatgtactagagaagcttcacatcgatctcgtcatcgagatactctcaagattatctgcgaagtcaatcgcaatttgtcgttgtgtgtcaaagcaatggaattcattacttgtcagccaagatttcgtggaatcgttcctgagaagttcattgtctcgtccgcgtatttggttcaccttcagatttgacggcaagtggaacttcttctcatcccctcagcctcaaaaatttggtaataacttaagtgttgaagcaacagagcatcatatgggttcttatgagaattggtacatgaaaagttgtcaatctgttcatggatttatctttatgagttataactcaaagggaatgacagataggactcaagttatatggaacccttgcacgaggcagctcataactttacctaaactggaaccggagaatcttgattttaacagtttttttgcgtatgatccaaccgagaaacaattcaaggttttgtgcatgaccgtggttaataaacaacaaacaacctcctacaagtatcaagttctgacattagggacaggaccgttgttgtggagaaacatagaatgtccgtttatgtatcgtcttcataataaaagtaacagagggatatgcatcaatggagttttgtatttcataggttggatcaaatgtagtaccatgataataatttgcttcgatgttagctcagagaaatttagtttcataaaaatagaaaatgcattcattgtgactcttataaaatataggggcaagttaggtgtatatttagttgtttatggtagtcctcgtggtgaggtatgggttctagatgacaccaagaatgataactggtcgaagcacaactttgtttgtccatattcaggtcaggaaaattcaacgtgggcaactggtacgggtgaacttgtttggccgtcaagtccttggacccaaccattttatgttgtgtactacaatttggaaagacaaagttttagaagagttgacatcaaaggaatggaaaacaaggtgtccacgggtaaagatcgctatgacggatttttcaccttcacgaatcatgttgagaatttgatggttttgccattgcacaagaaaaccattcccattcaggacactctcacgaaccgggttatggagagggtgaggaagaaggagtcgttttctttttgttctaatagatgttgattcgttaattttacttacttagtagtaattgttatatatgaactcgcaggaaactctgacaagaagtcctttaacccaaactgcttatgcttcttcttactctaccacgagatcttacaagagctcagggaaaagatgctcggatcgaagcattggagaagacgagcaagatgatattggtgaaaaacgcggagatcaagcggcagaacgaagagaacgctcgacaaaacgtggaaaacatgaagttcattga

SEQ ID NO: 162920 - DNA, 3365 bp, Arabidopsis thaliana landsberg
atgactgcgtatcaattatttactattaaagcgaggaaactcttccacttcccccacgacttccaagacggttccatcatcgtcactggcttgcgtaaggtaaattcgctttactctctccttattacttttcacgcttcatttttcttttagagcaaagtccctttcttcttcctctctacattttctatccttcgaaccctcagtttactcattctctcacgatgaattctgaaaatgaaaggcccgaatccccatctttcgaaaatgtggttctagtaacgacctttgcacccggccgaacaatatcgctggtcctcactatcaatccacatgcactcttcaatccctcaatcgattgggagagctctgtcggattccggctgagattatgagagattcgcagatgtcggagcccactgaatcgccggaggaccaccgtcccgggttcttttgcgtctatgaaatctacttcaaaggctgcggactgaccttccctcttcctgaagccttggttcgatacttggccgctctcgaaatcgccctacctcagttgacgcccaatctcctccgcaccatcttgtgcattatcaccattgcggcggaggccggtttcgtcattagggttcccgaattgaatgaacttctcagtgttaggagttcgtcgaagaaaactgggtacttctcggcgtacccgaacgccaatcagaacctcatttcgaatctcctgaacaaggatgagaattggcatcatccttggttcctggtcaagaaaacccctgcctcgattggaaacctttccgatatgcttccatcgaagtggtctgcgaaacctggtagaaattaggtcacgtacgatttttgcttatccttgtttctgatttaatcgattttattgctttcaactcgcagcttttatcactctaaccctcccgaatttaaccgtagagttcgtcgaatttttcaagatcgtcattgaaggagagaccctttggaactccttcactctcgaccggttcatagaagccaatcacaagctcatgacgaatcctcccgggcaactacttcaacttccaccacctccacctctgcctcacggaacttctgctagggccatcgcttctcgtcgcaagactttatccaagtcgatgacagaggcttgtgaagcaaacatatcattccttcagtccacagtcgacaagaaggaatacagcagaactctcctggttgatgatggcagtaccgaaggggcaagatctggcggtgcttacagacccactcctcaccgcgaaggtcataacggccggtcatcccacaaggagcgatcccctcgacgtgactcaccccggcccacttcccgaactggactcagcagcgagccaattgctgacctgattcggaagaagagagacaaaccatcccgcagtagctcctcccccaaaagagacaagacgagggcccgaactgaccgctctcctcgaccgtcgccgccacccgatctatgggtcctcctcctccagtcaccgtatctccttcgtccggatcaggaggtgaaaaggcagagcggagtgctaaccctcggcgggatgaaactgaggtccgagatgccggaactaaagttgttttggttcctcagaccaagtcgctcacgggttagaaatttcctcccattttttgttatcacatttttaccatttcgccttattgactcagcattgttcgaccggtccgaccttttttaacagcgatggaaacggagggaaacgtctttcgatgtttcttaacccgaaaagacaccatcctaccagccttcgatagatggcgtcctgcaattcgcatgcaattcctactccacgcccatcactcatctcgggttagttcctttttcccacaatagatcttttaatctttgctcctttactctatcgctaaccccttctcgttattatctgatccaggcgaacagcgaactcaatgacatgattgagtactatgaaaggctactgcttgacagagaaaaagatgttatggcgtggaaggataagtcttcatctcttgagtctgatctccgctcttcaaatgataccaggctgaaattggaggatcaattggacaacctctccactgaaatcatgaagtccaacggtgagatgcaggagcagtaccaaaggtacgacaagatccaagaagaactctcaacttctcgggacagactttcggaatccgaatccagtgcctacgagttgtccaaccagctatccgagttgcagcttaagtacaaagcggtggccaactatcgggacgctgagttggcgagttcggcatcaaaggccaggaaagaggtgaaaggtcgcgggatagaattgatccaaggggcaattgtcttcatccaaaccgaaaaggctagaacgcagctggaatcatgaagatgacttttttgaggtacgagagtaatctcctccttttggaccaaactcatgaagatgacttttttgaggaacgagagagggacgagttgaagtccgtccaggaagagaagcaaaatcgtttagctgtccttccttcctcgtcgtttaaccctcagcagttcgaggagttcttcaccgaatcgcctcctttgagcgaatccggtttagactaggctggtaaattccaactcttctccctttttcttaaaaaaaaaaaaaatcgatccacagcgaattactcttatgttaacccgaagtaattgcctcaggtgttagcggttccgtggaacccgaaagtgcctatcgcgccggcgtcagttctggagacggtaatcactccgcctaaaattcttccatccacgaactcggagatagtggttatcgaggatgatgatggctcagagtccgtggttcctggcgagcagcctgctactgatgagccgggtgagactgagacagctgccgcagatcctgagtcagttcgaaccgaacccgagatacccgagaactcgtagtggctgtgtcaacttctcggcttgtcccttaaactcgaaatttactattgttttttttttaattactttacttgcctaagtaggctttaaacaaatactttgcctaaggaggcttttaaacctttcctttaagactacgatcccaagagggttttctttgtgctaatcttgagtatggatttgcaaagtccatttgtttaaatagcgtttttgtttaaccatgtggtcaagttacgggacttgtaggttgatcagacctatccctaaaaatgcggactttaatccgcgaactccccaactttataacctaaatcctactttaggcttccggaatccggttgcggttctagttcttatgctcaatgatacacaaagcatctag

SEQ ID NO: 162921 - DNA, 3845 bp, Arabidopsis thaliana landsberg
tgtgttggtgaaggtacttgttggttggatgaaatcgctgtatttaagcgagcaacaagcaggtgaaccagagaaaatgaaatttctcggggaaaaaggtagattttctcgagaaaacggaagggaaaataaacgttcggtgagattggagaaaagtgttgaaataacagtgacgccaaaaacgacagcgtttaacacggagaagagaaacacatgcgagctttcaaaggtaagtgattaatgataagattatagttaacaaaatctttaatcattttcacttaatctgcgtaccatttaaaaacaaaaatatacaactgtttatgttgtatctgttctgaatcatattatctgtgatattttaatacagtttataaagagatttgtttctcttctaagagaaaatttatatacacatattaatcaaatcacatgagtaaattaaaatcccccctgattcgtggtttgtccaggttattttttcgaccaagtttagttttattttggaagaaaattttacaaattcaattattcaaaagcacatggtttgtcgatttggtatcaaagactatatataatatatatattagcccaacaatgttggagaattaattatgggattcaaaatcctcaaacctcttgacaagaatccacaaaggaaactgttactccgagtctaatcttcttggagctggcagtggcaacaaatgaagttctagccatgcttggctaagttttctcaaaggtaattaacaaagtgctcactcaaggttcgaaatttgggaaatggtaaacaagttcacgtatgagagataactggttacatacaataccatttacgcatggtagaaatggtttactaattttgattattctaaccaacaatcaaagatcagtatatctttactatatacagtgttagtattattataaatatatgtttcttttcagtgatttattcggtctgcaaatcctcgttgacaagtaaagagtcgtgacaaatcagtatttgactgtttctatcgccgtcgtcagtcaatggtaaaatatgcaaatagtgagggggtaaatctgacatttcataaccaaaaactcagcacctataaaaccgtcaaattagattccaacaaaactcaacctgacattttttctcctgaagagaaaagtcgaaaaaccaacagaagaatttgaatttctcatctcctctctcgaatatgtctgagtcaagaagatcgctgatcccgagctttctctactcgtccgatcatcgtctttttcaggcgacgaccatgagtactcaccttaaatcacagccgttgatttctccgactaattcttcagtctcatccaacggtaccagtttcgccatcgcgacgccgaatgaaaaagtggaaatgtactcgccggcgtatttcgcggcgtgtacggtcgccgggatgctgagctgcggtatcacccacacggcgattacgccacttgatgtcatcaaatgcaacatgcaggtgaaagttccaagccaacttctctatttgtagttaacatttttaatacgtatgtgataagtaaaatatttagtgagaaaaacttgaatatagaaattattagcggaaaaaaaacagcgaataacaatttttgtttttgtcaacttttacgttttcttgttttacacggcatcgactcttcaacgccgtcgaagacttttcaatctcatgcatgattttgatgttcactcagagagaatattccacgaatttccaaaaaaggcccttaattctgttgttatttcagattgatccactgaagtacaagaacataacttcagctttcaagacaacaatcaaagagcaagggcttaagggtttcaccagaggctggtcaccaacgcttcttggttacagtgcccaaggagcttttaaatacggtctctatgagtacgccaagaaatactactcagacattgttggaccagaatacgcagctaaatacaagaccttgatttacctcgctggctcagcctctgcagaaatcgtcgctgatgtggctctttgtccaatggaagctgtcaaagtcagggtccagactcagcctggtttcgcccgcggtttatctgatggtttaccaaagatcatcaaatccgaaggcttccgcgggttacacaaaggacttgttcctctctggggacgccagattccatgtaagtctctatacacaagaaaatgtagtagagtcattgagatgatgatttcagtaaaagaaaattcgacgtctttgcagatacgatgatgaaatttgctacttttgaaaacactgtggagctcatatacaagaaagtgatgcctaccccaaaagaagagtgctcaaagccagttcagctcggggttagctttgcaggtggatacattgctggaatattctgcgccatcatctcacatcctgcagataatttggtgtctttcctcaataactctaaaggagcaaccgttgctgatgtaagtaaaaaagctccatactcttcaccacaacatcaaacttgtggacacacaacacagagctttttatatgatctgctgacttggtttgattatttcatgtgctacaggcagtaaagaggctagggttgtggggtatgttaacccgtggccttcctcttcgcattttcatgataggaacactcactggagcgcagtgggttatctatgatgctgtcaaagttttagctggattgtaagttttcatcatcaatactcaattcatttaagaactaattatgaaagacactccatcagttaactataattttatcattttattaggccaaccactggtggtgcttctccagctactgcgcttgctccatctgtaagtgcataaaattacaagaatattcctcgcgtagccgtcacgttagagaaataaaagggaaacagtgctaccaatgattgtgattaaatattaagctactggagatgaaatagtgcaaaaatggagtggactacatacatgtatctaatatggaaggcaggaaaaatatgatctgcggtacatgaatggaaccaatttaagagggacaacaactcttgagatgggctgacttgaaagatttgtggaactttttaacattgaatcattgatacattatgcactcttataaagctatgaaaatgatataaaaaggtaaataatttacatatgcccatgccctgatccattgatctaggcgctaggcttctaccaatttattaaacatattccgaaaaccgaagtaacaaaaaaaagttgcattgtatcacaagttaaaaacacaaaaaagcttcatcttcttccatcaactgtcgtcagagaaggtaatcttcttaccgcaagataccctgaagatttccgtcttataaacaccatagagcttcatttcttattcggttaggtctccaaatcatctttttctatcagaaggctgtcttgtccaaggtagtcttcgtacctggaataacacaaaaacccttctgatctctccatgtttaccaaaaacttcacccagtgtgcctcttgataacaaacttatgaggcaaatagttaaatcccttaccaaagcttctttgcaagtttgtacctaatgaacagaaataatagcgttaaacttctaaaatgacatcaaaactctaagcaataagctagagaaatgaaaagaagggtctaccttggcgagtcaagaagaagaaacagagtcagaggaagaagaagaagacgaggacgatgattttgactatagcattctgagtgatgagagcagtatcggttactcggaacagaaactttttgttaacggtactcaagtcttgacagactga

SEQ ID NO: 162922 - DNA, 2046 bp, Arabidopsis thaliana landsberg
atgcatcccaaatgcatggcgagtcttggcaatcttgaccgtctaatggaggagcttaccggaccaatcactactctatggatcactctgccgccttcgttcagaaccggctgcaagataaccgctcgatttgcccattccaccactgcgtaccatctcttggagatcaacgcgtgggaggacctcactcttctcatccttatggagttgcccgacatgaagatctcagatatgaccaaggatacttgcaagaggtgatgagtgtagatgtttatccgaacaactatgcttaccaaactaatgagccctaccagaccgccgaggcggaagatagactgattggtctcatccgagacttcgtcttgatgaggatcaactcaaggatgatggagatatataagagccgaatttggagagaagtttgatgacctcactattcgactcgagatcatggaggaggcgcttgttgagattaacaacactctccttaaccaccaagatgatatccaagaacaaaacactagaatcgtcaatgtggggttcaccgtcgatattgttgagagccatctagattggaagattgaggagctagagaagaagctcacttactcaaatgagatttcggaatggagaagcattcaatcttgccaagaagaagataagtctcttaaggaccaagcccgttatgaggaggaaacaaaaaaggaaatcgaattcctagtggaaaacggaaaaaacctagtttccttttccgaaaaaggaaatcccgaccctataagacccttagggatttcgaccccttttgtttctcctcaagaccaaatcgagtaagaagaggacttagaagaagaagaagccatctcattagaagaatactagatggccgatacctactctaatggtgagagctacataactcaagaagggcatgaacagtccaatggccttaaggatcggactgatgattgttcaagaagtgatgatgggctcaccgattcttcgagagaagaagccaattacgcaagattcaaggacagcctactactgcatgactatcatgattcccgatgaaaaacgctctcgaagaccatggtttcggacaacatgaacccttaaaagaaactattattagaggaaacgatgatgttgccccgcataatgcttccccgcccttgggaagaggaaagagcacgggcaataaaagccaaggaggccaggacccgttcagcttgaactgatccgttcaaccctttcgccacctgatttcgtctctacaagatcactctcacgtaccatggagacaaaagagtcagacttgaaagccaatacttggactaagaagcgctagacacaaggactctccacttcaagatggataaggttgatggcattctctcaagtaagatcgatgagctttccttgagctttagaagaatggaggtcaagctcacgaaagaagttgtcgccttgacaaagacggtacaaactctagaaaagagcagaggaaaggatctagagtataaccaaggaagtgcccaaaccatcggagaattggccatccggatagccgaggaagagtaggatcacgactcgaccgttagagagctccttgacaagaatgcggtcttgaaagaaagactccgaaaacttgaagagagagctaacaagaacgaagagaaactccatgaggaaatctttctccttcgtgagctagtcgactaccaaagcgaagccgaaaagaatcatatgtctgatttcaaagttctctttcgtaacaatttaagttcggcgactcagatgaagaactatgaggacgaggctaagacgaccatggtcaagatcgagagtctagaagatagctataaacttctaatcgagacaatccatgtcgagttcgataagtccctcgacctgttgcgtgggataaagtctaagttggaacctaaggagacgacctttaacgaggcgattgagagattggataagaagtacaactcattactcctacgtgctgccatctgtgaggaacacatagaagagaactaa

SEQ ID NO: 162923 - DNA, 949 bp, Arabidopsis thaliana landsberg
atgaaagacatggttagcacgataaggactagtcgagagtgtcctaaatggatcatcgattctcatatctggaaagcgatgtgtgagtattgggatactgaagaagtaatagcgaggagtcagatatattccaaggctcgcttgtctgaccgtaatgggctaagtcctcacatccatttgtaagggccaaagtcatatcaaaacatcaaacatgaactggttattaacttctatctctgttgttttttaatgtgtctctgtcttaagttcagatgttgtattaagccttgttcatttttaacatcacaggaaaaagagttaggaaggacggtgagtgttggtgaggttttcataaagactcataccaaaccagatggtacttatctcgataaaaaggcagagcagattgttaaaaattatgagaagaagctgcaagagaagttgtcttaaatggaggcagagacttcaaatgtttcagacggggaatcaagacctcgggagctaacaatataggatcatactgtcatctttctagaggtaaagtttacattttcacttgcatattgtctgcattttctcaaactctttattaatggtatggctatttttttcataggccacaaagacaaattcaagagggaactattatgcagttggaagcctcaaagataatcttccggatctagtcactggaaagggcaaacatgcagcagactctacctcctttgtgtcattgcaagagcaactgaaagaagctcaacagaagatcgaagagcaggctgctcatcatgctagacgtgaggcagagcaagtccgagctgtggctgaacagaaagacaagctggatcacttggccttggtggaaaagtatttgcgccaaactgatccagactttctcacctttatggctactcattcatctgaagcaaccacaaccgatcctatctaa

SEQ ID NO: 162924 - DNA, 868 bp, Arabidopsis thaliana landsberg
atggcgggagagactctacttaaaccggtgcttcaaaaaccaccaggctaccgtgagctccactcgcaacctcaaactccactcgggtcatcttcatcatcatcatcaatgcttcgtcgcccaccaaaacatgccattcctgcggcgttttatccgacgaagaagagacgatggagtcgttgccgcgtcttttgctgctgcgtctgcatcaccgtcgccattgtcattctcctccttatcctcaccgtctccgttttctttctttattacagcccgagactccccgtcgtacgtctctcctctttccgcgtcagcaatttcaacttttccggtgggaaagccggcgacggtttatcgcagttgacggcggaggctacagcgaggcttgatttcagaaaccctaacgggaagttacgttactattacggtaacgttgacgtggcggtgagtgtaggagaagatgatttcgaaacgagtctcgggtcaacgaaagtcaaaggatttgtggagaagccagggaatcggacggttgtgattgttccgataaaagtgaagaagcaacaggtggatgatccgacggttaagaggctaagagcggacatgaagagtaaaaagttggtggtgaaagtgatggctaaaacgaaggtaggattgggtgtgggaaggcgtaagattgttacggtgggggttactatcagttgcggtggcgtgagattacaaacgcttgattcaaagatgagtaaatgcaccatcaaaatgcttaaatggtacgtacctatccaagttaaatgtatatgaaatctattttaatgttcatcttgaaaattagaatattaatgttgtgtttctaatttcaatgcaggattaa

SEQ ID NO: 162925 - DNA, 840 bp, Arabidopsis thaliana landsberg
  unsure (1)..(840): unsure at all n locations
aggannnnnnnnnnnnnnnnnnnnnnnnnnnnnnnnaataactaccagctttgcgacgagatcggcagaggtagattcggaacaatcactcgctgtttctcaccggcgactaaagaattctacgcctgcaaaaccatcgacaagcgcgtgctcaccgacgcgttagatcgcgagtgtatagagacggagccgaggatcatggcgatgttaccgccgcatccgaatatcatcaggatcttcgatctctacgaaacagaggattctcttgcgatcgtcatggaattagtcgatccgccgatgacgatttacgatcggttaatctccgccggggggaggttatcagaatcagaatccgcctcatacgcgaaacagatcctccgtgcgcttgctcattgtcatcggtgcgacgtcgttcatcgggatgtgaaacctgacaacgtcttagtcgatctcgtaagcggcggtgttaagctctgtgatttcggatcagcggtgtggttaggcggagaaacggcggagggagttgtgggaacaccgtattacgtggcgccggaggtagtgatggggaggaagtacgacgagaaggttgatatatggagcgctggtgtagtgatatacacgatgctagctggagaaccgccgtttaacggtgagacggcggaagatatatttgaatcgatattgagagggaatttgaggtttccgccgaagaagtttgggtctgtatcatcggaagcgaaggatttgttgaggaaaatgatatgtcgcgatgtttctcgacgattttctgcagaggatgctcttcgtaagtcatcttttttttctcgatttttttttttt

SEQ ID NO: 162926 - DNA, 2728 bp, Arabidopsis thaliana landsberg
acaagtatttaaatcattgtcaatatatttcgtttctccttattatacgatctttcttacatgatgataatgatgatgatgatgatgataatccatgaaggtgtatgttgtctatatgggctcacttccgtctcaaccaaactacacaccaatgtcgaatcacataaatattcttcaagaggtcaccggagaaaggtgtggttttattaattcattctctaatctatgattggttataattagtttacgttatgaggattataaaagtgatatacacatatgtatactatagttccatagaaggtcgtttggtgagaagttacaagaggagtttcaacggtttctcggccctactcactgagtcagaacgagagagagtagccggttagtgttcttagatcgagacacattttatgttgaaatgtttttaaagatttaaccatttgaaactcttttgtgttgttagaaatggaggaagttgtgtctgtgttccggagtaagaactacaaactccaaacgacggcgtcttgggacttcatgggaatgaaggaaggtaagaatacaaagagaaacttcgccgtagagagtgatactattatcggtgtcatcgacagtgggatttggccagaatccgagagcttctctgataaaggctttggtcctcctcctaagaaatggaaaggtgtttgtaaaggtggcaaaaactttacttgtaacaagtaagtcattaaaatttctctaatagaagattagtattgttttaggcagagatttatgtgttcacaatttcagcaagttgatcggagcaagagactacacaagcgaaggcactagggacctccaaggacatggtactcacacaacgtccacagcggctggaaacgcagttgcggatacaagcttctttggaataggcaatggaacagcgagaggtggtgttccagcctctagagtcgcagcttacaaagtctgcaccccgacagggtgtagttcggaagctctactgtctgcattcgatgacgcgattgctgatggagtagacctcatcaccatctctatcggagataaaactgcgtccatgttccaaaatgacccgattgcgatcggggcttttcacgctatggccaaagggattctcactgtgcactcagccggtaacgctggtccgaatccaaccacagttgtgagcgtagcgccgtggatgttaacggttgcagcaaccaccaccaaccggaggtttttaaccaaagttgttcttggaaatggcaagacacttgttgtaagtatcaagtaacattctcattttcatcatcatagtatctttgtcccattaaattaccaattggtttttcttaacaggggaaatcagtgaatgcttttgatctgaaaggaaagaagtatcctcttgagtacggagattatttgaacgaatctctggtgaaaggaaagatcttggtttccagatacttaagtgggtcagaagtagctgtttcattcataactacagacaacaaagactatgcatctattagctctcggcccctctctgtcttatcacaagatgactttgactctctcgtctcttacattaactccacaaggtacctagcagtcttctttctatttcattactcttaatattctccttctttgtcctctgatacccttgtgtttgctttctcaggtccccgcaagggtctgttcttaaaactgaggcaatctttaatcagttatctcctaaagttgcttctttctcttcccgcggtccaaacactattgcggttgatattcttaaggtatcatattatttatgctcttgattctttctttttttttcctggcctgagagacaatggttggtggatggattgcagccagatatatcagcaccaggagtggagattctcgctgcgtattcacctttgagtttaccatctgaggacaggcgcgataaaagacgtgtaaagtactctgtactgtccggaacttctatggcttgtccacacgttacaggcgtggctgcgtacatcaagacatttcatcctgattggtctccttccgtaatccaatctgccatcatgacaaccggtaaacaaaagtccaacttttactttcttgcatcgcaagtaacttgtgttgacaactctgttcttatactgtctcttaatgaatctttgcagcttggcagatgaatgctactggaactggggctgaatcgaccgagtttgcttatggagctggccatgtcgacccaatagccgctataaatcctggacttgtctatgaattagacaaatcagaccacatcgcctttctctgcggcatgaactacacttcgcaagtcctgaaagtcatctctggtgaaaccgtcacttgctccgaagcaaaacaaatcctaccaagaaacctcaactacccttcaatgtctgccaaattgtcaggatctggtaccaccttcactgtaacgttcaacagaaccttgactaatgttggcacgccaaactctacatacacatcaaaggtagtggcgggtcacggatctaagctcgacgttaagatcacacctagtgttctgtcttttaagactgtgaacgagaagcaatcttttacggttactgttaccggcagcaatctcgactctgaagtgccttcgtctggaaatctgatctggtctgacggtacccataacgtgagaagtcccattgttgtttatactagtgattactga

SEQ ID NO: 162927 - DNA, 1272 bp, Arabidopsis thaliana landsberg
atgtatatatctacaaccatagtgtttggtctctttgttgcaacactccttgtgtcttgcaatgcggatgcaaacgccacgcagccgcttttcccggcgattctaatcttcggcgactcaacggcagacacaggcaataacaactactactcacaagccgtcttcaaggctaatcacctcccttatggagttgatcttcccggccacgaagctaacggaagattctcaaacggaaagctaatctctgacgtaatctccacaaaactcaacatcaaagagtttgttcctccgtttctacaaccgaacatctccgaccaagacattgtcactggagtctgttttgcatccgcgggtgctggctacgatgacgagacctcactatcgagcaaagctatcccggtctcacaacagccaagcatgttcaagaattatattgctcgtctcaaaggtatcgtaggagacaagaaagcgatggagattattaacaacgctttagtggtcataagcgcagggcctaatgatttcatcttgaacttttacgatatccccataaggcgtctcgagtatcctactatctgtggctaccaagattttgttctcaagaggcttgacggttttgtccgggtaaaatcttgaaattttttgttttcatggtctgggaccagattatttcatggagctatatttgtcgtgctgactctcgaatcttttcttcttgtgtgcaggagctttatagtttaggttgccggaatattgtggtcggagggttaccaccaatgggatgtttaccgatccaaatgaccgcgaaaatgagaaacattttgagattttgtgtggaacaagaaaacaaagactccgttttgtacaatcagaaactagtaaagaaactgcctgagatccaagcgtctctaccgggaagcaatttcctttacgccaacgtctacgacccattgatggacatgatccaaaaccctagtaaatacggtatataccatttcttccttgtaacgcaagttatctaaatctcaatcttaataatttatgcaatagatactcattgtggtacacatgaaaacaggattcaaggagactaagaaaggatgttgcggaacaggatacttggaaacaacattcatgtgcaatccccttacaaagacttgtccgaataactccgatcacttgttttgggactcaattcatccctcggaagctgcctacaattacattggcaactttgtggatgctcagattcgaggctggattaaggcttaa

SEQ ID NO: 162928 - DNA, 898 bp, Arabidopsis thaliana landsberg
taaacaatgctccggctaagcaacgccgccgtaataacaaccaatgcaattctcgcattgatcggcctcgccgctctatctttttccgtctacgttcaaggcccatcacagtgtcaacgtttcgttcaaaaccctctcattgtaactgcggctctcctcttcttcatctcgtccttaggccttatcgctgctctctacggtagccacatcatcatcacactctatctcttcttccttttcctctccattcttctgcttcttgtcctctctgtctttatcttcctcgtcacgaatcccaccgccggaaaagcgttatccggtagaggaataggcaatgtcaagaccggagattatcagaactggatcgggaaccatttccttcgtgggaagaattgggaagggatcaccaaatgtttgtctgattctagggtttgtaaaaggtttggtccacgtgacattgactttgactccaaacatctctctaatgtacaggtatgtgtttatagtatacatctataggattcagattgtttcactaacaatgtagtaataaaagtggttttttgttttatgtttcttttcttttagtttggttgttgtcgacctcccgtagaatgtgggttcgaatcaaagaatgccacgtggtggacagttcctgccacagcgactacggcgattataggggattgtaaggcatggagtaacacgcagagacagttatgttacgcgtgcgagtcgtgtaagattggagttttaaaagggataagaaaaagatggaggatacttattgtcgtcaatctccttcttatccttctcgtcgtttttctttactcgtgtggctgttgcgtgagaaagaacaatcgtgttccatggaagcgccggttcttctaacaactct

SEQ ID NO: 162929 - DNA, 1625 bp, Arabidopsis thaliana landsberg
atggcagaactcatcatcgttgactttcaaaacatatctatcttcatcctcttatgtctcttctcattcctttgttacgctctcttcttcaagaaaccaaaaggctttgacctgcctccgagccctccttctctaccaatcatcggtcatcttcaccatcttctctcatcatctctaccacacaagtcctttcaaaaactctccttcaagtatggacctcttctctatctccgcgtcttcaacttccctgtagtcctcgtctcctcggcgtctgtggcctacgagatctttaaggctcatgacttgaacatctcatctcgtgacaacccttcaatcgatgattccctcttgattggatcttctgtctttggtagtgctccttatggagattactttaagttcatgaagaagctcctggttactaagctgcttggaccacaggcacttgagcggtcaagaggcatccgtgcagatgagcttgagcggtttcactcaagcctgcttgataaggcggtaaagaaggagatcgttgagattgggaaggaagcaacgaagcttagtaataacagcctctggaggatgagcattgggagaagtttttcagagaagaatggtgaggctgagagagtcaggggactggttactgagttagatggcttgacaaagaaggtcttgtttgcaactttgctgcacaggccccttgagaagcttggaatctctctgttcaaaaaggagatcatgtgtgtttctgacagcttcgatgaggtccttgagagggttcttgtggaacatgaacagaaactggacgatcatcaagatagggacatgatggacgtgttgttggcagcttatggagatgaaaacgcagagcataaaatcagcaggaaccacatcaaagcatttttcgtggtaaatgttcctctcattaagctgaatttatttgaggatcaaaagtgctcttactaagaaacgttttgtaactgcaggagcttttctttgcgggtactgatacctcggcgcaatcaatacagtggacaatggcagagatcattaacaaccccaacattcttaaaagattgagagaagaaatcgattctgtggtagggaaaacaaggttgattcaagaaactgatctaccaaagctcccctatttgcaagctgtggttaaggaaggacttagattgcacccgccattgcctctctttgtaaggacgttccaagaagggtgtaagattggaggtttctatgtaccagaaaagacaacacttattggtaatgcttatgttatgatgagagatccgagtgtctgggaagaccctgaggagtttaaacctgagaggtttctatcttcttcaagatcaacgcaagaagaggaaagaagagagcaagcacttaagtacattcctttcggtagtggacggagaggctgtcctggatcaagtctgggttatatctttgttggcaccgcagttggaatgatggtgcaatgctttgactggagtatcaaaggagacaaggtccaaatggatgaggctggaggactaaacttgagtatggctcattccctgaagtgcactcctgttcctcgaaaccggcctttacttgctgatcagtagatgccaagt

SEQ ID NO: 162930 - DNA, 1934 bp, Arabidopsis thaliana landsberg
atggattctgagggagtgttaatgccgttggtccatgaacatcttatgatgccttggaatgatctaaggaaaggtgattgttgtggactctcgaaagctgtcagtgttggttattattgcaaaagctgcgattttttcgcccacaagaaatgtggcgagtcctccgagtttatccaacatccatctcaccccaatcacactcttcagcttcgaagtagcgaaggctgtaatagctgcaatttatgtggaaggaccattagtgacctattctatcgttgtgatctctgtgatttcgacgtggatctatattgtgccaagtatccaccaccagaggttattgacattcctgagacgcatcaccacaagctcaaccttcacaaggagttgatcgagttcaactgtgatgctaaatgtgggaagattactggtgctgagtttccttacgtatgttatgaatgtcaattacctttccatgtggattgcgtatggcggccatcggagttaaaacacccatcagaggtaaaccattcttaccactccttacaccctcttaagctcctctcaggtcaattaccggataattgtgatggaaaatgtcgtctttgcgcaagaaagattgatgatagattgttctatcattgttctccgtgcaacttcaccttggatctacgttgtgttttaaacccaccacaacaatctcttctgaatttgaaagctcatgatcatcaactcacccttctcccaagactcttgtcatttacatgtaatgcttgcgggttgaatggagatcgaagcccttacatatgtgtttagtgtaatttcatgattcatcaagattgtcttgacttaccacgcgtcataaacattaatcagcatgatcatcgtgtttctcgaacttctcttctcggtgttgtgaattctgtatgtggaatttgtcacaagaagatggattggacttgtgggggattttcttgtcagcggcgttcattcgaaatgtgcaacaagatatgatgtgtggaacggaaaagaattcgaaggagtacctgaagaaacagaagatatagaggcatatgtggtaatagatgacaacactatacaccaattttagccacaaagagcattaccttagactccatgttaatggttttctttgagatgacaacaagcgatgcaaggcatgtacccatcccatctgtctccaatccttctatggttgtatggattgtgacttcattcgccacaaaaattgcgctggatttcttagaaagaaatggcatgttctacacaatgagcgtcttactttagttactaaggagactacagtttttaggtgtaaagcttgtgatagattgtccaatggtttcaggtaccagcatgcaaacaagacattcgatgttttgtgtggttcaatatctgagccgtttgtccatccaagtcatcccgatcatcccttatataacatttcagaatatgaaaggtgcaatggttgcaagaatagacgttttggtgtgctaagatgcattgaagatggttgtagatttgtcttatgcttcaaatgcgccactctaccacaagtggtaaagcatagagttgacaatcatcctctctcactatgctatggcgaaaaggctagtgacaaattttggtgtgacatttgtgaaaaagaaaccaattcagagacatggttctacacgtgtaaagaccaccgggctagtttacatataatgtgtgtgctcggaaaatttttagggctcatgccaacaagcacattaaggcgttggagcagatcatataaggttgtgctcaataatagtgtatctcgtccattttgcagctgttgtcagttgcgttgcatttttcctatcatcttgaagagacttggaacctcctcacaagaatactgttgctctccttattgcgcttatgaaatgagt

SEQ ID NO: 162931 - DNA, 2179 bp, Arabidopsis thaliana landsberg
aacgtgttggtcataaaatattaaccagttaccagattctttgctttgtaagatatttttcaatcttcccacggaggaggtggtcaagactagccttatatgtcgcagatggagatatgtttggcaatctttgcttgggttggatttggtgatcaatggctccaaaaattatgataagttcgattttctcgaaaggtttatgttcttacaaagagttaagctaaggtatgttggatatggtcacaattgtcgaaacatgacgtcgatgatgatgaacaatgtgattaaacataaaattcaacatttagatgttggtagtaatagaaggtatgtatatgatagagttgagatacctccaactatttatacatcatgtgagagattggtattcttgaagctccatcgtgcaaacttgcctaaatcgccggattcagtttctctgccttgtcttaagatcatggatctacaaaaaatcaactttgttgacagtttggatatggagaagctggtctcagtctgcccagccctagaaaccctaactatggacaagatgtatggagctaaagtctcatctcagtctctattgagcttctgtctaaccaataatgaaactggctatctgaaaacacaagttgtaatgcaaaccccaaagctcaagtatctaaagctgaaccgtcagtttattcaaagaatcgttataaatgatttgagttccattgtcatgttgaatcttgatgatgtggcttattttggtgaaaccttgcttagtattcttaaactcatctcttgtgtcagagatttgactatctcctttgacattcttcaggtaaactatctatcttgattctctctaactatctatataagcgtttttttctttttcttttgaatgtgaaaagttgtaacatgcattctccttttgtaggattatcgtcacttctcgaaatcgaaatcactaccaaaatttcataaactttctatattgagcgtcaaggacatggtggtcggatcttgggaatctttactaatctttctcgagagctgtcagaatttaaaatctctcgtcatggtatgtatttgttctgtttaatcaactaactaattgaaactcatattctgaaaatattggatatactaaacttgtcttcttttgtttctctactttaatttgcaggggtttcgagattataactggggaataaatttttcagatgtgccccaatgtgttttatcatcgcttgagtttgttgaggtaaaagcaagagaggtggcggatatgaagaaactatggagttattttatggagaattcaacagtgctcaagaaatttactctatgcttagatcatatagaggatcaacgtgatcatgtgatgctcagcaagctctttacatttccaagacgatctaacaaatgtgaagttgttgttcgcttgagaacatttggaacatacaagcccatgtctatgttttcttgtgctgatggtttctgacctttctgctgagagaaagactaattttggctttgagcggttttgaattttgaatgatttggtctaaggctttggtatgtaataatgttgtctcaaatttgagcatttttcctcttcggacatagtagacgacaacagacaatctagggtttccatttttcttttgacgtctacaatgattactgttttcctcttcggcagaatcagaaaccctaaattgttccttggtaaatactctttcgtgtttatattttttcaactccgggtaattaaatcatacgtcttcaaaagacgtgtgtcttcgatttagattttaaatttcagaattcatagatgacgtcagagaagaaatctgtaagtgatataaagatttgattaaccaactatcagatttcaaacttggtgggaaatgttgccaaccttccttgagagcttcccgaatctacactcactcgtgatggtgagtttcatttgcatctgccctcatgtaaatcacactgcgtgtcatttttaatagcaaaaactcacacttcactcggttatatatgttctcaggaatttgattgttttccagacaaaaagcagatggatctttcatctgtgcaacgatgtttcatatcatctcttgactttgttcacctcaagacaccgtttgttgtaaacaggaaaaaggaagggagacatcaa

SEQ ID NO: 162932 - DNA, 3207 bp, Arabidopsis thaliana landsberg
ttgcaggtttatgcatccgggggttcaagctggattatcgacagcggatgcataaaccatatgacgggggaaaagaagatgttcacctcctacgtcaagaataaagattcccaagattcaataatattcagtgatgggaatcaaggcaaggtaaaagggttaggtaaaattgcaatctcaaatgagcactctatctctaatgtaattttaagttgagtctcttggatataatttgctatctgttagccaattatgcaatatgggatataactgcttgtttacaaatgtagatgtgtctgtttttagaagatgtgatggttcactagcttttaagggtgtattagacggcaaactttacttagttgattttgcaaaagaagaggtcggtctagatgcatgcttaattgctaagacttgcatgggctggctgtggcatcgtcgcttagcacatgtgtggatgaagaaccttcacaagcttctaaagggagaacacgtgataggtctaactaatgttaccttcgaaaaagatagaccttgtgcagcttgtcaagcaggcaaacaggtgggaagctctcatcacaccaaaaacgtgatggccacatcaagacctttggagatgcttcacatggacctcttcggacccgtcgcctatctaagtataggaggaagtaagtatggtcttgttatagttgatgacttttcccgcttcacttgggtattctttttgcaggataaaactgaaacccagggaccctcaagcgcttcctcagaagagctcaaaatgagtttgagctcaaggtgaagaagataaggagcgacaatgggtccgaattcaagaaccttcaagtggaggagtaccttgaggaggaagggatcaagcacgagttctccgctccctacacaccacagcaaaatggtgtggtagagaggaagcacatgacacttatagacatggcgaggacgatgcttggagagttcaagacacccgagcgtttttggtcggaagcagtgaacacagcttgccacgccatcaacagggtctaccttcaccgcctcctcaagaagacttcgtacgagctactaaccggtaacaaacccaatgtatcttactttcgtgtatttgggagcaggtgctacattctagtgaagaagggtagaaattctaaatttgctcccaaagctgtagaagggtttttgttaggttatgactcaaatacaaaggcgtatagagtcttcaacaaatcatcgggtttggttgaagtctctagcgacgttgtatttgatgagactaatggctctccaagagagcaagttgttgattgtgatgatgtagatgaagaagatgttccgacggccgctattcgaaccatggcgattggagaagttcggccacaggaacaagatgaacgagatcaaccttcttcctcaaccatggtgcatcccccaactcaagatgatgaacaggttcatcaaaaggaggcgtgtgatcaagggggagcacaagatgatcatgtgatggaggaagaagcaccacaggtccctccaactcaagtccgagcgacgattcaaaggaatcatcccgtcgaccagattttgggtgatataagcaagggagtaactactcgctctagattagctaatttttgtgagcattactcctttgtctcttctattgagcctttcagggtagaagaggccttgctagatccggactgggtgttggccatgcaggaggagctcaacaatttcaaaagaaatgaagtttggacactagtgcctcgtcccaagcaaaatgttgtgggaaccaagtgggtgttccgcaacaaacaagacgagcatggggtggtgacaaggaacaaggcacgacttgtggcaaaaggttatgcccaagtcacaggtttggactttgaggagacttttgctcctgtggctaggctagagtccattcgcattttgctagcatatgccgctcaccattctttcaggttgttccaaatggatgtgaagagcgctttcctcaacggaccaatcaaggaggaggtgtacgtggagcaaccccctggcttcgaggatgaacggtatcccgaccacgtgtgtaagctctctaaggcgctctatggacttaagcaagccccaagagcatggtatgaatgccttagagactttttaattgctaatgctttcaaggttgggaaagccgatccaactctttttactaagacttgtgatggtgatctttttgtgtgccaaatttatgtcgatgacataatatttggttctactaaccaaaagtcttgtgaagagtttagcagggtgatgactcaaaaattcgagatgtcgatgatgggcgaattaagctacttccttgggttccaagtgaggtaactcaaggatggaaccttcatctctcaaaccaagtacacgcaagacttgatcaagcggtttgggatgaaggacgccaagcccgcaaagactccaatgggaactgacggacacaccgacctcaacaaaggaggtaagtccgttgaacaaaaggcataccggtctatgatagggtcagtgctttctttatgtgctagtagaccggatattatgcttagcgtatgcatgtgtgctagatttcaatccgacccaagggagtgtcacttagtggctgttaagcggattattagatatttagttgctacgccttgcctcgggatctggtatccaaaggggtctacctttgacttgattggatactcagactccaacaatgtttgatgcaaggttgataggaagagtacatcagggacatgtcaattcctaggaaggtccctggtgtcatggagttccaagaaacaaacttccgttgccctatccaccgctgaggccgagtacgttgccgcagacgagtgttgcacgcaactactttggatgaggcaaaccctcagggactttggctacaatctgagcaaagtcccactcctatgtgacaatgagagtgctatccgaatagcgaaaaatcctgttgagcacaggcgcacaaaacacattgacatccggcatcactttttgagataccaccagcaaaagggagatatcgaagtgtttcatgttagcaccgagaaccagctagctgatatcttcactaagcctttagatgaaaagaccttttgcaggctgcgtagtgagctaaacatcctagattcgcggaacttggattga

SEQ ID NO: 162933 - DNA, 1464 bp, Arabidopsis thaliana landsberg
  unsure (1)..(1464): unsure at all n locations
atgaatctgcagatggagtctgtgaaaccattggatgttgtttcttcaggaaaaggaaaactcagacgcacatttgctaaagtcatcaacatgaaaaagctaaccggtgttgttccagaaggtaacaacaaggttgaaagagtgaagaagagccaagaaaaggtgaagttggataaagatttagcaaagaatgctgcaaatctgtctgagtcctttgacaagctggaggaagagtatgagaaaagactggccatggaggctcttcttgcaaagctgtttgctacgatttcttcgataaaatctggttatgcgcagttgcagtatgctcagtctccttatgatccaaatgggattcagaaagcagataacttggtagtagcagagctgaagacattatcagagctgaaacagagtttcttgaagaaacagcttgatcctaatcctgatagaactcttgttcttgcggagattcaagagctaagaagcgtcttaaagacttatgagatcatggggaagaagctggagtgtcagttaaagctcaaagactctgagatcatatttctcaaagaaaagtttcaagaatccatgactcagaacaagttgatggagaagagattaaaccaaagtggccaactttgcaatccattggatcataatcttcatctatcggcggtaagttcgacccatttcgttacttatctgcaccacactgtcaaatccatccgaggattcgtcaagttgnnnnnnnnnnnnnnnnnnntcgcggcttgggacatcgatatggctgctgagttaattcagcctgatgtactctattacaagcaagaccacaagtgttttgccttggagcattatgtctgcaagataatgcttgaagcttttcaactaccttacttctcaaacgaatcatcgaagaagacgagcagagaagacaaagcaatgttctttgagagattcacagagcttagatcgatgaaaccaagagagtatttagcatctcggcctaaatcaagattggctaagttttgcagaactaagtatttgcagctcatacatccaaagatggagcaggcattcttcggacatttgcatcaaagaaaccaagtcactgcaggggagtttccagagacgagcttgtgcactgcgtttctcgaaatggcgaaaagggtttggcttttacattgccttgctttctccttcgatcctgaagcttcaatctttcaagtatctagaggttgcagattctccgaagtgtacatgaagagcgtgtcggaggaagcgtttttctcaccggagcaagaagaaagctcgtcggaaactgaaccgagggttgcgtttacggttgttcctgggtttagaattgggaaaacgacgatacaatgtgaggtctacctctcgcgttcatgtcaacgccgtcaggagcagatagattccggtgatgacgtctcaggggtattagggtaa

SEQ ID NO: 162934 - DNA, 2619 bp, Arabidopsis thaliana landsberg
  unsure (1)..(2619): unsure at all n locations
ctcctatttctctggacttattatctagtaatgtcttcttaaccattctagcgattatcatatccggtttacttaaaaccattacgtaccggaaacacaattcgaaccatttaaatctcccgcccggcccaccaggatggccggtgatcggaaacttatttcagttcacgcgctccgggaaacagtttttcgagtacgtcgaggatctcgtaaagatctacggtccgattcttactctcaggcttggtactcgaacaatgatcatcatctccgacgccagtctcgcccacgaagcgttaatcgaacgtggagcacaattcgcgacccgacccgttgaaactccgacccggaaaatcttcagctccagtgaaatcacagttcattccgctatgtatggacctgtgtggaggtcattgagacggaacatggttcagaacatgcttagctcgaatcggctcaaggagtttggttctgttagaaaatccgccatggataaactcatcgagagaatcaaatctgaagctagagacaacgatggactcgtctgggttctgcaaaacagcagatacgctgcgttttgtgttttattagatatctgttttggagttgagatggaagaggaatcaattgagaagnnnnnnnnnnnnnnnnnnnnnnnnnnaaacgccgttgatccaaaactccacgattaccttccgatcttaacgccgtttaactacaatgagagaaatcgtgctcttaagcttcgtcgggaacttgtagatttcgtcgtcggattcatcgagaaacgacggaaggcgattcggaccgcaacggtatcgtctttctcgtatcttgatacactctttgatcttagaatcatcgaaggaagtgaaacgacgccgtctgatgaagatcttgtaacgctctgttcggagtttctcaatgccggtacggacacgactggggcggcgatcgagtggggaatcgcagagttgatagcgaatcccgagattcaatctcgactgtacgatgagattaaatcaacggttggagatcgtgcggtcgatgaaagagacgtggacaaaatggtcttgttacaagctgtagtcaaagagattctccggcgacatccaccgacttactttacattaagtcacggtgtaacggaaccaacgactctctctggctataacatccctgtcggggtcaacattgagttttatcttcccggaattagtgaagacccgaagatctggtcagagccaaaaaagttcgaccctgaccggttcttatcagggcgggaagacgccgatataacaggagttgctggagtgaagatgatgccttttggtgttggccgtaggatctgtccggggatgggaatggcgacggtacatgtgcatttgatgatagcgaggatggttcaagagttcgagtggttagcctatccaccgcagagcgagatggattttgccgggaagttggtgtttgcggttgtgatgaagaagccgttgagggccatggtgagacctagggtacaatgaaagccgcaggtttgtagcatatccaacttttaaaaatgaataaatgctgtatggaatacatgcataaactgataaacactctcatgtaaaaatgaatacaagaagcatattggtactcaagtcatgttttccattaagaatcttttagaattctgttatctttgagggtaaaaacttaactatgtttgtaataaaagcttagaatgagaatttggtaaaacaactgtcatgctaaacactaaaaatgggagaatacaaaataaacttgagatatgagtattttgtttgttacaatttatgatgctaaagccaaaaacattgagaaaagaaaaaaaaaaacataatcttcttaactgagaaacgttgacatgcagaatcacacgttagaagataactaccgtgtgttagcaaacaatttacacgattacaactactgtactagtcatgaaagacaagactttaaatttccatcgtacttcttgtgcataccaaactcagcctcataaaattaaatgaaaccaatcgcaaaactggttactttaaattctcctcacctaaattatcatgctctgctctgtttttataccttcctctgcttttcccttccactcttaatcctccatagctacaaacaaagctcagtgaaaagaagaagaaaaacaagaagctaaaaatgtctatcctttcgtttcctcacactttctttaacatctctccttcactcttctacactatccttatatccagtttagttctactgatcctcacgcgccggagtgctaaatcaaagatcgtgaagcttcctccaggtcctccggggtggccggtggttggaaacctcttccaattcgcgcgctccgggaagcagttttacgagtacgttgacgatgtaaggaaaaaatacggtcctatctacacgttgaggatgggaagtcgaacaatgatcataatctctgattcagctctcgttcacgacgttctgattcaacgtggaccaatgttcgcaacccgacccaccgagaatccgacccgaaccatcttcagctccaacactttcaccgttaacgcttcagcgtacggtccaggatggtga

SEQ ID NO: 162935 - DNA, 1482 bp, Arabidopsis thaliana landsberg
  unsure (1)..(1482): unsure at all n locations
atggagacggctgcagcaattcattcaggagtttgtaaagtcaacactgatcctatgaaggtataacaagtatcataattttcttgtatattttaatggacagctctgtttggattgtttttaaaattatcttcttattccaagcaatggttgtgtttgggaagcctgtatttgatacaagttccaaagatgacaaagagcctcaatcatctcccacacatagtcccaatattgtgggtacaaggaacgaggtattgcgtaacatatactgacttttgttaataatgactagggaatgatttttcagttttctaacagcttgtgcctattggtctgatatattatcttcctgtacaggataataactcagaacactctaactcacctgcccaggaaccagatcaatattttgagttatctgattcatccccggcgcataaaagagaaaaaccaaatctctcccaagctgaagcacgtctcgtagccgagttcatatcgcaaccaatacttgagacacaagcacttttaccaacactaaaaaaagcagagtattcacagtttgtcaaaaccctctcgagctctccaaatatgtatggttatcattcatttttcctatttccacaacattcatcatcaagttcttcactaatgctgtttttttacctcatagtgaacatctaaccaagtgtggattccttatttccaacaaattcttcgtcaaacttgccaaacctcagcaatgggtttcaaccctggtatgtagtccactatatttatcttagtacaaattaacctgttaacaagagatactaatgtgtaaatgttttatttcctagcacatggaggttttggtgtcattactttctcggaggctcagaactacacttgagaatcatcgttctgcttttgttgatccatggttcacaagccatctacaagctaaattcagagccttcaacgcnnnnnnnnnnnnnnnnnnnnnnnnnnnnnnnnnnnnnnngcaacgcttcatcaaaggatccaaaactgaatggttcaaggacataaatacaatttacgcacccatgatatggaatgattgccactgggttggtctttcaatcaatcttggcatatggagcgttgaaattcttgacctaaatacagacctctacgacgacgctaaggtaaaaagatgcattgagccagtagtcaatcttttgccccacctcatccaaaggtactgtacgccagagttttctcagaatcacggtcttcaaccgtttggctggagtcgaattgatggtatctacaagaatttgcggagtggtgactgtggcccggttgccatgaagttccttgagattcaagcaagtgataatcatctctgctttttgtaatattaaccatcttaaccatctctgctttttgtaatataaaccatcttaactttccttttgaatattatcactctgtaaactattttctgaacgtgtgtgttct

SEQ ID NO: 162936 - DNA, 699 bp, Arabidopsis thaliana landsberg
gtatcggagctgtgtcgtttctcggagaagatggttgttacgaggtcgcgggaagaggatctgaagggaaaaagagtagaaatggagaatctgatcgaatcacgcatgacgaggttggaggaaatggtcgctgagcaacataaagcgatgatgatatgtttggtgcgttgagtagatcgacgagaaagaaggtagcggatgaacaagagagattagataggagttcgtcgtactcatcaactttaacagaggctcgatcgggtttctctgatcatccaagggaacatcgtaacgatacggtaagatttgagattaaccaccattatgggagtcttactaggttggggaagatcaattttcctagatttgattgaagtagaatcaatgaatggctgttttaggtggaagaattttttggtagtgaatttactctagaggagatgaaagttaagatggctgcaatacactttgatagtcatgcatcgacatggcatcattcgtttattcagtcttgtactgggttggatgtgttgtatacctggcctgaatatgtcaaattactaaaaggatcgttttgaggatgcttgtgatgatccaatggcagaattaaagaaacttcataagactgatggtattgttgagtatcatcagcagtataagctgattaaagtaaggcttaacttgtctgaggagtatttg

SEQ ID NO: 162937 - DNA, 2168 bp, Arabidopsis thaliana landsberg
atggatccaaagggaaaggggatggtggtcaacgacaaggaaaaggagtccttcctcaacgagcctagagacgacaagcccactgactctggctcgagtcacaagaagaaggacgggaagaagaagagacgcatcaagaagatcgtctactgcgacaacgacgaatcttcttcttcaccaagagacgacgacgacgagaaaaagaaacctgttaattcaaattattcatttgattattctcgcattccttttaactccaatgctcatttgctttcaattcctcttggtaaacctccacactttgatggagaggactactctttttggagtcacaaaatgcgtagtcatctattctctctccatcctagtatttgggagatagttgaaaatggaatgcaatttgatagtacggataaccctgtgtttatcaacgagcaaattcataaaaatgcacaagctaccactattttgctaacatctttatgcagggatgagtacaacaaggtgagtggcttggacaacgccaagcaaatctgggacaccctcaaaatatcacatgagggaaacgacaccaccatgatcactaagatggagttggtggaaggcgagcttggacgattcgcgatgagaaggggcgaggagccaacccaaacatacaaccggctcaagacccttatcaacaaaataaggagctacggaagcacgtgatggacggaccacgacgtcgtccgactgatgctaaggtcctttaccgttcttgatcctcatttggtgaataatattcgtgagaatcccaggtacaccaaaatgttgcccgaagaagtccttggaaaattcgtaagcgggcgaatgatgatcaaggaggcaagatacgtggacgacgcgttaaatggtccaatcaacgagcctcaaccccttgctctcaaggcaacaagaagcaaggaggcgctacctagcaaggtggcacaaattgaggcggccggacttaatgatgaagagatggccctcatcatcaaaagattcaagacggcgctaaagggtcacaaggggcagccaagcaagaccaagacaaaggggaagcgctcatgcttcaaatgtggtaaggttggtcattttattgctaactgtcccgacaatgatagtgatcaggatcaagggaacaagagggagaagaagaagaactataagaaggcaaagggcgaggcgcatctaggcaaggagtgggattcggattgctcctcttccgactccgacaatgaaggactcgccgccaccgccttcaacaagtcatccctcttccccaacgagcgtcacacatgccttatggcaagggagaagaaggtatgtactcgaaactctacttatgcttcttcaagtgaggacgaatctagtgatgaggatgaaatagattattcatgtttatttaagggcctagatagaaccaaggtagataaaatcaatgaattgattgatgcattaaatgataagaatatgcttttagaaaagcaagaggatttgttgtatgaagaacatgataaatttgtagaagcacaaaaatctcatgctctagaagttacaagaaatgaaatgctttcttgtgaattatcttcttgccatgagacaatttctagcttaaggagcattaatgatgatttgaatgctaacttagaaatagctagtaagtcaacatcttgtgtagaaatggttgcagcttgcaataggtgtaaatgaaagggaattaggcttacacctagttcctaaataattttggtggttgaattgcccaacacaaataattggactaactagtttgccctagcttatattccacaggtgcataaaggttcaacacaaaccaataaaaagattaaataaagggttgaaagagaaaggaggaaagaaacccaagtgtgccctggtctggtgcaccagactgtcggtgtgccacggacagtgtccggtgcacaaggaccgtacaagtccaaactcaccactctcgggtttttccaacgccactccgctataattcaccggactgtacggtgcccaccaggctgtccagtgtgacagtggagcaacggctcttcggcgcaacggtcgactgcacagtgcccctgacagctgtaacatcccaaaaatttaattccaaggttagaaccctaaatctt

SEQ ID NO: 162938 - DNA, 1657 bp, Arabidopsis thaliana landsberg
ttctcctttatatcccaaacctattcttcctccacacctcatcataggcatagcaaaactcttccaaaatgtctgatttctcgagctccgtgaagcttaaatatgttaaactcggttaccaataccttatcaacaacttccttactcttcttttgattccagtcatagcaaccgtcgccatcgagcttctccgaatgggtcaggaagagattctcagtgtcttgaactcactccacttcgagcttcttcatatcctttgttcctctttccttattatctttgtttcaaccgtttacttcatgtccaagccacgtaccgtctaccttgtggactactcttgctacaaacctcctgtcacgtgccgtgtcccgttctcttcgttcatggaacactctcgtctcatcctcaaagacaatcccaagagtgtcgaattccaaatgagaatcctcgagcgatcaggtctaggagaagagacttgtctccctccagctattcattacatccctccaactccaaccatggaatccgcaagaaacgaggcccaaatggttatcttcaccgccatggaagatctcttcaagaatacaggtcttaaacctaaagacatcgacatcctcattgttaattgctctctgttctcaccaacgccgtctctctccgctatgattatcaacaagtacaagcttaggagtaacatcaaaagctataacctttccgggatgggatgcagcgctagtcttatctcagttgatgtagcacgtgatttgttacaagtccatcctaactccaacgcaatcataattagcactgagatcattactcctaattactataagggtaatgagagagccatgttgctcccaaattgcctcttccgtatgggaggcgccgccattctcctctctaaccgcagatccgacaggtggcgagctaagtacaagttatgccaccttgttaggacccatcgcggtgcggatgacaaatcctacaactgtgttatggaacaggaagacaaaaatggtaacgtgggaatcaacttgtctaaagatctcatgaccattgccggagaagccttgaaagctaatatcactaccataggtaactcacaatgttatatacgaaacatgctttcatcctatgactttatctctatgatcatgtgatctctttgttggaactttttttcttctaaaagagattaacacacttattggattgaataggtcctttggtccttccggcatcggagcagcttctcttcctctcatcccttatcggacgtaaaatcttcaatccaaagtggaagccgtacataccagatttcaagcaggccttcgagcatttctgcatccacgcaggaggaagagcggtgattgatgagctgcaaaagaatctacagctgtcgggagaacacgtggaagcttcaagaatgacactacataggtttggtaatacatcgtcgtcatcattatggtatgagcttagctacatagaggctcaagggaggatgaagagaaacgatagggtttggcagatcgctttcgaaagtgcattcaagtgtaactccgccgtttgaaaatgtaaccgtacgatcaagacaccaacggatggagcgtggtcggattgtatcgaacgataccctgtctttatccctgaa

SEQ ID NO: 162939 - DNA, 4708 bp, Arabidopsis thaliana landsberg
atgaagagacctcgacctacatctcagccgtcgatctcttccaccgtcaaaccaccactgtctccgccggtcacaccgattctcaaacagaagctacacagaacaggaacacctaaatggttcccgttaaaactaacccacacggagctgacgttgccgttaacttttccgacgggtcaaacattccggtggaagaaaactggagcgattcagtatagcggaacgattgggcctcacttagtctctcttagacaacgtccaggagacgacgcagtttcctactgcgtccattgtagcacaagccctaaatccgcggagcttgcgttgctcgattttctcaatgctgagatctcgttagctgagctatggtctgatttctcgaaaaaagatcctcgtttcggagagctagcgagacatctccgtggcgctcgtgtgttgaggcaggatccgctcgagtgcttgatacagtttttgtgctcatcgaacaataacattgcgaggattacgaagatggtggattttgtttcgtctttagggttacatttgggtgacattgatggatttgagtttcatcagttcccatcattggatcgattatctagggtttctgaggaagagtttagaaaggctggttttggttacaggtgatttcatcactctctaatggttacattatgttgaattagacatttaggctaaaactttgcttgaagcttatacttttatttactctgtggctatacattcatagaattgaagctaatgtttggtctaagctagataatcattgtgtggccgtttctctgattggttctgatctcatttgaaaactctcattctggtttatcttgtggtgagcagagccaaatacataacaggtacagtgaatgctttgcaagcaaagccaggtggtggtaatgaatggcttctttctctgcgcaaagtcgaactccaagaggcagtttgttggttttagcctcttttgggacaaaatgggtaagtgttttctaaacactactactccatctctaactattatgattagtcaaatccattggattatgacacattttgaccatcgaaacattaacaaacctattgactgcttctaagcaatgttttgttggttgtagactcttttcggacaaaatgggtaagtgttttctaaacactcctactccatctttaactcttataattagtcaaatgcattggattgtgacacattttgaccaaagtgataagtgtgtattttgcatgtttgagcatccatttgtcatcactttagcatcatatcatcactgttttataccattttacatcatttgtcatcactttgcatgtttaggatagttttgcatgcatgttgcatatttgcgttgatttgaggtgatttggagctgttgtcgagctatctggaagaagcggacctgatcatgacaaaccactcgacccaggggtcgagtaggagcttcaagatctcaagagaccactcgaccaccaggtcgagtagaggacatcaccacttcacttcaccactcgaccacgaggtcgagtgccctcattttcatcagcagacaatcactcgatcacatcactcgacccccaagccgagtgccttcatcccattgccataccactactcgacctcatcactctatctggatgtcgagtatcaccatcaccaccactcgactgcatactcgatgacaagcttcagagccatcttcattccgcactcaaccagacactcgagcacaaggaagaaaagaagactccagctattcactcgacctctcactcgaccacgtgggtcgagtacagttcttaacccgtcccaatacttcgtcttttgagtattagggtttcggtatatttggctataagtagcatgtacttctcattttcgcagacaagagttttttacctagttttatttatgcagacattgtgttctagactttttgtaatccgaatttctctttatctattcagtattcagtattcagtttctgttcttcattttcgtttactgttgttcattctgttatcatactgctgttacactgttgttatcatgttttcaacttgttcaacgtttatgctttctgttattatgtctgagtagtgaataggtttctgaggatgggttagagtagtgtagaattctcagtatgctaggtgattgagtattggttgatagatcccttctggattagttgttcttaatgcctattgctttctgatcaactggaatttgagcccagacatttccgcacccaaaaggtgttccatgaaatgtctgaaccactaattccagagattcgtggccctctaccaaggtattggttgcagggagcgttttggctttaacttgttgattcgtaatacctgttaggttagctctcgtcaatggtgattgagtctgggactaggttaacttgagggtctctgttgcggtggcacttagatttggttaaaaaacttgttgtctagggataatttattgagcatgtcaatcacctgtaaactaaggaaacaaaattactcaattaccccatcctcaagaattctttatctgattgattttattgtttactctattgctgtgtacttcatcctgtcatctgttgcttagtttctgcaattctttactgttactcgacctgatactcgaccacccagttgtctggcaagagactgtgcagtcgaatatccctgttacattatttgtctgttactcgacctgtcagtcgaccacacccagtgctctgcaacgagctgtgttggtcgagtgtttatttgtttcagcttgattttctgttttctgcatgttcacttaggactgctagaacgcaccaaaacctgttattgcttggcttgacttagtgacttctgatcacatcttgattcttagcatcacacccatttggattgacaacctaaaatactacaacgatatgattgatgttttaggataattgactaaaaacgtattatcaatttgacgtcgttgccaattgggttttttgtttgttacatttgagatttcaaacttgcttagatcaagttctttttcaatattcaattcggttgctaactatgtgtttttcttgttgtcttcttgatccaagtacacctctgctgtatgcaaactcgaccaacaggcaatcagaacctcctttttaatgacaacatcgaccgcataactcgcgaactcagagaaaggagaaacacagtcaacctaataccacaacaaccactcgaaatggctgaagaacagaatcaacaaaatggccctgccaacattggtgctggagatgcaccacgtgatcaccgtcagcgggaaggaattgcacctcctgctatccagaacaacaactttgagattaagagtggtctcatcttgatgattcaggggaacaaattccatggtctgccaatggaggatccactcgaccaccttgatgaattcgataggctctacaacctaacaaagatcaatggtgtcagtgaagacagattcaagctccgtttgtttcctttctccttgggcgacaaagcacacatctgggagaagaatccgccccatgactcaatcaccacctgggatgattgcaagaaggcttttctatcaaagttcttctccaacgccagaactgtaagactcagaaatgagatctctggctttttatagaaggctggtgaaagcttctatgaagcatgggagcgtttcaagggttacaccaaccaatgccctcatcatggctttactaaagcctctctgctcagcactctttacagagtagtcctaccacgcatcagaatgcttctggataccgccagcaatgggaatttccagaacaaggatgttgaagaaggctgggaattggttgagaacttggctcaatcagatggtaattacaacgaggactgtgataggaccgtcagaggcacagctgactctgatgacaaacacaggaaggatatcaaagcgctgaatgacaagctggacaggattcttcttagccagcataagcatgtgcacttccttgttgatgacgagcagtatgaagtccaagatgaggaaagtaaccagttggaagaagtaagctacatcaacaacaaccagggtggctacaaaggatacaacaacttcaaaaccaacaatcccaacctctcctaccgcagcacaaacgttgctaatcctcaggatcaggtgtatcctccgcagcaacaacaaagtcagaacaaaccttttgttccctacaaccaaggtttcgttcccaagcagcaattccaggggaactaccagcaaccaccaccacctgggtttacacctcagcaaaaccaaggtcctgttgctcctgatgctgaaatgaaacagatggtccagcagcttctacagggacaagcatctagctcaatggaaattgctaagaaattatctaaattgcaccataagctggactgcagctacaatgacctgaatgccaaagtggaggcattgaataccaaagtcagatacttggaaggccaatcagcatctacctctgcaccaaaagttacaggacttccaggaaagtccatacagaatccaaaagagtatgcaaccgctcaccccatccccatctgtcatgatcgagagctgaaaactaaacctgtccctgatttcatcactggggacagtgatgttgaagaaggggag

SEQ ID NO: 162940 - DNA, 1247 bp, Arabidopsis thaliana landsberg
atgatctctaatcttccaagggatttgatggaagagattttgtctagggttcccttgaaatctatgcgagcggtgcgattaacttgcaaaaattggcacactttatccataaccataagtgagagtttagcgaagatgtacattagtaaaacaacaagagaatcaagagaaggggagtctacgataatcacgttgatgaattacaaactttgtttaacgagtctcgtcgtcgacgttgacccatatatagagcacaaaggtaaactaacttgctttaatcttgagcatcaagtcaagatatctcaagtcttttactatgagggtttattttttatgcgtattgaaagacgatacaattactactaggcttgtggtttggaatccgtattgggggcaaacaaggcagatcaaaacccgatattctcaccacgcattctccggaagggatagtacgtacatgttcaattactctctcggatacgagaataagaattcatgtcgcagccacaaattattgaggtttatagattatcattggaattatcgcggcctacaccaatttttttggtatgaaatttacgattttgactcggatttatggacaactcttgatgtcactccacactggtttatagctatttctcaaagtggtgtttccctcaagggaaacacatactggtgtgctaggaagaggagcggcggttatagcgatcacattatttgttttgattttactagagagagatttggaccgcttttgcctttgccgtttagctttattgatcgtcatcattcatgtgtgattttatcttgtgttagtgaagagaagcttgcagttttatttcagtacaaggaccactactataaaaatgtagttgaaatatggattacagctaagcttgaggccgaaatggtgtcgtggagcaagttcttgagaataaatacggggccaattatacacacgagtttcttcattaacgaggaaaagaaagtcgccatcgggtttaatgacaatcgcaaaacaatcaacatcattggcgaggcggggtactttagagaattggatcttggagaacatgcagaaccatatcgtaggagacatgttttctcttatgttccaagttcggtccaaatcaaggaaactgcaccagggaacataaaaaaacatcaaagcagtatagaaacacgtctatttgatcgaaacatgttgagacttgtcgcatttgagaagaaagtatccgagtaac

SEQ ID NO: 162941 - DNA, 1923 bp, Arabidopsis thaliana landsberg
atgtaccgcgggtaaaagtcttgttactcattaaaacaacaacaaaagcattataaaaacacggcatataagtcacaaatacgacattacaaagtcattataagctagtaaagacaacaactaatacaacattacaaattcctttttctttgccttaccaaccattatgtaaatattggcaatgttgatcaagcaaagccacacaaaacacacttttaagcacactttcaacttgcagatttcctttttgttcaatattgcttattctttcagttcttgtaacatcgcatgtagctcatttgcctcagatttgactttgttaatctcatttgcaatgattccaaattttgctaaagcatcttcgacctcttcttgcacagcatcctcaacctacttaaacaaatgaccctattgcacaacccacaaaccaaatctgacaagttaagcaagtatacactacacaaatacacaatataaacaccaactctatttacatctcttttgtttgtccacatatccggatctcttttgcttttacaccggaaaagggtcttcctggattgtcttgactcttggctgtgaagaccgtcacatctactccacacgcacatttcaccggaaaccacgggcttcgtcaaccccagatgacactgacactgaacttgaactcatcggagtagttagagaaggcactcacaaaaccctaaatcaattttggaattcgaatgtttcgatttagggattgattgaaatcgtttttgtcttttcgaattttgaattatgaattttgcataaagcggactctattttttgaaatttattggattttgtttttggtaatttataagcccattaaaaatggcaaaaggcctaaaaggaatacttattttagggatgctaaaacccctagtaaaaaaaggcccaagcccagcccattttcttaatcgttcggcgtgaaagttcagatgggacaggcgaagagtcacgtctattcaatttactcgtctgcttttaattttacacgaaaccagagaattcaagaaattgaaactgttcaccggtgaagttcatcatggaggtcctgatcatcgacggaccattcagagggtaagaacgtcggcgccttcctctccggcgtctgcgactccaacatcaccggattgttcttctccaccaccacctgagtggttagttgacatcgggtttatccgccgacatttgggggttccgcttcaccgtgtaatcccccctggagaagtggagccgacggtaccgtggatgaggtctcctttaccaggagatatagggccggattttgttccagccccaagagatttcgtcccaggtcaagttattcatcccggaaagttttttggtcaaacgaatctatccaacgagatgcatgacacatgtctaaggtcattcaaaaggtaaatgtaagaatagtgtttcgttgttgctcgtttggttaggtttagggtttaatcaaatttcaggttttgggtttagttgtgttgattgttggttatattaggtgaatcatatagtggtcgtatagttgtattgatggatattttgcgagaaattaacatttctattgttggacaggtggataatcaacaccaagcttatagaaggcgtcaccgccaactactcattgagttgcaagacctggagagaggtatgaggcggttggaggttcatccgaaagactgggtgagatacggtttcgacaaagttgctgacattccactgccactaaggaaatggtgtgttgagcacgatggatcgtcaccaaattggtcgtttttcatggagccagatcccattgaggaggacgatgaaccagatgatgcgacctcctcctacatgagagtggatgagcctccacgcgagtatcctcctgactctctctttcaataa

SEQ ID NO: 162942 - DNA, 3351 bp, Arabidopsis thaliana landsberg
aaccagctcgtctgctccgacgaattcagttgaagctattaacagaaccagctcgtctgctaacagaaccagctcgtctgctccgacaaactcagttgaagctgcaacaaaggagctaaacgacatcgtcaaaggaaaaggcatattgggccagaagcccaactacaatgttaaagctgaatgtcaaagcccaaagtgttcagcgtctcaacggtcgactgctcaacgtgtactaaacaacaaaagcagagtgacgacagaacagatgaagaggagcgttgtgaggcaagaccgtacggctccaatcatcacctcaaaccaatttgactgcctatcaacctgtgaatcgtcatagaacagagacacctgtcagtctctaggtttatgtaaaaccctagcagaatgttgctataaagggaaccaaaatgtaatcgaaacctttaagtgagataataatcagaaatgttcactccatagccgttctctcttttgctttcagttcctttatgttttgattgggacctatcaaacacctatatcaattcatcaccagtacaagtgatctcagattgaccataccggtataatttataaaacagtcgtgaggtacgcaaatcggagacgtaataacacgatgaaaattcaatcctatagcaagccaaagttacaaaaactaaaactaacgttaaaaactatagaaggcccatgatattcattgggcctcgccagaaataaagcccaagagccaagataaaatcatcatttttttttttttttgcattttcccgggattagagtattcgaagcctctgactgggtcagagtattgtacttccaagccaaatcccaaaatcgacgaagaagagaagaaagctgagcaattgcagattcacgcatcgaggttagagatgcttcaatgtatctttctcctctccgattctgggttagtgaatcttcaaaccatttctgtcctcagactcagatctaatcagtctgaaatgttggactcaattcatcttctgttgtttggttttgtgtttacagagaggtaatgctagagaagcagcttactggtcatcgcgttgatagatccatatgtgcttggttctgggatcaatatatttctcaaggcgattcctttaaggtactattatagctaaagttgtcttttttttgttttttgtcaatttgcaatcttttgtcatttcatctacaaattagattcaaagttcgagactttatcttatctattgggtcatctttagctcttgattttaactgtgttagtgtgtgtcttatgcttctttgttgtgttttggataggcacttccagtgattgcttcaccaacacattatctatttcaaattgttcgtgacggaattacgttcttagcttgtagtcaagttgaaatgccaccgttgatggcaatcgaggtgaatattttgcttcttctttgtagattctaatgttgtgaagtttttgtaactttgtgaagttttagttcctttgcagagttgctgatgttttgtctgagtaccttggtgggctaaatgaagatctcattaaggataatttcatcattgtctatgaggtatttttgttaaacaatatgcattttatgaatgagcttttttcttaaccgaaactatggtggacattatggtttctcttgtgtgttgtggctcatttgttagttcggtttaccaatttgttcaaagtttgtgatactaataaaggcattttgggataaggtcacagcgtgtcttcgtgtgtttaatcaacttgtagttgttgattctttctatttgatctggagaatacatagtaatggttacaaattctagcttgttttgttcttgttttgctatgttaatatcatactgtcctcttattcctctagtttcactgtttttggattgctttttcacaaagtagacaattgtaacattttcatccttatgattgattgggaaacaaagttttgctatggaaaatacataattttgttgaggtttactgtgttggtttgagagatttgattatttttttatgttggtttgcagtaactgagacttgacaatgtgtgattaatagcttctttgtgtattttatcttttgctatggcctcaccctttcttggattgccttaactgaatagttacacaaatttgtgacttgtagcttttggatgagatgatcgataatggtttccctctcacaacagaacctagtatcctgaaggaaatgacagctccaccgaatctagtcagcaaaatgttgagtgttgtaacgggaaatgcttcgaatgttagtgccacgcttccgagtggggcgggctcttgtgttcctctggcggccgacagatccaaagtactctagcaacgaagtttatgtcgaccgtgttgaagagatggatgcaactgtcaacaggtttgtgcttgaagaaaattcacaaaatcgtcagttaatcttggcgactcatctcactcaaatcatacttttgaatacactgactgattcagggatggagaattggtaaaatgcgagatttatggcaaagtccaaatgaattctcagctcactggttttccagatttgacattgtcgtttgcgaatccatcaatcatagaagacatgaggtttcacccgtgtgtccgctacagaccatgggaatctcatcaagttctctcctttgtccctccagatggagagttcaagcttatgagttacaggtgtgtgttttcacaaccaaacgttattcttacactttcttgaagatttattctaatatctaagtatctctgattcaatatagggtgaagaagctaaagaacacacctgtatatgtaaaacctcaaataacatcagattcgggtacatgtcgaattagcgtgctagtgggaatccgaagcgatccagggaaaacaattgagtcgataaccttgagtttccagcttcctcactgtgtatcatctgcagatctctcatcaaatcatggaactgtaacaatcctctctaacaaggtaatatgctgtctggcttttgctttgaattcagtttccagatttagaaacttacgttttttgattgtggactatgttttgcagacatgtacatggacaatcgggcgaatcccaaaggacaaaactccgtgtttgtcgggaacactagcgctggaaccagggttagaacggcttcacgtgtttccgacattcaaactcgggtttaagataatgggcattgctctttctggcctaagaatcgagaaacttgatcttcaaactatccctcctcgtttgtacaaagggtttcgtgctcagacacgcgctggtgagttcgatgtcaggttg

SEQ ID NO: 162943 - DNA, 2594 bp, Arabidopsis thaliana landsberg
  unsure (1)..(2594): unsure at all n locations
ctctttggtatggatcaagtaattctcgtgtgtggtaaatgggtatatgagaaaacgagatggctttttgtggttgatagtacaaaaggttgtcgtgtacttgaaggtaatagtcaaaccagttatgatgatttcatccaaatggtgtatgaggattacaatatcgagaagagtgtatttgaagttattttgagttacaagatcccgaaatcaaagcaattaccaacagatactccacctgtactcattggtaataatagacagtttcagtcttatttggggcaaacgaagaatgatactgttcgactttgtgttgaattaaaagagaaagttctagatgaatatgaagaggaaatcattgatgatttaggtagcagcgacttgccgaagacaaaagcagttgatgtatacggtattgtcgaagaaaacgttgaaaacgttgacgtattcactcatactgatagcgttgttgaaggaaaaaaatctgaagcagttgaagatggtgaagatgacgggactagatttgattactgtgatgattccgacggaacagattctgatgatgagaactttagcctctatgggattccaccagaagaagaagataaaacgaacgtatcaagcaagaagaggagtttaagtgtatacgtagaagaagataaaggggatgctacatacgagaccttagaactatcgtcattgggattggccattggtcaatgttttgaaacgaaagatcacttggagacacgtttgaagatacttactgtgttacagaaatttgattttgatgtttcgaaatcgactcctacattatattttgtaaagtgttggattaagggatgtcgattgagagtgcgagcaacaccagttgacgagtgtccaaagtttcaggtgagagtgtatgtttcccaacatacatgttattttactaaacgcttattacgttccccacaagctactcacgaaatacttggattgctctataagaattacgttggtggaattggacataaggttctcccaatgcacgttaccgaagtattnnnnnnnnnnnnnnnnnnnnnnnnacggtttcaaatcaaggtacgatttccaatttcttggctttctttgtttattaatcacaccttgttttcaaccaactaatcactaaagtcaatacattttgttagatggattactcgaaggcttatcagacactaagatctgcccgagaaatggttaggggtacaccagaaagtggttacgagcaacttccggtatacttgtacatgttaaggagggaaaatcctagaaccttcacgcgacttgaagtggatgaaactcagcgatttaagtacttgtttcttgcgtttggtgcaagtattttaggattcactttcatgaggaaagtggtggttgttgacggtacttttttacaaggataatacttagggacacttcttacagcaacaactcaagatggtaattttcagatatacccgattgcttttgccgttgttgatactgaaaatgatgcctcatgggaatgtgttttttagacaactcagcagtgtgattccagatgatgaaagtctcgccattatttctgacaggcaccaatccatcaaaagagcaataatgacagtttatcctaagtctagccggggtatctgtacataccacttgtacaagaatatattagttcgctttaaaggtcgggatgcatttggtttggtaaagaaggcagcaaacgctttcagattagtcgattttgaaaggatatttgatcagattttagctttgaatcctgctcttcatgcttaccttcaaagagctgatgtacgtttgtggactcgtgtgcattttcctggtgataggtacaacttgcttacaagtaacattgcggagtcaatgaataaggtcatgtcacccgcaagaagccttcctattgtacaactgttagaagaaattagatccatgatgacgagatggttttcagacagaaggaatgatgcattgaatttgtctacatatcttactcgtggagtagagaagatattgcaggtttcatttctaatacaaacacaatttatacacgtccgtatattggtgattatagctaactaatgacattgtcttctttgtagagtcgtgtagagcacgctaaattgctaagtgtgcaagacatagatgcaaatcaagtacaagttacgtttggagcatctctgcatgttgttaatttgaaagactagaaatgttcttgtcataggtttgatctaaaaaagattccatgtacccacgcgattgcagctgctgaaaaacgaaaactttctcggatatcattgtgtcatccttactttcagaagaattacttatgcaagtcctatgctaatgccatcatgcccagggactttgatatacttgttcccgaaaatgtcgtgtcgatgatctgtttaccaccggaagctcgtcaacaaccaggtagaccaaagaaatcgagaattcagtatgtactggagattgctatagagaagaagaagcctagaaaaaaacacacttgtggcaattgcaagcaaattggacacaatcgtaagacatgcaaggcttaa

SEQ ID NO: 162944 - DNA, 1836 bp, Arabidopsis thaliana landsberg
ttatcggtccaatctaatcctcaaacctcaaccaaaaagctaacgagcaaacgcgcgtgatactcttttccagaaatggggaagagaccgccgattccaccagatatcgaaaacggaccaccaccaccagcgcgaccacattttcgcccgcccattcccgtgccatgggttgcgtggcttgtgcctctcattttagcagccaacttcgtcacattcgctaccaccatgtatgtgaacgattgccctgcaagatcagatgagtgtctcttatttgatgtccttggaaggctttcgtttcaaccgattaaggagaatatgctactcggtccttctattcccacgtaaggaaggatttcttgattccataatgggtttttttctctccgggtagaacaagaatctattaaaaactggttaaatacttacagaatgcatctttgttgttgattcaggctgagaaaactcggagctctcgaaaggagacttgtggaggaaggtgagagatggcgtctcatctcttgcatatggcttcatggtggtttccttcacttgatggctaacatgatcagcctcatgtgtatcggaatgcgccttgaacaagaatttggattcagtaagaccctttaaacccttccgtctcctgaattttctgtgatctgattttaagagtttggtgttacagtgagaattggagctttgtatgtgatctccggacttggaggaagcctggtgtcttgcttaacagattcccaaggagaacgggtatcagtcggagcatctggtgctttgttcggattactcggtgcaatgctctcagagctcatcacaaactggacaatctatgaaaataaggtaaaaagatttttcattttcgacttcagatttctagaaaaataaagactttatggtgcgttattgaaagctgatctcaaacttttttgtagtgcaccgcacttatgacattaatcctgatcattgtactgaatctaagcgtcggattcttaccacgtgtggacaattctgctcattttggaggattcctagctggtttcttcctggggttcgtccttcttctccgtccccagtacggatacgtgaacccaaaatacattcctcctggttatgacatgaaacacaagaaatcaaaacacaagtgttatcaacacatcttgagatttacatctctagctatccttcttgcggggtaagtttacaaaagagatttaatgaatcattgttcaaaagtagtcgaattatccaccaacacataaacaaaacctccggtgttgtgaaaagtttcatcccttacctgtaaataattgaatttttccttgaaatttctgcagattcattgcgggatacactaagcttcttagagaacataccatacagagcatgccattcagagatttcaattagcagcttgtagccagcagaccagtgagacattctctggaaaaaagacaatttcacacaatcccaaggttttttccatatatataacacaaatatcaacatcggaaaggttatacatttgacgagtacatgattcgaaaagtagtacatatgtatctattgtttaatggctgttgtaaactatacatctgtataaaagcttatattaatctgtaggattacatatctagttttttttttgtggcaaagtaggatcacatatgtattcttagagctcacatgaatcagatcgaccaaacattgcatatcgattgtttgcaacattttcatagaaaaagtctctcacaaacctgcaacatgtcaaacgaaaaatgtttattaagatcaatcacatcgcggtgtttccttctgctgtttaaa

SEQ ID NO: 162945 - DNA, 2375 bp, Arabidopsis thaliana landsberg
atgaatggtgcaatggctacgacttaccttgctgacgtgaagcccttcaaaaccagctggcgtgtgcaagtgaaaatcctccatacctgaaaacaatacacagctcagtcaggagaaacactcgaaatggtactagctgatcagagggtacgttcaatctaaacattttttacaaattatgtgtcgagctgatttatagaatttcgttttctaatgttatataagaactttccagggatgcaagatccatgcaagtgtgaaaaaggcactggtgaaaaagtatgaaaggcacattgcccttgatcagtggagaatcattgagaacttctctttgggtcaagtcaggggacaattccgtgtgacaaatcatcagttcaaaatggcatttgttaacagtacatttgtttcaccatgtcctaccgtgactaatgatgcctacctgtcattaccaacgtttgaatccattattgttggtgaattgaatctattctatttggttggtgagtagtaacaaacgatattatttttgagtattttgatttctgtcatctatatgaagtgaacctaacacaacactacttattgcagaagtctttggccaagttgtcaatgttggcaaagttgaagacatagttgtcaacaacgaatcaaccaagaagctggaatttgagcttcgaaacgaaatgtatcattacttttttagaataatggtagtatatataaactatattgattaataattgtaaaatggtttgtgttttaaggaatgatcgcctgccatgcactttgtgggggaagtttgctgatcaggtaattcaggagtgtgagaactcaactggagagattgttgtgtgccttattaggtttgccaaaatcaataccttcagaggtaaaatcctaaaccgttattttaactctgaagttgctattactatgatagtgtacacattatctctgaaacgatttactttttgttttcgtttatgttaggggagaaccaaatcacaaatgcttttgatgcttcagttgttaccatcaatccagagttcccagaagtggaacatttcaaaaacaggtaatcaaatactatattgtaggtgttttgattgctaataaatcatggatattaagtttggggtttattggctgattggtaactacagtttgccaaaagatggtcttgctctcaccatttccgagactaatccaagacgtgaattgtcattcggaagtgatggttactttgaccagtatcctaaaaaatcaatagcctgcttacttgatgtcactgaggtataaaggctaatcattattgaatattggttcgctactctggaactgatatcctattaaatgatggactaatactcttgcacctattcaagctcagaaatgcaagatcatgtgcaccatttttaaaatagatggtgacatgggttggttttatgttgggtgcaagaaatgtagcaagaaagttgagttgaaaaataacgacacctccatttctgttaagcctaaagaactcacattttggtgtcctaaatgcaaccttaacataacacaagtgtttccaaggttcgtgttctcattactatatatataatatattcctacactttatatatattgattagtaaaataaataagaaaatatttggttataggttcaagttgcatgttggagtcatggatcatacaggagatatcaaatgtattctgtttgatggagctgccaccgagatgattggtgatacaacatttgatctgcttgatggcgtgtatgatgatgatgtgagtaataacaattcagaataagattaacaaatcaaaattttatcattaagttcttatatcgtgtcatttataattcagttgcaggatcctgcaaaaccgcctccttttatcaagaacttggttggaaaaacgtttcagctacttgtgtgtgtcgagaatgacaatttgtctggaagtaatgacacttacaggattggtaaggtctggtcaggtgttgccaatgtgaagattgaggatcctaatgactcagaggggacaatcaatcctgatcatctcatctcaggcagtgaggttgaaatctatatcgattttgttttctactacacattataactatgaactgaaacttttaattattccaggcaatgtatctactcactaacagtagtgaaggtagtaaaatgtcagtttctggcatgactactccatcttccaagagaactgtggaagatacatctttggagagatgttctactaccaagaagacatgcttgaaaccaattaagttggagaaactcgatggcttgactgagattggaaaggaagaagacgagaaggcggttggggccaagtgatgtagg

SEQ ID NO: 162946 - DNA, 1312 bp, Arabidopsis thaliana landsberg
caaataacaactgcttgtttttcttttgtatggaggtttactcgggacacaaactcgcgacttgttaggaagataactagagtgtttacaaataaatttgatggtcccttctatagctgaacatgtgtgcctcaagagagacaagagaaatacttcctcgagtttgcggtttagagttctttcagcccttcttatatatatgattacacttctttttttactgacattaccttttctatttgtagaagacacaccattgggatcctttgatcacatggactgttcagttttacttcaacgagatctgtttaaggcgaatgaaaggcatggttagcactgcaagaactagtcgaaagaaacctaaatggatcggaaaaactctatggaaggaaatgactgcgtactgggacactgaagaagctcacgaaataagtcaaatatattcaaatgcccgtatgtctgaccgtaacggtctaggtcctcacatacatttctcagggtcgaagtcatatcatcaaatccgagacgaattggtaaaacttaactttgtttactcctttgcaactttaatctgatgtttctctacttttctatgacttgttttttttttcattacaggaagagcaattgggcaaaactgtcaatattggtgacgttttcatcaaaacacatacaaaacctgatgggacgtatgttgatcgaaaggcggagaagattgcggagttatataagaaagaatttgcaactgaggcagtctgagttcgaggctgaagcttcagctgtttcagatggcacttcgcgggcacgggagctcacagctgaggattgtacaaccatatttcttcaggtaacgttttatgtttcccaatttagtgttttcgagttgtctttttcattctctaatctcagcttttatcatactttgcagtccactgagagggattcgagaggcgttccttatggagtaggaagcctcaaagagtctcttgtcaatggcaagcggaagcaagcaggtgactcaacttcttttgtagctttgcaagaacaattacaggaagctcaacgcaagatagaagagcaggtctcttacaatcataggcgtgaatctaagatttctttgcgtgaagctgagaattcccgagctgcatatgagcacaagaagaagcttgagcacttgtccttagtggagaagtttttgcgcgaaaatgatccttggttcctcaatttcctcgaatctcattcagcaaaggagacaaccatagatcctatctcaccctctccagctgcctctccctcttcatctgcttcatag

SEQ ID NO: 162947 - DNA, 5662 bp, Arabidopsis thaliana landsberg
cgccggcaacttccagggcacgtacgtcgccctgggaactcctgggatctccgaagctgccgccagcaccgggagaatccctgcgagactacatccgacgattttcgaagcagcgtaccgagctgcccaacatcaccgactcagatgtcatcggcgcgttcctcgccggcaccacttgccgcgacctggtgagcaagctgggtcgcaagactcccaccagggcgagcgagctgatggacatcaccaccaagttcgcctctggtcaggaggcggtcgaggccatcttccggaaagacaagcagcctcagggccgcccatcggaagacgtccccgaggcgtctactcagcgcggcaccaagaagaagggaaagaagaagtcgcaagcgaaacgcgatgccgccgacgcagaccttgtcgccgccgccgagtacaagaaccctcggaagccccccggaggtgctaacctcttcgacaagatgctcaaggagccgtgcccctaccatcaggggtccgtcaagcacaccctcaaggagtgcgtcatgcttcggcgccacttccacagggccgggccacccgcagagggtggcagggcccgcgacgacgacaagaacgaagatcaccaagcaggagagttccccgaggtccgcgactgcttcatgatctacggtgggcatacggcgaatgcctcggctcggcatcgcaagcaagagcgccgggaggtctgctcggtgaaggtgcggcgccagtctaccttgactggtccgacaagcccatcaccttcgaccaggccgaccaccccgaccatgtgctgagcccggggaaatacccgctcgtcgtcgaccccgttgtcggcaacgtcaggctcaccaaggtcctgatggatgggggcagctgcctcaacatcatctacgccgagaccctcaagctcctgcgcgtcgatctgtcctccgtccgagcaggcctgcgcccttccacgggatcatccctgggaagcgcgtccagcccctcggacgactcgacctccccgtctgctttgggacgccctccaacttccgaagggagaccctgacgttcgaggtggtcgggttccgaggaacctaccacgccgtgctagggaggccatctacgcgaagttcatggccgtccccaactacatctacttgaagctcaagatgccgggccccaacgaggtcatcaccgtcggccccacgtacaaacacgcgttcgaatgcgacgtggagtgcgtggagtacgccgaggccctcgccgagtccgaggccctcatcgccgacctggagaacctctccaaggaggtgccagacgtgaagcgccatgccggcaacttcgagccagcggagacggtcaaggccgtccctctcgaccccagtggcgacaccaccaagcaggtccggatcggttccgggctcgaccccaaataggaagcagtgctcgtcgactttctccgtgcaaacgccgacgtctttgcgtggagtccctcggacatgcccggcataccgagggatgtcgccgagcactcgctggatattcgggccggagccgacctcgtcaggcagcctctgcgccgattcgacgaggagaagcgcagagtgattggcgaagagatccacaagctaatggcagcagggttcatcaaagaggtattccatcccgaatggcttgccaaccctgtgcttgtgaggaagaaaggggggaaatggcggatgtgtgtagactacactggtctgaacaaagcatatccgaaggttccctaccctctgcctcgcatcgatcaaatcgtgcattccactactgggtgcgaaaccctgtctttcctcgatgcctactcagggtatcaccaaatcaggatgaaagagtccgatcagctcgtgacttctttcatcacaccctttagcatgtactgctatgtcaccatgtcgttcggcttgaggaatgcgggcgcgacgtaccagcggtgcatgaaccatgtgttcggcgaacacattggccacacggtcgaggcctacgtcgatgacattgtagtcaagacgaggaaagcctctgacctcctttccgaccttgaagtgacattccgatgtctcaaggcgaaagatgtcaagctcaatcccgagaagtgtgtcttcgaggtgccccgaggcatgctcttggggttcatcgtctccgagcggggcatcgaagccaacccggagaagatcgcagccatcaccagcatggggcccatcaaggacttgaaaggcgtacagagggttatgggatgtctcgcggctctgagcccgttcatctcacgcctcggtgaaagaggtctaccactgtaccgcctcttaaggaaggccgagtgcttcacttggacccctgaggccgagggagctctcgggaacctgaaggcgctcctcacaaaggcgcctaccttggtgcctccagctgccggagaagccctcttggtctacgtcgccgcgaccacccaggtggttagcgccgcgagttgtggtcgagaggtaagaagaggggcatgcattgcctgttcagagaccagtttacttcgtcagcgaggtactctccgagaccaagatctgttacccacaagttcagaagctgctgtatgcagtgatcctgacgaggcggaagttgcgacactacttcgagtctcatccgataactgtggtgtcatccttccccctgggggagatcatccagtgccgagaggcctcgggcaggattgcaaagtgggcggtggaaattatgggcgagacaatctcgttcgcccctcggaaggccatcaagtcccaggtattagcggacttcgtagccgaatgggtcgacacccagctaccgacggctccgatccaaccggagctctggaccatgtttttcgacgggtcgctgatgaagacgggggccggcgcaggctcctacttcgtctcgcccctcggaaagcacctacgctacgtgctacgcctccacttccccgcgtccaacaatgtggcagagtacgaggctctggtaaacgggttgcgaatcgccatcgagctaggggtccgacgcctcgacgctcgcggtgactcgcagctcgtcatcgaccaagacatgaagaactcccactgccgcgacccgaagatggaagcctactgcgatgaggttcggcgcctggaagacaagttctacgggctcgagctcaaccacatcgcccgatgctacaacgagactgcggacgagctggctaaaatagcctcgggacgaacaacagttcccccggacgtattctcccgagacctgcatcgaccctccgtcaagaccgaggacacgcccgagcccgaggcaccttcggctccgcccgaggcaccttcggctgagtccgaggtatcctcggctcagtccgaggtaccctcggcacggtccgaggcatcctcgactcagcccgaggtaccctcggcccccgaggacgagacgctgcacgtcgagggggagcaaagcgaggtcacgcctgatcaaaactggcagaccccgtacctgcaatatctccaccgaggagagctacccctcgaccgagccgaggctcggcgggtggcgtggcgcgccaagtcgttcgtcttgctgggcgatgaagaggagctctaccatcgcagcccctttggcatcctccagcgatgcatctccatcgccgaaggtcgggaactgctgcaagagatacactcgggggcttgcggccatcacgcagcgccccgagcccttgtcgggaatgctttccgacaaggcttctactggccaacggtggtggttgacgccactagaattgtccgcacctgcgaagggtgccaattctatgcgaagcagacccacctgcccgctcaggctctgcagacgatacccatcacctggcccttcgctgtatggggtctggacctcgtcggtcccttgcagaaggcgcccgggggctacacgcacctgctggtcgccatcgacaaattctccaagtggatcgaggtccgacctctgaacagcatcaggtccgagcaggcggtggcgttcttcaccaacatcatccatcgcttcggggtcccaaactccatcatcaccgacaacggcacccagttcaccggcaaaaaattcttggatttttgcgaggatcaccatatccgggtggactgggccgccgtggctcatcccatgtcgaatgggcaagtagagcgtgccaacggcatgattctacaagggctcaagcctcggatttacaacgacctcaacaagttcggcaagcgatggatgaaggaactcccctcggtggtctggagcctaaggacgacgccgagtcgtgccacgggcttcaagccgtttttcctggtctacggggctgaagctatcttgcccactgacctggaatacggctccccgagggcgagggcatacaccgaacaaagcaaccaagctagccgagaggaatcgctggaccagctggaggaagctccggacagggctttgctacactcggcgcggtatcaacagtccctgcgacgctaccacgcccgaggggtccggtcccgagaactctaggtgggcgacctggtgcttcggctgcgacaagatgcccgagggaggcacaacgtcacgcccccctgggaagggccattcgtcatcgccaaagttctgaagcccggaacatacaagctggccaacaatcaaggcgagatctacagcaacgcttggaacatcaaacagctacgtcgcttctacccttaagatgttttcaagttgttcatatacctcgcacccacgcaaagttttagtcatcaaggaagggtcggcctcgcctcggcaaagcccgaccctccctcgggggctaaaaggggggagaccccctctgcgtcgaatttttcctcgaaaaaagatctcttgttagcagaatttctttcgtgctttttgactacttcaaaaagtgggtcctggaaacgacggagtacacgtaagcagccaaggctgaccgagccgagggactcctacgcctctgggatacggatacctcactcatcaccttctgtgataagtaactcgcgttcggataaagtgctccgcggatcgaacaagtctttacgttcggaagcccttctgccgaagcgatccttcgagccttctcgaccgagtcggtgacagggcctcatggacgggtgaaagtatgcgtaagcggcaaggccgaccgagccgagggactcccacgcactccgggatacggatacctcactcatcaccttccgcgagaagcaactctcgctcgcacaaacatccctgttaccaacaaaaaagtccagatactcgaaacaagaggaaaagagacacagctttacaacacagcgagggtgtgtgttctggcctcagcggccgcagaaggcacacgctacaagacactctgatcctgcaggctcgggtcttgacgctggaagggggcagtagcaccctcggcatcgacaacaccttcagcgaggtccgacctagcctcggacggcgacgcggtccgaggatctccactctgaaggacgacgtcatcgccacgcccgggcaatcgccgccagggacttctccaggaatccggcccgagcaggcggcttggccggccgccccgaagcctcagccagctgtcccccgaggacactag

SEQ ID NO: 162948 - DNA, 795 bp, Arabidopsis thaliana landsberg
agaaaacaaaaacaaacgagagacaaaactcaatccaaaacaaaacaaaagccaagttttttgtagtaagtaaaaaatccaaattatgggaatcatagttccagttttgacccttgtcttcctcttgtttgctaaagtgagccatggtgcctccaatcctagggtgattctagttggtggatctgtgggatcatggaaggttcctgattctcctaacaacactctcaatcactgggccgagaacaaccgtttcaaagtcggcgacttcatcggtactctatatatatctctctctatctctttacttctgatatatttatatgctttgattctcttgtgatcatatgttcataaaaatttatatgcatggttgaatatttgatatatatttgttgtgcatgtgaaatagtgtggaagtacgacatgaaagtagattcggtactacaagtgacaaaagaagattacgagagctgtaacacagcaaatcccttgaagcaatacaatgatggaaacactaaggttgcgcttgacaaatctggcccttacttcttcattagtggtgctcctggtaactgcgctaaaggcgaaaagattacccttgttgttttggctgaacgcaaatccggtggtggcagcagcagcggtgacgctcctaaggtttctcctgttagtcctacggctcaaactccagctccagctcccggtccagctgcagcccataacgctgcggtggggttgaaggttgcaagcggttggttcttgaccgcagtcgtggttggtttggctatggcttag

SEQ ID NO: 162949 - DNA, 3461 bp, Arabidopsis thaliana landsberg
  unsure (1)..(3461): unsure at all n locations
atgaaagagaacgtgatcatatattttaaattccaaggtcgcatgtatagcttgatgatgaatatataaagggggaaaataactctctccgtgttagaaggtaggatttgtacgaagcttggattagatgaaaatgaggttaaattgcaaatgaagtacaatgcaatgatgttgggaccaactcaagagatttacattagttatgatgaggatgactttgtttatgtaacatccacaaaaaataatcggagaagtgttttggttgtggaggagatctctaaaccgcccgagccnnnnnnnnnnnnnnnnnnnnnnnnnnnnnnnnnnnnnnnnnnnnnnnnnaagaactctacggagttgaattcagaggaggatgaaatgagagtggatgatggtgcactcatcgtcttattagaagaggaacaaggaactcaacatcaacttgaggcaatagtggaggatcacgggactcaacatcaacttgaggcaatagtggaggatcacggaactcaacatcaacttgaggcaatagtggaggatcacgagactcaagaagatgaaacacgctatgatgagtctatggataattctgataggggggaacagtatgttgagtcgccacctgctgtagaaccgggtatgtttaaaaaagaattggaagacggannnnnnnnnnnnnnnnnnnnnnnnnnnnnnnnnnnnnnnnnnnngcacgaggtggtggatagagctgcatttgctaacagttttggttatgtgattaagaagtcggataaggagcgctatgtcctaaagtgtgccaaagagagctgttcttggcgtttacgagcgtccaatatcagtaatactgatatattctcgattagaaggtacaataagatgcatagttgcactcggctaagtaaaggtagtagtaggctcaggaaaagaaaaggcaacccccaattagtcacagctctccttcatgatcattttccgggacagttggaaactccggttccaagtatcatcatggagctagttcagacgaaattaggtgtgaaagtatcatactcgacagcgctaagggggaaatatcatgcgatttatgatttaaaaggtagtccggaagaaagctacaaggatatcaattgttatttatacatgttgaagaaggtaaataatggtacagttacttatcttaaattggatgagaatgataaatttcagtacgtattcgtagctttgtgagctagcattgaaggttttagagtgatgaagaaagttttaattgtggatacaacacatttgaagaacggatatggcggagtgctagtgtttgcctcggctcaagatcctaaccgtcaccattacatcatagcgtttgtcgtactcgacggtgagaatgatgctagttggcagtgttttttcgagaagctaaaaacggttgtacccaatacttctgaattggtcttcagaaccgacataaatgcaagcctcataaaggccatacggaacgtgtataccgcggctcatcacgggtattgtaattggcatttgtcccaaaatgtaaaagaccatgctactaacaccaacagagacgtactcgcatggaagttccagaagttaagtcggaactacaccgttgctaacttcaaccgggcgtatgataagtttaagttgagataccccaaggcgactaagtatttggaggatacaaccgtggaagaaaaatgggcaagatgttttttccccgggaaagatacaacttagacacaagcaattgtgtggaatcttcgaacaatgtgtttcgcaacgtaaggaagtactcgttaatgccaatgcttgatgcaatcatcaaaaaaatctccgtttggtttaatgaacatcagatggaagccgcgtctggatccttagaaaataagatggtgcctttgttggagaattatttatatgatttgtgggttaaagctgagaagctaaaagtgatggagctaaattcattcgagcgtgaatatgtcgacacatgcgagagagtaatagaatatatggtgagcttgcttttgaaaacttgcagttgtaaggtgttcgatatccaaaagtatccttgttttcacgcatttgcctgctttcattagcattatggatgatgaagatcggagaagaggtttggagttacatgatttggttataaaatattattgggcgaagttgtgggcattggcgtattttaagactatttatttagttccggataggtcgcagtggaaagtaccagatgaaataaaagcgttgaagatagttccgctgtctaaaaaaccgaagaagaaaggaaaaaaatgctaaggtttccatcaaccggggaaaagagtccaaaacgacaaaggacgcaaaacaaaaggcgtccaaggcaatcgttttaatggttattatttgggaatacgcctatctgagtattttactttgtttctgcagttatttgtttgtttgcttgtatggacatactatataatactgtattttcctttctgtaatattatgtttgtttctgttgttttttggtaatactggttaaaaccagtaataccatatctgtttcgagaaaaatgtagtttaatccccaactttcaaaaaatggccaatcaatacgacaactaagtaggaggccatttaaaacatcaacttacagttgactaacaaataaaccatgaactttgcgttgacgaggccacattatacgcgtcgttaagtcgattaacagacccaataaacgacgttttctcccgttagtatctctctgttagtcaagaaacggtgacgtttataggttaatagaaacccgattgtttgtcaaaaaaccccaaatccaatacttcaaatccctaattctcttcttcttctccaaattctgtgctttttctccaaattctccatcaaaagctgaagaaatgagctgcaaatctggaaattcttatcctagtattctagacggaggtcgttggggacgtggcttagcttcgaagtgtcactgtggtttggaggtcgtcatctatacttcagcttcaaagtcgaatcctggaaggccattctttcggtgtccaacgaaacaagatgtaagttgaattgagtttgtgtctttttggtttggttggtaattgatttccgattgaaaacaggatcatttgtttaaatgggttgaagatggcgtgtacgaagaggttgtagaggctttaccaaaaatctccagcattgacagtgagataatgaaggccaaatgtgaggttgcaatcgagattgagcagttgaagactatgataaaagaagtaaaggaagaagctatgtgtagcgaaagggaaatcaagaattggaaacggatgatcaaatgttgcttggtgtgtcttggttttattgtcattgtgattgtggttggtatgataatgttcggtaataccaaagaacaaaagcttgttcttggttactag

SEQ ID NO: 162950 - DNA, 1884 bp, Arabidopsis thaliana landsberg
  unsure (1)..(1884): unsure at all n locations
atggatcctaaggggaagagtatcgtgatcaacgataaagagaaggaacctttcgtcaacgaaccaaaggatgaccagcctaccgactcgggctcaggccatagacaaaaagatgggaagaagaagaagacaaggtgcattaaggagatcgtctactacgacgacagtgatgagtccacttcttcccacaaggacaacgacgactacgacaaacgaaagacggttaactcgaacttttctttcgattattcgcgtattcctcaaagtgcaaatgctcatttattatctattccacttggtaaaccatctcattttgatggagaggactacggattttggagtcacaaaatgcgtagtcacttgtctctctccatcctagtatatgggagattgtagagagtggaatgcactttgatagctcagatagtcctatatttattaatgaacagattcataaaaatgcacaagctactactgtgttgttagcctctttgtgcagggacgagtaccataaggtgagcggcttggacaatgccaagcagatctgggcaccctcaagatctctcatgaggggaacgacgtcaccttactcaccaagatggagttggtggagggcgagcttggaagattcgcgatgataaggggtgaggagccaacccaaacatacaaccggctcaagaccctcatcaacaaaataaggagctacggaagcacgcgatgaacggaccatgacgtcgtccgcctaatgcgaaggtcctttactgtccttgatccacatctggtgaacaatattcgtgaaaatcccaggtacaccaagatgtcacccgaagaagtccttgggaagtttgtaagcgggcgaatgatgatcaaggaggcgagatacgtggacgacgcgttgaacggtcctattcatgagcctcaacccattgctctcaaggcaacgaggagcaaggaggcgctaccgagcaaggtggcgcaaattgaggcggccgggctaaataatgaggagatggccctcatcattaagcgcttcaagacggcacttaaaggtcgcaagggacagccaagcaagaccaagacaaaggagaagcgctcgtgcttcaaatgtggtaagattggtcatttcattgctaactgtcccaataatgaaagtgaccaggaaaaggggaacaaaagggtgaagaagaagcattacaagaaggccaagggcgaggcacatatcagaaaggagtgggattcggattgctcctcctccgactccgacaatgaaggactcgccgccaccgccttcaacaagtcatccctcttccccaacgagcgtcacacttgcctcatggcaagggagaagaaagtaagcactcatgatactagaacttatgcttcttcaagtgaggatgagtctagtgatgatgatgagatannnnnnnnnnnnnnnnnnnnnnnnnnngatagatctaaaattaataagattaatgagttgattgatgctttgaatgacaagaatagattactagaaaaacaagaggatcttttatatgaggagcatgataaatttattaaagttcaaaaatctcttgctctagaaactaagaaaaaatgaactattgtcttctgagctatctacttgcaatgattctatttctaatcttaagaatttaaatgttgatttaaatgctaagttagaaaaagtaaatgttgctagttcaaccatggagcatgttgttatttgcaataggtgtaaagattttgatattgatgcttgcaatgaacatgcttctaccattcttaagttgaataatgatattgctaatcttagtgctcaacttaaaatttgcaagagtgaacatgaaaaattaaaatttaccagggatgcctacaccatag

SEQ ID NO: 162951 - DNA, 1090 bp, Arabidopsis thaliana landsberg
ctgcctccaactccgaagaggcgccgcaagaagaaatatagccttagttcctcctcatgttataaccatacgatgtcatcgctttcttcgttgcccgacgatgttgttttgaaatgcttagtccgcgtcccgagacgctattatcaaaacatctcttgcgtctccaaaaggctcaggtccctagtgcgctcgcctgagctccaccgattgcgatctctcttccacaagaattccatctatctctactgcctcgagacgatgaagtttaactggttcactctctctcggagtgagaagaagactgcgattgagtatcaattagtccgctaattacattcccttcttcccactcaatgttatcttctaccaacgtggtggtgggatcaaagatctattccattattggcagatccgcaaaaccttgctcagatttatggatcctcgatactcgaactggaaagctaaccaatggaccaagcatgaaggttcccttcccgcgtgaagcagctgtttaattggtcgaagggaagatatacgtgacgggactaggtcaaggagagaaccaaattcaagtgtttgatcccgaatcgcaaaaatggacattcgcgtcggaggagaaagtgcgatcgctggaggagaaagttttataatggataatgagagtagacgctatttctataatgtgagagaaggtaggttaaaggggactatgtggatggaaagtgatagaataagctctctgtgtgttgtagacggtgtgctctatggttattttaggtggggtaattaccgtgaattaatgtgggctgatacaaagctcaatgcatggagaagattgaacactcgtgatgggaagacacttgaagaagacgtatcttataccattgcaatgccgggatacaatgggaagctagcggttttttggtcagtgaatgagtctgattacacgaagaagaacaatgaggttatgtttaaattgatcgtgttggatagggttggggatgtgatttgtgggacggtcgagtggtctggtgttgtaggcacagttaaagcatttgattttctgcgttgcttagttgtttctcactga

SEQ ID NO: 162952 - DNA, 5374 bp, Arabidopsis thaliana landsberg
cccaaattcaaactgccccggtttgtttacccgtttacccaataaaccgaaaccggagcctaaactcgactgggtcacctcactggtgtaatggagtggactagtggtgtccgctttcaatgcaaaatcctcaatttggtttcggcttctccgatgcattagcatgtcttgtcgaactgaaagtctgggactttcccctctaccttccgctaaatatttgcgttgacttcatatctttgcgtctacggccatatgaactagcgattaagcaatctattctcgctctctctcttcccactggacgcattcactgaaatccccaacatttggatactagattaagcgtttgtaacgaggtaaatgctgaagtttaatcatcttctctgtttctactgattctgtgaactgggtttatctctgttcccacttctcctcttttgggggaaagctgtttgatttcatgttttagattcctgattgcttaatgttaccttactgttaaagctgtctctagttgtagatgaagtaatgtacttttaatctcgtgtacagaagatggatcgtgtcagcaatctaccagaggaggttcgttgtcatatcttgtccttccttcccaccaagcacgctgctttgacttcggttctctccaagagctggctcaatctgtggaaatttgaaactaatcttgacattgatgactctgattttcttcatccggaagagggcaaagcggaaagggatgaaattcgacagagcttcgtggaattcgtggacggagtactggctttgcagggtgattctcccattgagaaattctccctcaagtgtataactggtattcatccagatcatgtgaatcgttggatatgtaatgtgctgcagcgtggtgtttcggatctttatcttttcactgatttttctgatgaggataccgaagaggatggtggttataggctacctcaagagatgttcgtcagtagaacactggttaagctgaaattaagaagtgaacactgtgttaattggtggcattgggatattggcgcttccttaccaaatcttaaaagtcttaatattgactcggacttgattttctttggtgagatggagaattttctttcttctttccctgttcttgaggaagtacacatggctaatatggagtggagagaattagatgaaaccatgtcaagtgcaagcctcacgaagttaagtatccacggcaccggtgttgaagagtttgaacatccaaagagcatttctattgatactccaaatctgctttacttaaactattctgatttagttgcggaggattatccattagttaaaatgggaaagttacttgaggctcgaatccatcttatagtaaaaaatggagatcagatcaagcggataagagaaccaaataatgatttgttagaggatgatgagggtgatgttgttctccaatttggcaatgtggtgaagctcatgaacggcatccaaaatattcagacactttacttaactgaagatactcttgaggtcagttttctattttgttctctctggtctatttttgaaagatcaattgcaaagtacctcgttcgtttttttttcttgttttcaggttcttactatgtgctgtgaatcaatgcctgtgttcaacaacctcaaaaccttaggacttaaaagtgatgagggtcgcggttggcaggcagtgccagctcttctgagaaactgtccacatctagaatttctaatcattgaggtcaattacagaccataaaactactcggacaacacatttgttaaagttgttggttagactcaatcgtcttattgtcttctttatgctttcagggtctcttacactctgtgacagataaatgcggggatgcttgtgactgcatttcgcgggaagacaaaggtagttcgctcatatcttgtccagtgaagaagttagaggttagagggtttcgtggaacaattcgagagaaagagatgataaggcatttcttggagtatttcccgtgtttgaatgagatggagatagatgccgaagagaatgattctacaaactttgaagtgcctagaattttaaaagttgtcgcgtataggctccacgatgtggtctcgacagagatagttggacattggcagagttcagcacaatctgggggttggtcccagacccagatggatgagatgtactatgaggtatactatttgatcaccgttttcaatcacataaattcatgacagctttgaataaactaactgtcttttcttttcttttacagttggctccccgcaataaagagcgtatctacgatatgttcttcttcatgcgtagagcttcttccacggtacctcctcctccgccacaagagatgtctcaagactaccttcagatgcaacttgaagttgcggatcttaaggagaggcaacgagaccaggaagccaagcatgcggatcttaaggagaggctacaggctatgttagatatgattgtcgaccagaacccaattatagcctcagcgttgagggctagagaggcaactaactcagagcgagaaaaggcgtcgagtggtcaggagatgaccgagaaggagcgggactatgatgctctgttcgatatcattgtcgagcagaacccaatgctagcatcggcagttagagctctgcgtgtaaccgactcagagcgtgctgagacatacagggatcaggagataaccgagctcggccaagctacggcaacagattttccgccacgagaaggagaatagatttgtgattgttttcttaatgctttccaatttggttcggtttgtgtttatttagttggaattccagttcaaaatcctgaagcgaagcagcttgtaaatttggatcttcatatcttccctactctctcgacgttgcatctgtacacggtaggtgcggaagctaactgttctcttctgtctctgctgattttatactcctttgaaggtatcttatatcatttttgcgggtacaagtaattatgttcgactgcatataaagttatttgatttgaattgtccggttcgcattaaccaaaccaacttaagctttcagttcttttttcttcccgataaaaagcaaactttcagtttaagaagctgagacatccaaaattcaatagcatcatcagctcatcacgatgcttctctgtttataatcctaatcaattttgcaactgggcgttgggcctcacttccgtaacccaaagtcaaacagttccggtttgtttaccgaattaaaccggtgattaaagtagaaccaacaacattcacacttggttttaaaaaccctcaatttcgtttgtctgctgtcttcttcttcttaaagttggatgtttcggctactccgatgcatttgcatgtattgtcgaactgaaagtctgtgacttttcttctcctctacgatagaaaccagtgacctagcactcccaactctcactcttatcactggacgcattctccaaaattttgatcttcgattaagccattcgtagcgaggtaaatgctcaagttttacctatctcctctgcttccactgattctgtttcttgattcaaagttttctttgtgtgaattcatattttcgtgtgaattgtgaattagggttttctctgttcccgtttctactctctcatcttttggggaaaagttgtcaactttcatgttttacctgtagccgtaataacgtactcttaatctcgtgtacgcaagatggatcgtgtcagcaatctaccagacggggttcgtggtcatatcttgtccttccttcccgccaagcacattgctttgacttcggttctctcaaagagctggctcaatctctggaaacttatccctattctcgacattgatgactctgaatttcttcacccggaagagggtaaagcggaaaggcttgaaattcgacagagcttcgttgatttcgtggacagagttttggctttgcaggatgattctcccattgatagattctctctcaagtgtataactggtattcatccagatcatgtgaatcgttggatatgtaatgtgctgcagcgtggtgtttccgatcttgatcttttcattgatttttcctatgaggatacccaagaggatgaggatatgctacctcaagagatgttcgtcagtaagacattggtcaagctgaaaataagaaatgatcgttgtgtggattggtggtgtggaaagggaggcacttccttaccaatgcttaaaagtctttatattgactcggacttgattctttggggtaagatgaaaaggtttctttcttctttccctgtgcttgaggaattacgaatggctagtatggagtggaaggaatcacacgaaaccgtgtcaagtgcaagcctcaggaagctaagtatccttggcaccggttgtgaagactatgtgaatccaaagagcatttcttttgatactccaagtcttctttacttaaactactctgatttagttgccgaggattatccattagttaatatgggaaagttacttgaggctcgaatcaaccttatagtaaaagatgatcagatcaagcgggtaagagagccaaataatgacttgttacaggatgatgcgggtaatgttgttctccaatttggcaatgtggtgaagctcatgaacggcatccaaaatattcagatactttacttaactgctgatactcttgaggtcagttctctatttcgttctctctggtctatttgagaaagattagttgcaaagtatgtagttggtttttaattcttgttttcaggtactttctctatgctgtgaatcaatgccggtgttcaacaacctcaaaaccttaggtattaagagtgaagagggtcgcggttggcaagcagtgccagctcttctgagaaactgtccgcatctagaatatctaatcattgaggttaattacaaaccatggaactacttgacaaaacatttgttaaagatgttggtcagactcaatatactcggtaatcttatcgtattctttatgatttcagggtctcttacacaatgtgacagataaatgcggggatgcttgtgactgcatttctcgggaagacaaaggtcgatcgcttgcttcttgtcccgtgaagaaggtagagattcaagggtttagaggaacgatgagagagataaacatgatagggcacttcttgaggtcttttaagtgtttaaaggagatggggatatttcctgaagaagagggtcctacaaactttgaaaatcctggagcgtttgagtatgttgagaagatattgaagctctacaatgagatatcgaattgtgatgtttacttcctggtgtggggttacatgcgtaggaaatggactgcacaatga

SEQ ID NO: 162953 - DNA, 3559 bp, Arabidopsis thaliana landsberg
  unsure (1)..(3559): unsure at all n locations
atggttcgcctagctcacgaaatggtatgacacatgactatctataataattagttacacatacaaaaaactgactatttatttcacttgttaatgtagaagagaaagagttctgaccctagtaaagtaacaagaagtaaagtctggatagtgggacatacacattcagatgggagacctgttaagccagagtttgaagctgttattgtaagaatttacattcttattatggattttgtaagtagcttagagtaattgcggcttgctttttttgattcaggataaaataaagactatagatagtcaaatggactccagctctagtataagtatcaaagatgatgctgtgagccaagtattaggaaaagacaaatccggaagagttagaggaatgggaagagggataacttcttccaagttagcattcatagaggctagagacacacatgtggaaaagcttgaagcaacccaagcagaattgctcagcaaggttgaagacctgcaaaatatagtgcgtaacttagctgcagagaaaacggtaacattttgactttgtttatattttcatgtctgaaaagtttttaaatatttctttgcatgttttcttcttcgatatagcgtgatggttgcaattctgagtctactaatgttaacaatggaggaccaaggtgtcagctgctggaatggtattcagatgttgatgttgttgtagtggaagcagaattctgctctgctgatccaacatacaagataggacgtattccacttggtcctaatgcagcagctgttatattgaagtctgctgaaaataaagagacatctgtttggaggcctacccaaactataacttcacttggcgaagctgttggatgcaaaattgcatggccattcgataagataattctggacaatatggactcaccaaatggaattaagactgctggttcatcggtaacagttctttcctttgaacttgtatatatagatttagagcttttgattagatggcccataatattatattcttgctttattctttaggccaccaatgcattagatgatagggtcttgatttatgattggactttcgaggatgaactagtcgctgaaggtagtctgttctcaacggacaaaaaggaattagtcaacaatattcctttgggaccaaatgctgcaattgtgactgttagtaaagtggttaacaaagaggcttttctgtggagaccaagtgctgacatgagttttatgggtgatgcactaaatgagaacattgcatggcctatagataaggtacatttcattcaacaatggcgtcaagaatcagtttcaaaaaatgcttcaccaaaggtaaaattccaactcttttgtctgttatgagatgttgaattttctgctaactttattgtattgactatgagatgattttctgattgtagagtactagtgtgagtgtaagtaacaccaccgacaccaacaaaggtggaaagaagttatgcatcatcttagattgcaaaggaacaagagaaaaagttgcagaaggcagagtttgttctacaaacccagcagatctcgtccattttgtgccattgggtcccaatgctaccaaggtttgggtagacgtttctaaggttggagatgcaccagtttggagaccaaactcannnnnnnnnnnnnnnnnnnnnncattaggtactacagtggcttggccaaatgacaaacttgttgtgtaatttgtgtacttttaagtacttagagctcagtaacttttgtatcttcttatgtcatggtgtgaacttggtgtaagctgttcttcttaatgataatttaaatggttttaagaagtttttcattattaacagcaggtttccatatttgacgattagaaaacaacaaacaatagaaataatagcagtacaaaccattagtgctataataaaaacataggtagataaagtaaatcataacaaaataaaaatgttgttatacagtttttaattgcattaaaataagcgctattttaaattactctattgtagcatagccaaaaaacgttatataaagtgttttatctattatgacgggggtagatagagcgcttaccaaaccgctatactaaccatctatagcgtttatcggatgctataaatacttcattttcatgtagtgtttgttagtatttctatggtcaaaacttgtcacaatccaaagcatttgactaattatatgggttaaagatgaattaggaacacttataccgattttcttccagaagaagctaaaaccaacaaaaaattgcttagaagcagtaaatagctttgttagtgtttgtatggtcaaaatgtgtcacaatctaatgtatttgactaatcataagagttagagatggagtaggagtgtttagacaacattaatacctattttctcccaaaagagactaaaacgaacaaaacattgctgagaaacagtcaatagcttcgttagtgtttctatggtcaaaatgtgttagaatccaaagcatttgacaaagaagaagagttaaagattgattaggagtgtttagacaacacttatacccattttgtcccaaaagaggctaaaaccaacaaacaattgcttagaagcagtttgataataggtttttagtcaattatactaaaacaccaatcatgtcgttgtagtattttaggttgtcaatccaaatgggtgtgatgctaacaatcaagatgtgatcagaagtcattaagtcaagccaagcaataacaggttttggtgtgttctagcaatcctaagtgaacatgcagaaaacagaaattcaagcagaaacagtaaaacactcgaccaacacagctcgttgcagagcactgggtgtgatcgagtgacaggtcgagtaacagacagaaaataaaacacaaatactccactcacagtctgttgccagacaactgggtggtcgagtatgaggtcgagtaacaagaaagaattgcagaaattaagcgacagataacaagatgcagtaaacaacaatagagtaaacaaagaattcaataagataaagaattcccgaggatggggtaattgagaagtttcgtttcctcagtttacaggtgattgacatgctcaataaattaaccctagacaacaagttcattaaccaaatctaagtgccaccgcaacagagactctcaagttaacctagtcccagactcaatcaccattaacgagatctaacctaacaggcattacgaatcaacaagttaaagccaaaacgctccctgcaaccaataccttggtactgtaagattaatggtaatctccgtgaggaggctcatctcatatatgacaactatatatagagctatacaattagggttgtgtgtatcgagtatattctatacaaaggaataataggaatgtttctatatatctattctatcaggtacagggtcacgaatctctggaattagtggttcagacatttcatcgaacaccttttgggcgcgaaaatgtctgggctcaaattccagttgatcagaaagcaataggcattaagaacaactaa

SEQ ID NO: 162954 - DNA, 913 bp, Arabidopsis thaliana landsberg
atgcggatgagctgtaatggatgcagagttcttcggaaagggtgtagtgaggattgtagtataaggccgtgtttggcttggatcaaatcgcctgaagcgcaagctaacgcaactgtctttctcgccaagttctatggccgtgctggactcatgaacctcatcaacgccggtcccaatcaccttcgtcctggttagtggtttttcttttaaccttttgatggcagttttgaattatactttccaacgatgccgttttgtcttaggtcattttttgaacctaattagatcaaatatttttgcagggattttccgatcgttgttgcacgaagcttgtgggaggattgtgaatccgatctatggttcggtgggtttgttgtggtcggggaattggcagctttgtcaagacgccgtggaggctgtgatgaaaggagaaccgatcaaagagatcgccacagacgctgcgacgatcggccaaggtccgcctcttaagatctacgacatccgacatatctccaaggatgataactctgccgccgcggctactggctcaaccgatttgaaacttgcgaaaactcgccgtgctaagcgggtctccaccgtcgcgatacaggcggaatcggagggaaagtctgacgaggctagtcacgattcgtcgttgagtcatcagtctgaaatagtggctgctcatgaaggagagagcaaggaatccgagagcaatgtctctgaggttttggcattctcgcctccggctgtgaagggctccggcgagataaagcttgacctaactttaaggctcgaaccggtgtcacgtgcgtatcatgtggtacctgttaagaagagaaggatcggcgtgtttggcacgtgtcagaaggagagcacgtgtaagactgagcttatgctctaagctccgttt

SEQ ID NO: 162955 - DNA, 1329 bp, Arabidopsis thaliana landsberg
atgacaggattcatagaagaaggttggatattcgataataaaaaaatttggggttgttatttttcttgtccgtacgacaatatcttaacgttcaagttcaataattaaccaaccacatattgtagaatataaagtaattaagtgtgctagatatttaatttaagtatgactttgccttgagaatagtcgctagttgttctattacatatcattttggtagggtcatgaaaatgaaaactatatagctttttcacaaaacaacaggactttttaaaacatttttgtttcgattatcgtgaaagttgccatcggttactattacatagaccttaaaattatttagcagaaaaaacactaacccaagttgttttgcagctaaaacaaactcaagattagcaacatgaacatatcaaaatagacaaataagaataaagaagatagactatactatttccatttggttccggttattgtaccatgcctagtaattttctaatttcaagtcacattcaaaattaaggaagctttcttttcattaattttttaaatgtccattgaattggttattttgttgttgttgttgataaatagtcgtgttcccaagttaacttgaaatatcatatcagctatattggaatagtgaaagcaaaaaaaaaatccatggatcgagatgatgcatgggaatggtttgttacaatcgtaggcagtctaatgactctcctctatgtatcgtttctcctggctttatgtctctggttatctactttggtccaccacatacctagatgctcaatccattacttttacattcctgccctaaacaaatccctcatttcatcagacaacaccactctcaacttcatggttcgtcttaaaaacatcaacgctaaacaaggaatctattacgaagaccttcacttatctttctccacacgtatcaacaactcctctcttcttgtggctaactacacagtgccaagattctatcaaggacacgagaagaaggccaagaagtggggacaggccttgccttttaacaaccagacggttattcaagcggttttacctaatggctcggcgatttttcgtgtggatttgaagatgcaggtgaaatacaaagtcatgtcctggaaaacaaagaggtacaaattaaaggctagtgtgaatcttgaagtcaacgaggatggagccactaaagtcaaggacaaagaggatgggattaagatgaagatatcagattcgtctccacaacgactaacatttttccaagtttgcttttcgattatttgtgttttgatgaattggctcatcttcttggcttttcgttaa

SEQ ID NO: 162956 - DNA, 800 bp, Arabidopsis thaliana landsberg
  unsure (1)..(800): unsure at all n locations
atgttcaagctatatggagaggtacacatatattccactgtgctttctttgaccccaacctcaccttagaggataaaatcaacgtgatcctgcaaagttgcaacaacaaaagacaagattctttaacaagacaaattctcctatggactttgtggagaatatggaaaagtcgtaaccttcttttctatcagcaaagaagtagtgaatggaggaaagaggcgcaacaagctgtaacggatgcatatgaatgggctgaccaaggaacaattgaaaacctgacctccaataacagaactgaggagcccatccacggctggatgaaaccggacccgggctacataaaatgtaactatggctacagttacaaccagaatggtaatattgttaaggcaagctggattctcagagacagcaatgaatattacaaggaagcaactcaaagtacaggacataactgtgtcaacacgttagaagcggaacttcaagccttactgatggcaatgcaacgtgtttcggggaaagggtacactcatgtaatctttgaaggagacaataaacaagccgtttcactaagcaacggcaaatcacacaacttccaagttcataatctgatcagagaaatccaagtataggagaagcgcttcannnnnnnnnnnnnnnnnnnnnnnnnnnnnnnnnnnnnnnnnnnnnnnnnntctttagcaaaagcgactctacctctcaattcaatttttgtaaatcattcttatgttcctcaattccttgtacaaatccccaatgaggatcacatttcatctcat

SEQ ID NO: 162957 - DNA, 1372 bp, Arabidopsis thaliana landsberg
atggaacatttgccaattcatcttccacatgaagctgctcttggtgggccagtacaattcagatggatgtatccttttgaacgattcatgaaatctcttaaaggaaaggcaaaaaatcttgctagagttgaggggtcgatagtcgcaggaagtttaaccgaggaaacgtctcacttcacgtcgtattactttagtccaagcgttagaaccaaaaagactcgtcctcgacgctatgatgatgtaggtgttgcacctacatataacgttcccgatgttccagatacctatgcccaaattggtagactcgcagggaagttgaaagaagtttggtgggacgaccatgcgctttctcgcgcagctcacaattacatactccgaaatgttgattacattcaaaaatttgaaaggtataaagcaacctagttttattcataatttttatatttaataattagtgtgatattaattaaggaagctaattaaacagctacattttaatttgtaggttatttgattcacaaatccgtgaagcatgtcctggattagaagaaaaagagtatgaaacttacaaagatcgtgattttgctagatggttaaaatactatgtaagtataagaatatttgaaagtaaaaattctattacttatttacttttaaaaatgacaaatttaatattttctatgtgtaggttataaatggatgtggaaacgaaccattaccactttggttgcatgagcttgttcaagaaccaagatctaagatcagaactgctctgatgtacttcactcgcggctatactttccatacgtatccatatggaagtcgaagggcaactgcaaattatggaatccatgtcgaaggtgaaactgagttttatgggattctgcaacaaattctagaagtcgaatatccgagacttttgaatttgaaatgcatcatgttcaagtgtgattagtttgatccggtgatcggtccagaggtacgtgtaaataacttaggcatggtcgatatcaatgcaaacaagacttatgccaagttcaaatcatttatcctagcatcacaagcaggacaagtaagctttctatattacccgcgtgtgaggtcacggcgtgaagtgtggttgcccgttattaaagtgaatcccaggggccgcatagtcggtttagttgatgatattgtgatgcaacaagaaagagttagagaagtttccataccagacataacaacagaagatattatccacattgacctacaaaatagagaattagaagacatcatgacggacggttccgaaaaagaaaaacaataagacgaattcagcaaatctgctgaaagcgttgagtcaaaaaatgatagtaatgattcagaaaat

SEQ ID NO: 162958 - DNA, 1355 bp, Arabidopsis thaliana landsberg
tgcagggaaacactaagcagcaaattacaagtgggtgatttgtgtttgttacatagtcttatatctaactatgtcagattctggtgagcctaaaccttctcagcaagaagaacctctacctcaacctgctgcccaagaaactcagtctcaacaaggttacatatacttccttctatctcaattctagttgtcgtctcattgagattttttcttgttcttcgttgttagctagaaattttcatttacactaatcaaatcattcttctgtttcagtttgcactttcttcaagaagccaacgaaaagtaaaaacataagaaaaagaaccattgacgctgatgaagaagacggagattcgaaaagcgaaagctctattctacaaaatctaaagaaagttgcaaaacccgatagcaagttatacttttcttctggaccatctaagagttctactacaacgagtggagctcctgagaggtccgtctttcactacgattcatccaaggaaatccaggttcagaacgacagtggagcaacagcaacccttgaaactgagaccgacttcaatcaagacgcacgagctatccgtgagagagttcttaaaaaagcagacgaagcattgaaagggaataagaaaaaggcttctgatgagaagctgtacaaggaattcatggatatacagatcacaagctgggtttagaagagagcaaacaatctcgagcgagaaagctggaggctcacacgggccattaagagcttctgctcacatcagagtatccgctagattcgattaccagccagacatttgcaaggattacaaggaaaccggatactgtggatatggagattcgtgtaagttcttgcatgaccgtggggattacaaaccgggatggcagatagagaaagagtgggaagaggcagagaaagttaggaagagaaataaagctatgggagttgaggatgaagatgatgaggctgacaaggatagcgacgaagacgaaaatgcattgccctttgcttgcttcatttgcagggagccttttgttgatccagttgtcaccaaatgcaagcattacttctgtgagcattgtgctttaaaggtatgatcataacttaaatcacaattacgagtctgtttttttttggttgtgaagaaatgtgtgaaactagcgagttttgtttaatgtaatgatgcagcatcacacgaagaacaagaaatgctttgtgtgtaaccaaccaacaatggggattttcaatgcagcacatgagatcaagaagagaatggctgaagaacggagtaaagctgaacaaggattgtgaagtccttctttcactggacaaaaaggcaaaaactatacat

SEQ ID NO: 162959 - DNA, 1590 bp, Arabidopsis thaliana landsberg
  unsure (1)..(1590): unsure at all n locations
atgaaagcattattctctgttttgtgtcttgttcttttggtttcggttttaagagcagcagtgacaaaaccagattccggaatcttcaccggatgccttcgcaatcggactagtccggagaatccaatcaccgatgccatcttcacctcccgtaacaccaccaccttcttgtcttcttacgtgtcctacacgaaaaacaagaggtactcgagccttaactaccagaaattagtagccatcgtggcggctaaacatgtatcgcatgttcaggccacggtggtctgcgcaaaggctaacggtatacaactccgtatccgtagtggaggtcatgactacgaaggcctttcttacacatcgtctgtgccatttgttatcctcgatatgtacaatttgaggtctattactgttgacgtgtcaagcaagaaagcatgggttcaagctggtgcgacattgggagagctctacacaaagatcaatgaggcgaaccaaacgttagcgttcccggctggcgtttgccctacggtaggagtgggtgggcacataaccggtggaggatttggaaatctgatgagaaaattcggaatcacagtggatcatgtcattgatgctcagttaattggtgtcaacggaaagctcttggatcgagctaccatgggagaagatctcttttgggccattcgtggcggtggtggtgcgagtttcggagttatcctctcttggaaaatcaacctcgtcgaggttccaaagatcctgacagtgtttaaggttagcaaaacattggaacaaggaggtactgatgttctctacaagtggcagcttgttgctaccaaagttcctgaagatcttttcataagagcctggcctcagattgtaaaaggaacaaaactcggcgagagaaccattggggttgtattttttgctcagtttttgggtccaaccgataagctgatggagataatgagacagagcttgcctgaattagggctaagacgtgaagattgtcacgaaatgagctggttttacacaaccttgttttgggccaattatcctgtaggtacaccaacacgcgttcttctagatagaccgtcgactccaggagaatttttcaagagcaagtcagataacataaaacaaccaatcccaaaagaaggattggagaagatatggaagacaatgttgaaatttaactttgtatggattgaattcaacccttacggtggagtgatggatcggattccagctactgccacagcgtttcctcaccggaaaggaaacttgttcaatcttcaatactctactatatggttggacgcaaaggaaacagagaataagctgactatgatgaaggagctttacgaagttgcgggaccttacgnnnnnnnnnnnnnnnnnnnnnnnnnnnntaattacagagacatcgatattggcagtaatccgagtgatgagacaaatgtggatgaggcaaagatctatggatacaagtatttcttggggaatttgaagagactcatgcaagtcaaagctaaatatgatcctgagaatttcttcaagaacgagcagagtattcctcctgttcgtgtaatagagtaa

SEQ ID NO: 162960 - DNA, 1323 bp, Arabidopsis thaliana landsberg
atgaattacgatcgtcatgcatataaagagaatttgtgcaagcatgataacgcgtatcagaggactgcgagtacgaatatgatagtgattattcatatccagataactacatgagtgattattctgcgtatgaagaggagtcggagccagaatttgattacggagatgattctccttttgagggtatccctgcatccttttgtcgtcgatggctgcaaatggtaagaagatttaggtttaggggatattatattcttcttcgttttgctgattcttttatattatttgtgtttcttgcaggtgtctaactgcttatccaaagggatataactttattggttacttgtctctgtatctggaagtcgccgataatggatcattgccttttggatggagaagacatgctcgatataccctaactttagtaaatcaaaactcgaaaaaaagcttccaaccaaatggtgattatttatttgcctagagcatagttcaagtagtgtgatatattagatgcatttaaatgttgattatgttttgtgattttgtagaagtacaagagtggtttgacgactcaatcaaatggggttgtccatccatgtttcccctaaatgaaatccatgccaaagatagtggatttctagtaaacggggaactcaaaattgttgccgagatagatatccttgaagttattggagacgtagatgtatcagaaggtatttcaacagtaaaggaaaccatacatgttaatggctttcaacttcttccttcacaggtaaaaatacaatttaagaatgttcagactttgtgtgtagatagatagtgttctattatatggttcttttctgaggtgcatgtctcctaaactgtctttgaatagggatgcgaatttatacttgtattttcatttggcaggcaaaatctgttagccatatttttgaaagacacccagagattgcatctgaaatccacccaaagaactcaagtcttaggactggttacatgaacgtccttctcagcctaatcaagactatgtgccagtcgactcaggaactttccaagaatgatctgtcagacgcagatgctgctcttgcatacttgacggatgcggggttgaatctaaattggttggaggagaaactggaagaagtgtcagaaaagaaggagaacgaggaagctggtgagactcgggtgcatgaaattgaagaagagttgaaggaattaaagctgaagtgctcaaacctggaagctcagctggagaaggagaaagcagatgtgtctgtggccagagctcctttctccttcgatgatattgtttaatggctt

SEQ ID NO: 162961 - DNA, 5999 bp, Arabidopsis thaliana landsberg
  unsure (1)..(5999): unsure at all n locations
atgaaagctttgagaagcaagaagaaggttggttagtgttttcgagtcgaatatgacttgttgtcatgtgtatgattgagtataagaacttaaaccgcaactcgatcttaaaagcctaaatagtgtatccttgttagaagacacaaagccaaagactcatatggactttggctacaccatgaaagctttgagaagcaagaagaaggttggttagtgtttatttgtgcaaaactcgtgtttttagtactctgttcgtttcgtgcaaaattggtgtttttagtattgtactcgacctgcttactcgattgctcgaccgagtgctttacctagtgcttggtttactttctgttcttgttatttgatttgcatgttaacctgttgcttaggtttagtagaaacacaccaaacttattcacacttggcttgacttagtattctctgatcatatcctgattgatagcaattacacccatttggattgacaccttaaatgctgcaatgacataagatgcatttagggaattgacacacaaaaccctttgtatcaatttggcgccgttgccatttgggtgtttttcttgttacatttaggatttctgagttatataaaatcaagttctgtttctttctttctttctggttactcacttgtttcttcatttgcttgtttctgtcttgcaggtactcttactcgactagcacgtcgagtacatcaaccgagtaagatcaaaacgtatgcaaactcgttctcaaggttctggtaatctcctgcggtacagagacgacatcgacaggattcagcatgaactcagggaacaacaagccacttcaaacccagtagtcatggctaatgaggtgaatgctaatgagttgccaggcaacattggtgctggtgatgcacctagaaaccaccatcagagagctggtattgtcccacctcctattcagaacaacaactttgagatcaagagtggtcttatctccatgattcaaagcaacaagtttcatggactgccaatggaggacccattggaccatcttgacaactttgatagactctgtagtctcaccaagatcaatggagttagtgaagacagcttcaagctcaggttattccctttctcactaggggataaagctcatctttgggaaaagactttgcccgttgattctgtagacacttgggatgactgcaagaaggctttcctcgccaagttcttctctaactcaagaacggcttgattgaggaatgagatctcgggattcaatcagaagaattctgaatcattctctgaagcatgggaacgcttcaagggctacactactcaatgccctcaccatggtttcaaaaaagcctcacttcttagtactctatacaaaggagcattgcccaagatcaggatgctattagatacagcttctaatggcaactttctcaacaaggatgtagctgaaggttgggaacttattgaaaacttagctcaatctgatgggaattacaatgaagactatgatcgctctaacagaggaagtaacgattctgaggacaagcacaagaaggagatcaaagctcttaatgataagattgacaatatggtgcttgctcaacagagaaatgttcactacatttcagaagaagagcttacacaactccaagatggggagagtcttactattaaggaggtgagttacctacagaatcaaggtggctacaacaaaggatacaacaactacaaaccccctcaccctaatctctcttacagaagcaacaatgtggcaaacccacaagatcaagtctaccccccacagaaccaaccgcctcaagctaagccctttataccctataaccaaggctacaaccaaaagcagcactttggacctccaggcttcacccagcagccacagcaaacttctgcacaagactcagaaatgaagactctacttcatcagcttttgcaaggacaggcctcatgctccatgacaatggataagaagctagctgagctcaccaccaggattgattgctcttataacaacctgaatataaagatagatgcacttaacactagagtcaagaccatggagggacacattgcttctacttcagctcctaaacaccccggacaacttcctggaaaatctgttcaaaatccaaaggagtatgcccatgctatcaccacagtgagtacttctgccactgaggacagtgggattcaagaaggggaggttttgagaccaaaatcaagacaggagattgaactcgacttctttgctcgacttgtcgaacgagcatatgacccgagcaacccaatccctattccacctgcatatgaacctaaaccatactttccagaaaggattgcacaagttaatgcaaggatcttccagaaacacaagatgatgttcataaagtgtatcaaagagttagaagagaagatacctttcgttgatactcccaaggaagtaatcatggaaagatcccaagaagctcagcaaatagttgaattgagttttgagtgcagcgctatcattcaaaggaaggtgataccaaagaagctaagtgatccaggttccttcactctaccttgttcactaggacccttagtgttcaacaatagtctttgtgatttgggagcttcggttagtttgatgcctttgtctgttgcaaggagattgggatttgataagttcaagcctagcagcattcatcttattctagctgataggtcagtgagagtgcctcatggaatgctagaagacttaccggtaaagatcggatcggttgagattccaaccgactttgtggttctagagatggatgaggaaccgaaagaccctctcattcttgggagaccatttttagcaactgcgggcgctcttatcgatgtgcaaatgggtaagatcgacttgaaccttggtaagaatctccatatgagctttgatattgctaagaagatgaagaagcccactatagaagggcagcttttcttcattgaagaaggaaatttagatgctgagttgttgagtgggttggaaaatcctattccgtactccattccgactcgccacctaggagagcccgagaagcttcttatgatagaaggaggactagcttagaggttgagactaaggggaaccatttggatgttggtcctattgctagagagcttatggagctcaggaaacagtatggagctcaaggagagaccatgaaaaagttggatctcaagatggaggagctgaactacgctatcctagagcttcaggagatgattaaggggtacccaagtcctgagattgaggaatactttgaggaacctgatttgggagaataggactatactactgatgaaaaggaggcttactttgaggaaagatccaacgaatactctacactccagctaactagagaaaatgcaaagtatgattgagactttgaggattgagcaagtgaggatgaggacttcttagttcctgtcctcaatctcttctctacctaaacattgtgagactcaagcttagtgactttaaacaagctcacttgggaagaagtcccatgtctatccttggatatattgctttcttgctatttttgatgtttttgtttaagtgtttcaggaaaaaaaagacctctaggaatttttcgggcacactcgaccgtaccactcggctacaggccgagtgtgggctttaattaatcaaaggcccaagattgaaccatactcgggccagaccactcggnnnnnnnnnnnnnnnnngcctcatcatgcccaacactgtactcgacacgcgcgccgagtatgtcggccgagtacacacgtgcgaagtcaacacaattcaaattcaaatttgaatttgaatctactcgaccccacacatcaaatcctgctccccaaaggccatcaaagattcttctgcaaacagtgaaagcttgtctcgttgaccaaatgaagggtggagatctagagcgtttgaagggctaggatcaaatcttcttgcctataaacccacttaaacaagctaagtcactcactctttctctttactcaattaatttcgcactttgctacttctctctagatatttcaagattttactctcacttctctctagaattcccagaaattgaaccataatttcttactttctttccatacaaagcatttcaaaacctctcttaaagcttttgatcagttgaaaatttcaaattctcttctactttgacctactttcggttcttttgggtgattatctgcagtaactcaccacaagaccatggattctgaagaagcaagaagaagcaagaagaagagcctctactcgtgctgtagatagagggttgccatgatcaacaagaaatgtccggtttggaatcaggaagctgtgagtcctggttttactcggttgacaggccgagtacagtggctaagtatgactccagaatcttctgtgggtcgttctgctgctgccagggaggaagttgcaaggggaaagagggtttgggaggctgagccagctacaatagaggaggagcctatgttagagagggaagcatctgaggaagatgtagagattgctgaggaggtcttgccagttcttgtaagaaggagaatgaacaatccaaggaagaagaaagagcccaccattgaagagcactaccagtacctaatggagctgagttttgaagggacaagatatctccataggccaaccatacaagcattggggatctgtagggatgttgaatatctcatggagatggccaagctagagacattcttttcctacaagtgcgagggatacaaggaggagagctgccagttcctagccaccttgaagctccacttccatgccgatgagagacagagaaggaactacataaaggggtggagtatatcacattcatggtgtatgaaaatcactaatcccttgctattgtgcagctagatgttgtattcaagttccctaccaagtatggaatccgccataactttaacaaggaagagctccatgatttgtggttaacaatagctggtctgcttctctacaagtcagctagggctaagagttcagcaataaggagtcttgtgcttaggtatctccacctttgtattgcaaatgccttctttccaaagaagacaaccggccatgttattgagggagagctgaagatgcttgatcttaccttatgcttcattttgggttacacaaggaagaaaatagagatggaaggggataggtctgatacatctctttcggtggtgttgatagatcatttgataagcttctgggaatatgcaaccggcattcttcaatccggttttggagacagcttgtgtgctagaggagtgatcacacccatcctaatagctgctggagtccctcttcatactcccactgtcacagccaactatattgatattgagcatttgaagaagaaaggcttcttggataggtctgctccagttaagcaactccagttcaagtttaagcactccaagctaggtctctctaggctagcacttccttgcaaggagtacaccacagttagaactggaaacaacattgactttgatcctcctccatcaatcttagtcaatgtccatgcacctctacaagcagagccgagcataggaagtgagtctcaagaagaaagagcagagttcaatgaagaagaaggtgagcatgaagcttatactcggtcgagtgactttcagcaggccgagtatggccaggccgagtatgaacaagctgagttcagtcgagctgaacagtttgatgaacaagaagattcgtgtgaagctgcagcggtgcagtttttctttgaaaactatgctaagtccgatcaagagacagatcccggtcaagttcacaagaagttgggaatgctcaagggtttgggcaagtttcagagaaagatgttcagtgggttaaagaagaaggtgagagagatgaagagagcaatggacggcatggcggttcaaattcaggagctgcaa

SEQ ID NO: 162962 - DNA, 1908 bp, Arabidopsis thaliana landsberg
  unsure (1)..(1908): unsure at all n locations
atgagaaataatggtgtaaagtgggatacttgggccaaaccgaaccgaaccgggctgaaccgggctgcgggttgtcgggacgtcccgtcgtcggctcaagggctgtcgggcttgcggaccgtcatgcttgtgagttattgagcttgctgagttaaatcttatggaaatattctcaagatagtcataaaatattctcaggataggatagtctcagaatattctcaggatagtctcaaaatatgtcatgcttatcctaagaatattctgcaaaatcctatctccctctactatataaagagacccagcctctcattatttctcaagctctcaaacacaaaacactctaaattctaaagtctctcctctctctctattgcttcttaaaagtaagttcttagtttagttgtttcgagagtatatcatagatctagttcgcttgaatctaatacttgtgtgctcgggtattagttcgtgatcggttgtatcctgagattcaaaaattgtaatgtccgaaaagcacttacggccgatttattgaattaaggaaaaatatatcatatcttgcctccgtgatttactttttgtccttaattactgttatngnaattttattattatcattatcttaataaaattcgtacttgtttctcaatttggtttttgggctcctacaatgtataccctgtcccggtaccactcatatttactcaagttggtcgtcctagtggcaaaagtattgaattttggttaaatgagagagattaccaatgcgcacatgcatatgttttgcgtaattgtgaatattttcgcccgcttgaaaggtattctattttaaccaagtaataattaattttgaaaatctctcttttacaattaataatggaagatctttgacatgtttgataaaagagtatgttggatgcgcaaattcggaatgaatatccagaactctctgatgatgaggtcgcgtcgaaaagagatgaaaattttcatatatgggttcgccaatatgtaatcatttctctgacattcaccaaattaatagtgtttacttctttatttcttgatatatcatatgttttaatgtaggtggaagcaacgagaagtcatcaaagttttcctccatgggtttatgaaatagtagaaggtcctgaaaataaagtcaagtcttggcccatgtattttacaagagcgtatatgtttcacacgcaggatcatgggcgtaccaataaaataatgaattatggggtatgtgttcgaggccaaaattattctgaagcatctcatgaagaagatgtttatgggatcgttgaaactataatcaagctcgagtatccaggatttgttaacttaaagatcacacttttctactgtcaatggtttgactcaaaagttgggaaaagaattcgtatgagaaatggaggggttgtagacgtgctagaataagggagatatccaaattatgaaccatttattttaggtaaattttaaatttctttagtaagtgatttgtaagaaattcatatttcagttaaaattttaaaatgtcggttttttacagtgtctcaagctgatcaggtttgttatctttcttacacgaacatcaaacgactccgaaaatcgtggctttcagtttggaaagtcaatccaaggaatgttgtccaagggaagtttaccttaaatgatgtggttgcattgcaacaatccgttgatgaaacaactctgagcataattgaagaaattatcgttgagagcttagctgaaacaaaccatcaagatgaacctattgattttgatattgaagatgctgaaaaaggagatgaatttcattgtaattcatcaacatctgaggatgaagatgaagaagaactagatgatgaacaatcagaatattttgaatggacatga

SEQ ID NO: 162963 - DNA, 3111 bp, Arabidopsis thaliana landsberg
gtgatgcactgcacagtttgagagctaatctagttgatccatataatgtcttgcaaagctgggatcctacgcttgttaatccgtgtacttggtttcacgtaacgtgtaacaacgagaacagtgttataagagtgtgagtgtctctctgcttatacctgacctgaccaatgttctttgtttagcttatttaatctctgtttgttgttgcttcttcagcgatcttgggaatgcagacttgtctggtcagttggttcctcagctaggtcagctcaagaacttgcagtacttgtaagtttttgctttgatatctaaatggaagatgaatcgttactctgtagataaacgaaaagttgatggcattgactatgtgtagcataactactttatttctagagacttgtagtttctcatacatgatataggcgaaatggcgattacactgaatcttgttttttcattttattaggacttattcaatacccatttgtcattgtacattgttaattttcttctgagggtgtgatactcttaatggcagggagctttatagtaataacataaccgggccggttccaagcgatcttgggaatctgacaaacttagtgagcttggatctttacttgaacagcttcactggtccaattccagattctctaggaaagctattcaagcttcgctttctgtaagaacacttagtctgctcttctcatcatgcactggctaaatgttttgctatattagaaatttactgaggattaaattctcttttggctaaatgttattacttgttggacatttgaatagaagtaaaagaaattggctttgtctttcaaaacactgaataaacttgtttgattgaactctggtatgggaagatggtaatgtggtgtgagtttttgttgcaaggatagtcggctcaacaataacagtctcaccggaccaatttccatgtaattgactaatatcaccacccttcaagttgtgtgagtattacttttcaattttactttctgctcttctgaacttctcactcttaatggatcacctgagttttccttattatcttgcaaactgcagggatctgtcgaacaaccgattatctggatctgttcctgataatggttccttctcgctcttcactcccatcaggtttgattgaatccatactatgcaaacattagttactcgcattatgggaactgaggctataagttaagattaagcacaagaggcaataaaatttaaagtctgaacctaagtttcttttgatcatcttaactcttaagtaaatttactcaatagacatactacattttccaaattctattactttaattggtggatatgaaaagaatcagcagttgactatttgtgttcttctgcacagttttgctaacaacttggatctatgcggcccagttactagccgtccttgtcctggatctcccccgttttctcctccaccaccttttataccacctcccatagttcctacaccaggtaatgaaatgaagcagacagtgaagtttagatcttttacgctcactcatgcttggaaactctctgtctcacagtttaagaagcttgtgatcaacttctctggtagaatttttggttgttaactattttggtaaaataaattttaaggtgggtatagtgctactggagccattgcgggaggagttgctgctggtgctgctttactatttgctgcccctgctttagcttttgcatggtggcgtagaagaaaacctcaagaattcttctttgatgttcctggttagtcaatgagtctgcagtatccaagctttgtttcattttagaattggtttagtatgtaacacttaaaatcccggttctgtaatgcagccgaagaggaccctgaggttcacttggggcagcttaagcggttctctctacgggaacttcaagtagcaacggatagcttcagcaacaagaacattttgggccgaggtgggtttggaaaagtctacaaaggccgtcttgctgatggaacacttgttgcagtcaaacggcttaaacaagagcgcaccccaggtggcgagctccagtttcagacagaagtggagatgataagcatggctgttccagaaatctcctcaggctacgcggtttctgtatgacccctacggagagattgcttgtttatccttacatggctaatggaagtgtcgcttcctgtttgagaggtaaccttgaaattttaattctctgtatcataaagtaaaaagaccaacaatgatgtgttagtgttgttttagaaacttttcaatgcaattgagtgagctttcttgaaatgaacagaacgtccaccgtcacagttgcctctagcctggtcaataagacagcaaatcgcgctaggatcagcgaggggtttgtcttatcttcatgatcattgtgaccccaaaattattcaccgtgatgtgaaagctgctaatattctgttggacgaggaatttgaggcggtggtaggtgatttcgggttagctaggcttatggattataaagatacacatgtcacaacggctgtgcgtggaactattggacacattgctcctgagtatctctcaactggaaaatcttcagagaaaaccgatgttttcggctacgggatcatgcttttggaactgattacaggtcaaagagcttttgatcttgcaagactggcgaatgacgatgacgttatgctcctagattgggtataacacagatcttttagcacatatcttgctatctctcaaaaagctgatttatctgttcatttggtcttctcaggtgaaaggacttttgaaggagaagaaactggagatgcttgtggatcctgatctgcagggcaattacacagaagcagaagtagaacagctcatacaagtggctcttctctgcacacagagctcacctatggaacgacctaagatgtctgaggttgttcgaatgcttgaaggtgacggtttagcggagaaatgggacgagtggcagaaagtggaagttctcaggcaagaagtagagctctcttctcaccccacctctgactggatccttgattcgactgataatctacatgctatggagttgtctggtccaagataa

SEQ ID NO: 162964 - DNA, 3926 bp, Arabidopsis thaliana landsberg
  unsure (1)..(3926): unsure at all n locations
atggcgggaaactataattatccgagtagcagttgttttaatcgagattggatgtacaagaggttcgatgaaatgacggtgaatttgtcagaagaatacgtcgtaggagtggaggagttcttgacatttgctaatagccagcctataatacaaagttgtcgaggtaaattccactgtccttgtgctgtgtgcaagaataaaaaacatatcgtctcgggtagaaaagttagtagtcatttgtttagtcaaaatttatgcctgattattatgtttggtataagcattgggaagatttcaacatgaatgtaggaatgagtatttatgttgatagtacgtatctaagagaattatgaaagtgtgggtaatgttgtagaagatccatatgtggatgtgggtcatgttgtagaagattcatatgtggatatggtgaacgatggatttcgttataacgtggggtttgatgataactatcatcaagacggtactaatcagaatgtggaggaaccggtacgtaaccattctaaaaaaatttacaacttgatagaaggtgctcaaaatccattgtacgatggttgtcgtgaaggccagtctcaattatcattagcagctcgagtcatgcagaacaaggcggatcataatatgagtgaaagatgtgtggattcggtatgtcaaatgttgacagattttttaccagaaggaaaccaagctactgattcccattacaagacagaaacatttatgcgcaatttaggccttccttattatataatcgatgtttgtattaacaattgtatgcttttctggaaagaagacgaaaaggaagataaatgtcggttttgtagtgctcaaagatagaagcctatggatgactaccgtcgaagaaccaaagtgccatatagttgtatgtggtatctacccattggtgaccgattgaagagaatgtatcagagccacaagactacagcttcaatgcgttggcatgccgaacaccaatcaaaagaagatgaaatgaatcatccttcagatgcggcgaagtggagatatttccaagagctacatcccatgtttgccgaagaaccgcgtaacgtttatctcgaattatgtaccgatggattcaatccatttggcatgtcgcgaaatcattctttgtggcatgtgatcctgactccatataatttaccaccgagtatgtgcatgaatacatagtacttgtttcttacaattctgaattctgggccaaatcacccgcgaggtagtctcgatgtcttcctcctacttcttattgaggagctaaaagagttatggtctactggaatcgatgcatatgatgtgtctttaaatcaaaattttaatctaaaattagtgttgcttggacgataagcgactttccgtcgtacaacatgtcatcaggatggacaacccacggtaaactatcttgtccaatttgcatggaaagtactaactctttttatctacctaatggaaggaagacgtgctggtttgattgtcaccaaagatttctttctcatggtcatccattatggaagaacaaaaaagacttccgaaaaggaaaagacgcttctaccaagtatccacctgagtctttaactggtgagcaaatttattatgagcggttgtctagtgtaaatccaccaagaaccaaggatgttggtggcaacggtcacgaaaagaagatgccacgctatggaaaggaacataactggcacaagaaaagcatattatgggagttgtcttactgcaagggccccaatcnnnnnnnnnnnnnnnnnntgatgcatacagagaagaattttcttgacaacatcatgaacactctcatgagtgttaagggtaaatcaaaagataatatcatgtcaagaatggatatagaaattttttgttctcggcctgacttacatattgatagtaagggaaaagctccatttcaagattatacattgacaaatgaagccaaaatgagtttattgcaatgtgttaaacatgcaaccaaattccctaatggttattcgtctgatatgagtagttgtgttgatatggagaatgggaagttataaggtatgcagagtcacgattgtcatgtttttatggagcggttacttccatttatctttgcaggactcctcgaccggaacattaaccttgcattattaggtaaaataagaatataatttactctttatatcatatatgcacttgagatgatgcatttttttttttcaggggttggcgcattttttagggacttatgttcgagaactttgcagaaaagtcgcgttcaaattcttaagcagaacattgttttgatcatatgcaacttagagaagatcttcccacaatcattttttgatgttatggagcacctgcctatacatctcccctacgaagcagaattgggcggtcctgtccaatataggtggatgtatccttttgagaggtttttcaaaaagttgaaaggaaaagcaaaaaataaaagatatgcggccggatcaattgttgagtcatatatcaatgacgagatttcttatttctcagagcactactttgccgataatatacaaacaaaatcaaggtaaccatgaattatcgatgtgatgcaagttttcaaggcgcaaaaataaccatgaattacctcttttggatcaggttaacaagattcaatgagggtgaagttcctgtatatcatgttcctggagtacctactatatttagttttgttggtcgtccaagtggagaaatacgtgaagtatggctatcagaggaagactatcagggcgcacatggatatgttatacggaattgtgattattttcaagtaattgagaggtatataacaaagtcatactcccattttaagttaattatataaatgtttgtttactaacccttatatgttgtttttgtctttatatagtatgttcgaagattttctttctattaaatatccaggattgaacgaaaaagaactcttcgtgaaaagaaacgaggaatatcatgtgtgggtgaaagattatgtatgtctaaatagtttataatatatatgatttgcatttatttattgttattcttatctctataatgatgtttatttctaaatttgcatacaggttacatattggaactctagtaatccttttccaacttgggttcaagagatagtcaatggacctttgcacaaagtcaaaacatggccaatgtattttataagaggctatttgtttcatacacagagtcatggagatggacgtaagacttgtaactatggtgtatgtgtgaaaggtgaaaattatgcggatgcatctgacgccgcaaatatttacggaaacttaactgatatcatagaacttgagtatgagggggtggtcggtttgaaaatcacactttttaaatgttcgtggtatgaccctagcttggaagaggtactcggaggagcaatagtggtgttgtcgacgttctttcatcgaggaaatacaacaaatacgaaccctttattttaggtacgtatggtatatatatatggtcatttagtttttctagttcatatacaaatatctaattctccaaatatggtgcatttacaaacagcatctcaagcggaacaagtgtgctttattccttatccatacacgaaaaaaacaaagcgggagtggctcaatgttttaaaagtaaatccaaggggaaacatattaggagaatatgaaaataaagacccgagtttattgcaaacagaaaatgatgatgctgttttaataacaataatagaagatcttgtactcgacaatttgacaatcaatcgcaaccccataaacctcgatttagatgccggagatgccgatccaaaagatgaatttcgatgtaatttatcgtcttctaatgatgaagaacaacaagacgaagaacaatattag

SEQ ID NO: 162965 - DNA, 2238 bp, Arabidopsis thaliana landsberg
  unsure (1)..(2238): unsure at all n locations
aaactatagaaaaaacctaagttcttcccccttttcacttctcgacttcttcctcttctctccgtcgtcgtcttctctcgtctccgacgacaccaatttcaccggaaaaatcaatctcttctattcttctttcttctccgttttcgttcgtctttgtctctttcatatggctagagtaaaagactcatctggagaatatgaatcaactagggttgaaacgaccggcgaaattcctccatcagtcaaagagacagccgccgagattccccaaagagatgaagaaagcgcagagcttcttacaacagaagaggaagccggagaaattcagcctacaaccggcgattgtgacgccgccgatttgggtaattcaaacgccgtcgcatgggagtcaattgacgatctttcagacccaaatgccgattcttgtagagaagaagaagaagcaacgaatgcagttgttcaacatgatgatggagcaaataaggtatgatagaagaccgttattttttgtattaggctcgttttaggatattatgcattggtaaatgattggatttgtgaatggtgcttcagataaaacaagtagtacaactaggtcgtaaatttgtgaatggtcattcaggaacaagtagtacaactaggtagttaatgtggaattgaaagtattttgaattgaatatgcaggatgatggtgatgatgataacctgccgcagaatatgcaggatggtgatgatgataacctgccgcagaatatgcaggatgatgatgatgatgatgatgataatcaaccattgccgccagaagttatgtactttgatccaactacctacacgaaggtgtgtaagataggaacgaggtgtcagttggtacaaacagtggaatttatagagactttggatgcagaactgaagtggtttaagaatcatgaccaatttaagcacatattccacatgcctaaggagcccaatcacatgattcaaggcatgtggatgcttatggttcgcacggctaagacagaattagcgagagagtgttggtttgttgtcaatggagtacctataaggtactcaattaaagagcatgcattgattctctcaaggcacagactgctttttatggatttattactccacttgaggtaagtagtcgagtaaattatatgagtggctaaattttgttattgtgaacttgcatttacttttatgtttttgtgtctagattctggcatttgagtgcattccgcagcttgggaagagatttagagaagttgtacctgcaaacaaggaatgtccaagaatgtgacaagttcagtgaaagttgcatgaagggatttactttggaagaaataaatgaagcacttggagatataacggttagctttgttctcttgaaatctatgtttataatctttgtggtgtttgaaatatatgtttacttgacaggatatttcaagcatcttggaacctgatatggatgagagaaaaatgttgtcacgcgttgtagagaagcatgttgatgatggtattggatatatcgatccgattgttgatagttggagagagaggcttatcgtagagaaaaagaagattttctggcgtagtctctaccaagcagacattgatggtagacgtattgaaactgttgatgatgttccagctgtacctgaacctaaaatccctgggacatcgattctctcgttcaaggaagctatggagagaggatttgacaagctcacggacaagcttgctgtgatggatagcgaaatcaagcggatttgtgtgagagtacaaggaatagaggaatatgtggcagatcagcttgagaaagaggcagagaaagcccgttatgaagatatgcgtcctggttcagctgctgattttgtgccaccgtcttatcatccaagggatactcagagcaaggccttggttattcacagtggaatccgtgacccagcacctcnnnnnnnnnnnnnnnnnnnnnnnnnnntgttgaacttttgtgtagtgatgctttcacaatagttcttacatgtttggttacatatttttgtaggtgatggcagcgatgagtccgatgaagaggataagaagaagaagaagcagatatcgaagaagaagagaaagcatgttggtcctactctggattctggggaaaaacgtggaaggaaaccttccaagtataagggggaagagtttacaactgaggggaagcaaacgaggaagagacagaagaattag

SEQ ID NO: 162966 - DNA, 5385 bp, Arabidopsis thaliana landsberg
agttacttgcttagataaatttataattttctgtttagcttaatttgaaaccaataatttatagtgtaatctagacagttttgtgaaattcgacccctaagtattgcactgatcttgtaatttgaggggatagttcaacggataaatttgcactatcaaatttttgcgtcgtttccaaagttctattttgattcatcattagataaggtgtagaaatttagtcctattttttttagttacatgcgttttctctcttctttttattgtgtgttctaaccgtagaacaaaaaacaagtgaagaacatgaacaagagtcctattgctgcgttaatggctaagattgagtttgtgcacaatctcccttgtgggggggtgtcaattttgttggtggaacattgttttaaaatcaaagatttgtgcttaatccttactgaattttgctcagattgactcataacttaggattaataacttaaatgactctcgtaattgatggctgactagaatgactcacatttttaatgaaaagactttttaaccttaatcagtactacaaccagaattatactaaaaaccatactttgattaaaaagaagaaataaaatcattaataaaaaggagggattaaataaaggaataaaaaaatgtaaaaaacccaaaatcgatttggggtttttcccgactctctcttttctcctattgcatgtctcttcttcttctttgatttcaaatcgaaaccctaacaaatctccggtggtggcttattgtaacgccgacttctcttctccggtggtggctcctttctccggtggtcgctgctcgactaggagatatctcttctccggtggtcgctgcttcttctcactcttctttggtacaagtttttgtagccgccgtaggttccggctacacaaacagcagggaagagtcgcggtggcccggattcacttctctggtggtgtaggcaaactattgacccgccaccaccgcttttgaataagtcccttttatcgattgaatttcgtttgattgtgatggtgattaatattttttgttgcagatctgtagatttgttgcagcattagggttgtggattttcccctttctgatttactccttatcaaaagaagcttctccggccacaacaacaacggaggtatcgacttcgctgtaagtaaacttcagaacctgccacctttgcatttgatttttttcttttttcgattgattaatgtgaaatctgattctcataatgataaattctttttgttgcagagctttagcatcactttaatcggcggttaacaattgataattccaattcacaattcattataatctggtaaggattttgggcaatttcattagaattgtttattgaaaatgattttcttgagcaagtaaagcttttcaattagaattttcataaagagaaataattattctggtaattcagattatggtggccaattagggatgaatttattttggaaaaaaattcccgcctttctttgagttttaatattgattttggtgttgtgttctcacagatttaatcaattttcaggattattcggtgatagatttgttatgattttagtttgtcaatctcacaaggcacctaagatcctaagttatttgcttatgcaaccttgttttttctgtgattaggaatggcgtcttctagtcatacccgcagttatccgtttcgcttgtatgaagaagaaaaatcatcgttgcaaaaaaagagtatggcccacagctgctatgtttctcaaattgggaagatcaaagacggattaggtgcagatgtgtgggatgagttgaagaaaactacacttggtctttttataaagtttactgaaagtgactttatatgggctgcccagacagttcatttcttcctcacgaatcagttgcgagtcgacaacatgcatgagatgtggtgtttgattgatcgcaggccaataagattttctctctacgagtttgagaacataacgggcctcaattgcgatatgtttgacgagtctgacactggtgaaactgattacaaagatttttggaatgaaatgggggtagcaatgtctgttggtccattgtttacagagttggaacgtgtctttgagattagcaagacatggagtttggagaagaggatgatggttggtagattatgcttgttatctgttggagttcatgagattcttcacggttctagaatccctttgccaagcgctaattagttcttgatccagagtcttttgagaaatatccttggggtcgatttgcaattgagtctctagttagttccgtgaagattattgactacaaaaaaaactcatatgggattcatggatgtgtctatgccttgtggatttggatttacgagagtatgcctggattgagagaaatttatggatttagaagagcaacaactaatggtgttgcactacttgattggagatcaagtcgcgcacgtatcaaatttaagaaattcattgaaactgagaaggttgcccatgaagaggtttgtgtgatcttctctagttctttagttaggttctttcatatatttaataaattctgagacatgtaactaacataatcttttaattatgcgttgttagtaggtgcgtgtgagccatatgatccttgtatctgaagaaaacatgtatcctaaatggagtgactcagctgagaatcatgatacggcgcttgacaacttgcttaaagacatcatccacaaccgtttataacctcatgcatggacacatgtggcagcacaacataagaggaaacagaatcaggaatcatcaaacgaggatggtgagagtaaagtgatggaatcaacgcctgcagatgatgtatctcataagaagcaaagaacagggaaagctcatataaaggtcatgtttttaccatttctgatttttccatacacataggtctatatgttgacagtgaattacctaacattgttatatgcttcattataggtcgatgaagaggagaagacaagcttgctggatatttggaatatgttggagaaaatgaatgtcacaattagtgacatggacaagaatgcaagcagcagattggatgggttggagaagaaagttacttgcttagaagcgagtgtaaaaacaaggtttgaagctgtggagactgatataagagttcttaaagagtctcagccccctgtagtatccaatgaagctgccacatcaaacaacaatgatgaatatgaggcaaatagtaaccaatgtgtaagtagctgtcagtttttaattttactgttggttgttttggatttgaattcaacgtttattacaatgaatgtgtactgtgtttttttcagtcttggcttgtagaggagaagccaggttctgttgatgggttgcctattcaaagaagtggttaagaagactgttaattcggtgaagaacaaggaagttgctacaaaggtccttactaagaagaaagttgcaaaatcttataagaagaagacaattgtcaacgtagagaaggtagaaaaaccaaaacttgaaatgaagaagacagttgtgaaggtagagaaggtagatagtccaaaacccttgcagaagaagtctgttgcagctccaacaacaaagacgtttgatgatgatgttgtggatgtcactgacaaggttaatgcagacaatctgaaaatggcttcaagttcagaagaaacattctccaatcctatagatcagatggctaataaggcaacggctgatgcattgagagcacttcaagaaggactagataatttggacggtatcactagtaagaggagacgagtgccacaactagcgggttctcagaaatatccgtatgtaggaaattcaacagtgaagcgcataatcactgatgtaccatcgtcttcatcggtacctgaacatcttcaacctgtttctgatgaccaatttgataggctgaaggattggctcgaacctgatttgtaagtctctattttttcttcaaatataaatgctatcattactcattccttttttttctgcagtgaaaaagaaggcctgaacaccaacaactttaatgcacggttctattggcagataatgactccaagaagcgactgaccaacagaaagatatggatggctgaaagactatgtaagtatagcaaattttaaatttttttgctttcaattgattaaatcatttactgttggctggctgaaactatatgtaactctaataattgttgttttgattataatgcagcacatgggagttgcaatgtcattgtttcgccgaagattcaatcgtgatccgtcaaaatatcccaaccagagaatagcttttttggatcaagatttgatctccacaatgctcagagactagaaacagtttcaaccggattataggtgcttcaaattcagggagtattatgaggatcaagtcaatggtacagctcaatgtgacgcagcgacaaacaagaaatggtttgttgatgtggatcacctatatgccttcctctttgtcaacgggaatcattgggtcgctctggatattgaccttacaaaaaaacggatcaatgtttatgacagcatcccgagcttgactacggatacagaaatggcgatacagtgcatgtttgtgatgacaatgattcctgctatgttgagttcatttattccgtcaaagcaacgtacgaggagctactcaaagttggagtggaagaggattacgaagatctcggagaatcttgacgcaagtgattgtgctatctactcaataaaatacatcgaatgcttggcgcttgacaagtcctttgatggcttgtgtgatgagaacatgcagtccctacggactaaacttgttttggagatgtttgaggaattaggtgagaatgctggaacactacactctgaggttcgtagcaaggccttcaaattccctagcctcatggatgagtagaagctttgtttgtgttgttttcggttctattaagaaccatgtttcttcttaagctttttattttgttatgtctatgatttttaggacccatgttttgtcttatactacctgtatctaaacccatttcccttctcgtgattttttggtttatataagcatcgaaaatttgcctatcaggttttcagactcatagtcattgaaagtgttggtttttagggatataaactcgtattgtggtcgttttagtgttggctttttcttagtcgtttttcaggtgtatagtctttacattttttgttttttttctttgttgcagacatatgcaatgcaaacagcgtagatgacgttgaaatgcaataatcctgacttgtcttagaactctatcatagtgatgacagcaccccgtgtcgcaatctttata

SEQ ID NO: 162967 - DNA, 2630 bp, Arabidopsis thaliana landsberg
atgtcttctcttatatctttcaacttccttttccttttctcattcctcactagctccttcacagcttctgctgaagatccttataacctatataattattgtccaaaaacgacaaattactctcaagtaacagcatttacttcaccaatctcaaaacccttttgtcctctctatcttcacgtaacgcctcttactccaccggattccaaaacgccacggcaggaaaagcccccgacagagtcaccggacttttcctttgccggggagacgtctcaccggaagtttgccgtaactgcatagccttttctgtcaatcaaaccctaaatctttgtcccaaggcgagagaagccgtgttttactacgaggaatgcattctcagatactctcacaagaatattctagcgacccttatatacgaaggaggattaatcatgcagaacaccaataatatttcttcagatcaagaacaaatagacgggttcacaagttttgtttcgtataagatgagtgtagctgccggtaaagcagccgtcagttctagaaaattatatacggtgaataccgaattggccgcataccagaatttgtacgggctgcttcagtgcattcctgatcttacaagaccagactgcttgagttgtttgcaaagttccatcaatggaatggctctttccagaattggagcaagactttactggccgagttgtactgcaaggtacgagctttacccgttctacaatgaaagcgccattgaaacaccaccactaccaccaccaccaccaccaccaccggagtcgttggtgtctactcctccgatatcatcttcttcattacctggtgaactcattctccgtcctctctttttatttcccctgctttcgtgaaatactagtagggaaagttttgttcttttgattaatttttttatttttatactttgtggcattatctgatcttaagccaatgatctttaaaaagcaggcaaaagtgggaattcaacagtgttggtggtagccattgttgtgctggctgttctgcttttcatagctttagttggttattgtttccttgcaaaaaggaaaaagaagacttttgacacagcatctgcatctcagggtaaagatcactaacaagtaacaaccttaattgggtttgatatagtagtggtcgtcattcatcagcctctttagctgattactaagacatttgttctgtttattgtgcagtaggagatgatatggcaaccgcagactcactacagctcgactatagaacaatccaaactgcaacaaatgattttgcagagagtaataagattggtcgaggtggttttggtgaggtttacaaggtatactataatatcttcaagtacaccctaggttaagtactttgtattgattctttgattggataacgagatgatgctgattaaaaagttaaacggatagggtacattttcaaatgggaaagaagttgcggtgaagagattgtcgaaaaattcaagacaaggcgaagcggagttcaagaccgaggttgttgtagttgccaagcttcaacacagaaatttggttaggcttcttggattttcattacaaggagaggaaagaattttggtctacgagtatatgcctaacaaaagccttgattgcttactatttggtctgttgcattttaatgattctttgaccattaatcttgaaacttggggttgctaatctcaagatttaactgtaatccatggatttgcacagaccctacaaagcaaactcagctggactggatgcagcgatacaatatcattggaggaattgctcgggggattctatatcttcatcaagattcacggctcacaatcatacaccgtgaccttaaagcaagtaacattctcctagatgcggatataaatccgaaaattgcagattttggaatggctaggatcttcggattggaccaaacccaggataacacaagccgaatagttggtacctagtaagtgttccacttaacatctcatacgttaaagtttgttggaaattttattttgccaacatatatactaaagttttgttgtggattccagcggttacatggctcccgagtatgcgatgcatggccaattctcaatgaagtctgatgtctacagctttggagtattggcactagagattataagtggcaaaaagaatagcagcttctacaacattgatgattctggtagcaatttggtaacacacgtgagtataatcatttaagttacagtgagtgtatatgataaagccaaagaattattaattgattgaataatattctaggcttgggggctttggagtaacgggcgaccattagaactcgtggatccagctattgtagaaaattgccaaaggaatgaagttgttcgatgtgtccatatcggtcttttatgtgttcaagaagatcctgctgagcgtccgacgttgtcaaccattgttctgatgctcactagtaacactgtgactttacccgtgccacggcaacccggtcttttctttcagagtagaattggaaaagacccgcttgatacagatacaacgagcaaatctcttctagggtctgttgacgatgcatccatcacagatatacatcctcgatga

SEQ ID NO: 162968 - DNA, 4048 bp, Arabidopsis thaliana landsberg
atgattgttgtgaataataatagacaaagaaatcaaatcaagcttttggaaaaggtgaatatgtatttactgtaaagcttgattaataaaacaatgaaatacgactaagaaaggtgtcggacaaagagagtgtctttggtttttgattcgatagatcttttacctaattcaaaattaacttagtggcaaagcctccattgttgggtttttcttattttattgttacatacttttgttttcttttttgggagaattactgtaatagaatacaaattaagtgttattatcagaacagacagaacttttttttatttctattatattttcgtcctttttttattacccagcgtgtccttactaaacgttaccggaaaaaacgtaattataaggaatgccactgccacgtcagaaattgctgacgtggattaaatgaactcagccgtaacgcgatacagcggcagtcacgactgagttacggtatgttgcggctgacttacgacaaaaatatatgagtcataccaaaacgacgaagtatgagtataactcagccagacgttacggctgatatataaaatgttgtctgagttatatgataactcaggcaacggtatgactgagttaaggaatgttgtccgagttataagaacttatagcataacccagacaatgttatggctgagttatgagaaaacggctgacttatttcctcgacacggctgagttatgtttttggacggcttagttatgggatgatgtgacggctgagttatgatcgagtgttataaatcagccgtaaagagcatgattactaaataactcagccttgtgacgactgacttatgtgcaaaagattaattactataatatcatgcagttatggccgagttgtttaactttacggttgagttagttgagttacgacataccacggctgaattaactttgttttttttcctgttttaattactgtaatagtattcatgttatgactgacttaaagatttgcttcatggctgtattatgaactgttcgtttggtggctgacttgccacgtcatcacttcaaaacggcgtcggctgtaataatccatgtcatcattccatgtcagcatcctcgacggaaatacgaaaagtcccttgcttctttaaatcgttttcccagactgtgtccaccgcctgaacgttacaacatcaccggaactttcttttcttcattcatcttctcatacatcttcaatttctttcatctttctcttgatatggctggtcccgctacggtcatagttgttttcggttcatgggtaaagaaacagagattcgtatttaaccccgacgaaagagggtgtagagttgtgcagctagaagcggaaagagcagtttacgatagtcttttgaagacggtgatcgatgattacggagtgaatcagtcgacccatcagttacggctgagttacatgttctccaacaagactctgaaaactatgcccttcgatactccaccagtttatatctccaatgatcgacagttgcaatgttatctaggtttgacgaaattcgagcagctacgtctctgtgtggagtttatggtgaaagattcaagtgatattagtcagaaggacggatcaagaggaaggggttcgaaacgccctattgaatctgactcaagagcagaatctagattcgaagttccgggtcgggggtttgaaggtgtctgttacgattatcaagacgatgaagcaggggacgatgaagcaggggacgatgaatcaggtgtcgatgaagcatctgacaaagaagcaagtgacgaagaagcagatgatgaattttctagccggtttgattttttcgacgactccgatggtgcctcatatgatgatgaagactttgctgtatacggcgagcctaataataatgacgaagattcaccaaaaccttctccttcgaagagaactcagaccatggaattgatcggatctgctgggagcctgactgatttaaagttggagttgtctacgctaacactcgcggtaggccaacaataccgtagcaaattcaagttggagtatcgactcaaacttcttgcgataagggatggatttaattttgatgtaccaacttctaataagactacaatatcttacgagtgcttgtggatatatgtctttggagggttcgtgcatctagacaaggaaatgatcctaattttcatgtttatatatacgattcggaacacacatgttttgtaacggaatgttttggtcgatcccgacaagcaacacctgatgttctgggagttctttacagggactatcttggtgacgttggtccggatgttaaaccaaaatcagtcggaataatcatcactaagcattttcgagtaaaggtaattacaatgtttcggctgacttactatttatctgttggctgacttatagatattttacggttgacttattgatatagtatggctgacatataattacattccggttgagttatgactttaaaggctgacttaagatcacttggtggctgagttgtggtatagtttgactgcgttgtaaatatattatggttgacttatctattaatatgtttgtgttaacagatgggttattggaagtcatacaagacgctgaggtttgcaagggagctcactctgggaacccctaacagtagttttgaagaactaccttcttacctatacatgatacgacggacaaatctgggtacagtcgcgtgtcttcaaattgatgagagtggaagattcaactatatgttcattgcttttggtgccaatatcgctgggattcattacatgcgcaaagttgttgatgtcgacggtacgtttctccatggtagttacaaagggacgctcctgatagccatagctcacgatggtaattttcagatttttccgttagctttcggtgtagttgacactgaaaatgatgaatcttggcgttggttttttacgcaactcaaagttgttattcatgacgcaacggacctggcgataatctcggacagacatcagtcaatagggaaaacaattggtgaagtgtatccgttggctgctcgtgggatttgtacttaccatttgtataagaacattttgctaaaattcaaaggaaaacatttgttctctctggtgaaaaaagcggcaaggtgttataggcggactgattttgatgacgcgttcaacgagattgaagagcgtgatcctcaactacatgcatacctcgaaagagctggtgttgaaatgtgggcgcgtgttcattttcccagtgatatatacaatttaatgactatgaatatagcagaatcaatgaaaagagcactgtcaaaagccagaaatcttcccatagcttgactgttagaagcgataagacagatgatgacaagatggtttgttgaacggagagttgatgcgagcacgcagcatactcagctcacacgtagtgttgataaactgttacatataactcagctataactagtgcataactcagtcctcaaataatgataaactggtcataatgagaataactcagccataacgtattttttttttttcatctcactaataggaacgtgtcacaacgtcaagacttatggatgtacaaacgattgatgctttccgcgtacaagtaacttatggaacatctttgcatgttgtaaatgtggatgcaaaaaaatgcacattccatcttttcgagaaagaaaaattaccatgcatccattcaatcgcagctgcagagcatatgggtgtgtctcgtatatcccagtgcagtgcttactatacgagcaattattttgtcaatgcgtacgctggtgcaatcatgccttcagatacaaaagtccatgtccctctaattgtaattgaccaaccgtgcttgcctccaattgttgtgaaccagccaggcaggcccaagaaactaagtatgaaatcagcactagaagtcgctgttgagaataaacgtcctaggaaggaacacggatgttctcgatgaatagaagttgggcacaatgttaaaacttgtcgtgca

SEQ ID NO: 162969 - DNA, 6255 bp, Arabidopsis thaliana landsberg
  unsure (1)..(6255): unsure at all n locations
cagagaaaacaaaattcagaatcagcattcatagaagcagaaagtgaaaagcaatatagaaaagtaatagaaagagagatagattgtaacttactctacataaggttcgacgacagccatattctggatcacagccaaatgagctatttttctctccatttctgtaagactaataaaggtgcctgcagagataggacgccctccaaggatagagttgttctcatactcagtatttctatctgccttttcctgaacttttgttgtcttcttcaaaaattcactatagaattggatccactcttcagctaagtaacattcagcaatacacccttcaggtcttgctgtgtttctcacaaaatctttgaggactttcatatatctctcaaaagggtactgtaacgaccgcgtcccgcgttcataaagaggccaggttgttttaggagaaaactagaccatggtcaagaaacgaatcaaaatacttagtcgaaagaacgagaatgttcaagctgaaccagctaggtgagctggacaagctggatgaactagctagctaagctaagtgagctaaaccagctggaagactagctagctcagctaggtgagctgaccgacagctcgacttagctcagtgaactgatcgagtactgacccagctgggtggtccggtcagctgacactcgagcttgtggactgtggtagctcacggatgaagagttgtctcggccaaaaggtgtaaggtcgagcgggtaccaacgaatggttgcatcgccaaaggatgaaaggaacggatgtgacctttcggaaggatgcaaggaacggatgtgacctttcggaagggtgcaaggaacggatgtgatgcttcgggaagcatccattcgcctcctatataagggaggacgcccaaggcatctcacatcatctcacaacatccaaataccacacatcacaaatagtccaaatacaccacgaagttgttggtcggaaagaaggtacggctcggctagtataactcgatcgaactaatgtgcatgctacctcccggtctaacggtttgatggagtttagcggatggatggggtagactgatcgtcttagagacgaatcggatctggtagaccgatcattagacagacggatcggatctaacgaggagacggatcggacaagaccgggaatggtgttcgaggaagcataaggagaagtgcatccaaatacaccaaaaggtcgcccatggatggaatcttaccggtaaaaggaagaaatcaccaagaatgggtaaggaacgtgattcaccctataggatcaatatcgcggccgccttcatgtctctatctcctcaaccattgtaaaaccgatcagagaacgataagaccaaagggtgactcgacggataaccaacgggaaagtctacggtgggaaccgatggacaaaacggatgttggactcgcgagcaaacgtaaggtcgacggaaaaaggatttaatgggctagcctacgatgatccgatggatgagtccacgggcccttaggtgtgataaaggatatcgttcggaccgcatggatggatcattaagccgaaagctttcccgaccaccatggatcggacaggtaaacggttagtaacccaagggcggtcgtagtgttaaacgaccggatcggaaacatggatggttcgataagccgagggctcaatcgtccaccatgaagccggaggggagtacgtttggagaacggatggaccaataagccaagagcttgattcgctcatcgtgaaccaagagaatcgtacgatccccaatctctatcgttgtacttagaccagtggggttggttggttgtatggctaagtaacgatagggattggttcatcaattcacgatcggatacgagtcgttgaacgaatggagtaaggcgacaaacgggcaaagtaatcaaatccgcatattggccaaggtatgtacaatctagcgtattagttaagatagatgtttggtaattgaccgtgaaaataggataaaggaatatgcgattgttaggcttacagtggttagcaaacaatatgcatgtcttgacctagtaaatgattatctaagtctaagggacaaagacgatgaaactagtacaagagttggttagagttaaaccaaggttagaaagacttctactgtgtaataagaaaatgattatagaattaagccttgtaaaggcaattctatgttgaatcgcgaaaattaagaggttgggctaagaaagaggcgcgaacgtgagtccaaggttgccacacgccgagacgtctgggacggggtctcacacctcctcctcctcctaccattacatctccttcttctcgatctggcagcgaaaagatcgatcgaagtgcgacccctcgacaagaggaagttgagccctggggtactacccctaaatcaaagaccgttcttgtccctcaaaccaagtcacttcaggtttgaactatcatttcatttttttgtatcattcaaacccttaataactcattcttcatcctttacttccatagcgatgaagacagagggtaatgtcttccgatgcttgaagacagggaaggatactatcttgccaacctttgatagatggcgtcctgcaattcgagagcgctttctacttcacgcccatcattcatctcgggttagttttatcttcacaccttccgaccttactcatcatttgcatgctaacttacctctcctgattatgtaatctttgcttaggcgaacagtgagcttaacgacatggtcgaaccatacgaaagactactgcttgacagggaacagcacattgatgcttggaaaggcaagttctcttctcttgagtccgaccacagttcctccaccgacaccaagcgaaaattggaggatcaaattgacaatctttcctccgaactcatgaaatcgaatggcgaattgcaagatcagtaccggaggtatgacaaacttcaggaggaactttcaaatgnctcgccggttgtagtgggtagttaactgttttcttgtagttaacagttaactacccaatacaaccggcgactacataaatagtcgctatatttggtgactatttggctacaattatacgactaatttacaactaacaaaaatatagacgttcgttagtcgccaaattaccactatagaggcgagacgccttggtagtcgctaaagggcgactattatatgacactttgtaattagtcaccaaatgttgtcgtaaattagtcgctattttgcgattaatatacgacacgtggtaataatcattaaatagcgactattctatgacaactgcggcgtgtcattaaatatagtcgcaaaatagacgtaatttgccgactaatatacgacacctcgtactagtcgtttaaatagcgactattgaatgactacaacggcgtgtcattaaatatagtcgcaaaatagacgtaatttacgattaaaaaaacacatgtaattcgttttgtaagttgttgtacctattttaaacgactacactatttagtcgtgttttagtcacccaaaaattgcctatataatgaaaatttctcgtacacaatattcattcacaacacaaacacaatacaaataatacctttaaaaaaaataaacttttttgaagaaaaaaacgttaaaatatatttagttttattattagtcttataatggcgggaaactataattatacgagtagcggtggttttaatcgagagtggatgtacaagaggttcgatgaaatgacggggaatttgacagcagaatacgtcgcaggagtggaggagttcttgacattttctaagaggcagcctatagtacaaagttgtcgaggtaaattccactgtccttgtgttgtgtgcaagaataacaacatatcgtctcaggtagaaaagttagtagtcatttgtttagtcaaggatttatgtctgattattatgtttggtataagcatggagaagatttcaacatgaatgtagaaacgagtaattatgttgatagtacgtatctaagagagaattataaaagtgtgggtaatgttgtagaagatccatatgtggatatgatgaacgatgcatttcgttataacgtggggtttgatgataactatcatcaagatggtacttatcagaatgtggaggatcaggtacgtaaccattctaagaaattctacgacttgttagaaggtgcccaaaatcctttgtacgatggttgtcgacaaggccagtctcaattatcgttagcagctcgagtcatgcagaacaaggcggatcataatatgagtgaaagatgtgtggattcggtatgtcaaatgtttacagattttttaccagaaggaaaccaagctactgattcgcattacaagacagaaaaattgatgcgcaatttaggccttccttattatacaattgatgtttgtattaacaattgtatgcttttctggaaagaagacgaaaaggaagataaatgtcggttttgtagtgctcaaagatggaagcttatggatgactaccgtcgaagaaccaaagtgccatatagtcgtatgtggtatctacctattggtgaccgattgaagagaatgtatcagagccacaagacggcagctgcaatgcgttggcatgcagagcaccaatcaaaagaagaagaaatgaatcatccttcagatgcggcggagtggagatattttcaagagctacatcccatgtttgccgaagaaccccgtaacgtttatctcggattatgtaccgatggattcaatccatttggcatgtcgcgaaatcattttttgtggcctgtgatcctgactccatacaatttaccaccgggtatgtgcatgaatacatagtacttgtttcttacaattttgaattctgggccaaatcacccgcgaggtagtctcgatgtcttcctccaacctcttattgaggagctaaaagagttatggtctactggaatcgatgcatatgatgtgtctttgaatcgaaattttaatctaaaagcagtgttgctgtggacgataagcgactttctggcgtacaacatgttatcaggatcgacaacccacggtaaactgtcttgtccaatttgcatggaaagtactaacttttttttatctacctaatggaaggaagacgtgctggtttgattgtcaccgaagatttctttctcatggtcatccattacggaagaacaaaaacgacttccgaaaaggaaaagacgcttctaccgagtatccacctgagtctttaaccggtgagcaaatttattacgagcagttgtctggtgtaaatccaccaagaaccaaagatgttggtggcaacggtcacgaaaagaagatgccaggctatgggaaggaacataactggcacaaggaaagcatattatgggagctttccatattggaaagatctaaatctccgacattgtatcgatgtgatgcatacagagaagaatgttttggataacataatgaatactcttatgagcgtgaagggtaaatcaaaggacaacataatgtcaataatggatatagaacgattttgttctcggcctgacttacatattgatagtaagggaaaagctccatttccagcttatacattgacaaatgaagccaaaatgagtttattgcaatgtgttaaacatgcaatcaaattccctgatggttattcgtctgatttgagtagttgtgttgatatggagaatgggaagttatcaggtatgaagagtcacgattgtcatgtttttatggagcggttacttccatttatctttgcagaactcctcgaccggaacgttcaccttgcattatcaggtaaaataagaatataatttactctttatatcatatatgcacttgagatgatgcatttttttttccaggggttggcgcattttttaaggacttatgttcgagaactttgcagaaaagtcgcgttcaaattcttaagcagaacattgttttgatcatatgcaacttagagaagatctttccaccatcattttttgatgttatggagcacctgcatatacatctcccctacgaagcagaattgggcggtcctgtccaatagaggtggatgtatctttttgagaggtttttcaaaaagtttaaaggaaaaacaaaaaataaaagatatgcggcaggatcaattgttgagtcatatatcgatgacgagattttttatttctcagagcactactttgccgttcatatacaaacagaatcaaga

SEQ ID NO: 162970 - DNA, 1444 bp, Arabidopsis thaliana landsberg
atggctaagataatgcttggatctcactcggttaagagccatggatggaaggtggctcgtgaacatctttgtgactggctcatcctcgtagtcctcggtctcatcgacattgtactcaatgttatcgagccttttcatcgctatattggacctgacatgttaaccgatctcactttcccattttatgaagacaccatccctatgtgggctgtcccggtaagtaaacttgtttcccaagaaacctttgtcttcattttgcattccatcacaaggaagtatttcgattttcgctgattgattatttgtatgtatggtgtgtgcgtgtagattatttgtatattggttccgatatgcatcttcatagtgtactattactatcgaagagatgtttatgatcttcatcacgccattctcggtgagttaatttctactactgatcaccctcaaatgtatctagtcctatagtacttacaatttcaaatcaaaatccatactatcatatattattgatgatcaacgtgacaagaatatttggaaattgcgtataggtatcggattctcatgtcttgtgactggagtcaccactgattctatcaaagacgcggtcggtaggccacgccctaacttcttttaccgatgttttcccaatggtaaaccggtatgtacatttctatggatccatctcacttatacgttaatttcccggtttatcatgagggaattgtttcttattttgtgcaaatcggaaagaaatgcagaaatttcatccggatactaaggatgttgtgtgtcatggagttaaaaagataatcaaagaaggttacaagagtttccctagtggtcacacttcatgtaagttgttctaaagcattaaaaagacaagtaacaacatctgaattgattccggtttatgttaaccgcttgattacggtatacatgcagggtcattcgctggttaactttcctagcgtggtacttatcgggtaaaatcaaagtctttgacagaagaggtcacgtggcgaagctatgcctcgtgttcttaccgatactcatatcaattctcatcggaatatcacgcgtagacgactattggcaccattggaccgatgtcttcgccggagctatcatcggaatttttgtcgcttctttctcttacctccacttttttccttacccttacgacgaaaacggtattaaaccaaaacaaacaaaaaattaccatcatgttattgctttcttgataataataacggttgatgacaatattttaacaggatgggctccacatgcgtattttagaatgttggcggagaggagcactggtcgagccacgacgatgactcgaaccggttctcgaggaatgttggacaacgacgttgagcctggcaactccgcgtcctcgccgcacgatcgccaccgtgaaagcactgattctgacttttga

SEQ ID NO: 162971 - DNA, 1844 bp, Arabidopsis thaliana landsberg
gtgtgcaagataagcagtaggtgcaagtcacgcagatagtggcaatgatagatagaaggtttaaataaaagcaagatgatttcgaaaacacccacagttcgagcgtatattccacatgtctcaggagcctaaccaccagatgcaaggcatgtgggtgcttatgcttcgcacagtgaagacagatttgctctagaaggcttggtttgtcgtaaatagagtacctattaggtattccattaaagagcatgcgttgttaagtgagtttgattgccgtagttacccaaaataactcaagacaatggggaatacttagtttgtgaagaggatcttcaaaaaagaaactgggataaaggtttcaaaagttcttactaagtacgagaagatacgcagcggtacagataggttgaagttagtgctgttgtacttcctggtcaaggtagtaaaagcaaactcaaagaatgatggaaacatagaagagattcttttaaggattgttggcggtttggatgagtacgagacgtttctgtggggccgttaatacttcttggaatgtttggatgggataaggaaaatgatgaagaacctggatggtttcgtgaaaccaaaagctcaaccttgctacagtggattcattgtgcctcttgagataagtaatttatgatcattatatgagtataaggtgtaatgtacaggttttatgatattaaacattgttttgttatttgtagattctggcttatgaggctattctacagcttcaactgaaatttagagtccctgtacgtgcagagaaggactgtccaaggatgtgcaagcataagtttaaagaatgtagcatgaaaggtgtcccgttggaagttatatataaagagcttgggaatagtgaggttagagtttctgtatttacttgattgtgtgtatatcatgagattgcttgattgctaaatgagtttcttttcacaggatattgctagccatttggtacctgagtatcatgagaaatatctgttggacagtctcttagaagatgatattgatgatgacctcgatcttatagatattgttattgacaattggaaagggcgactatttgtagagaagaagaagatatggtggaaaggaatgtgtgagctggacatttcttcttgatgtattgttaatgatcttgatgatgatgttgtccatgagattgagaatgaggtccccgagaaagatgtccttccgactgatgtccccgagaaagatgttcctccgactgctgtccctcctcgagtccctgaattagatgcagttgtggcatctataaactcactaacgcagatgatgaccaaaggctttgaggaaacaagagataagattgatgccattgatgggagagtgaagtctattgagttatttgtggcagatctgaaggaaagaaaacatggaaagcaaacagaggaggaaagtcaacatgggaagcaaacagaggaggaagtgttttatgcgtcgccagagggttgtgtgaccatagaaaggcaacaaccactagatatagtggtttatagagaaccttctccagaggttgcagaaaatagtaagtacaataattaatgtcaattgggtataaaaatgtgaatatatgacttaggttttgttttaaaatgtgtgtaggtaataaagagacaaacacgacggagaaagagctgaaaggaaaagcgaagaagaatggcgggggcaagaagaagtaggaggtgccacctgtaatagaaaccggaaagaagcaaacaaggggagcatcccgccttattaaatcaccgtttgtggcggatgataagaagcgtaagagaatgcggaaggcagat

SEQ ID NO: 162972 - DNA, 1245 bp, Arabidopsis thaliana landsberg
atgaggatttatctgattttcctcgtggtggtttccttatttacctccgcgttttccgattcgattctcgagtacccgtcggaaatcgagagtcgacacaagaaagctgccgaagaagatgtcaatttgcattgtacgacctggagattcgcggcggagatgaacaatctcgcgccgtggaaaacaatcccggtggaatgtgccgattacgtgaaggactatgtgatgggtaaaggctacctcaccgatttggagagagtctctgaagaagctttgatcttcgcgagaagcatcgaattctccggcgatggcaaagatatttggattttcgatatcgatgagactctcttatccaatcttccttattacattgatcatggttttgggtacattctctcaaaacttttactttacacatttttatctcaaacttggtttggtttgtgtatgttcatgtgattcttttgctagagaaactcataaaagaggacaattggttatagaaaatgcttgactttgttgattatgttttgggaattttgaaggttggagctttttgatcattcggagtttgataagtgggtagagagaggagtggcaccagccatagcaccaagcttgaagctttaccaaagagtgttagatttgggatacaaagttttcttgcttacagggaggaaagagagtcacaggcttgtcactgttgaaaatctcatcaatgctggtttccagaactgggacaagcttattctcaggtataattataaacaaatgcagcttcttaggttgtaactatacatgcttctaggtcatgccatgagttttttcgttatgcaatggttgatgccggtggcatatagtttgataagaaacatgggtagctctttgattttaagtcatgcaatgagtttgttcgttatgcaatggttgatgatgctggtggatcatatagaattctggatctctgcaaatggtttgataagatatcttagacatatcatcatcagttttgaacatcctttgtttattcgttttgctttgccctcgtgtctgtgtgtgatgtgcagatctccagaggaacagcacaaaatggcgacactatacaaatctgagaagagagatgagatggtgaaagagggatataggattagaggcaattcaggtgatcaatggagtgatttgttgggtacctccatgtctcaacgatctttcaaactcgcaaatccaatgtattatatcccctga

SEQ ID NO: 162973 - DNA, 1951 bp, Arabidopsis thaliana landsberg
aaaacttgtcgatcttcacattcatcgcagacatcttctcaccagattacaaacgcggaaatcccagaacctgattctgcacaaaacgttttctgcacggattttgcacgaaaccttcttctacacagatctgcacgaactttcttcaacccagaaatcgcacgaaacgcagaaagaagaccttgtgctctgacacgcattttgcacggaactgaaaactgcacgaaattcgcacgacggacgcagaacaaagaaccttgtgctctaataccagtttgttagaacaggtgcaagcgagattgcataaacgaacgataaacacgacacaaatttaacgtggttcaccaacactttctgttggctacatccacgggcaaagagacagattttattacaggagaatacagggaggctaggttaagaagagtacttatacaaaagaaaccctaattaaccctaaactgattgggcctaaagtcatgggcccaatctattcaagtcatatctaacaaggaggttactgattaaaccggaaattgaagaagagaagttgaagactctaactgcagtggagggtttgactactttatatataaagagtaacagagtctgttacattcattatcttcttcatctgtttctttctatgatttttcttatattgtgagagagagaacttgagagaatcaccattgttgtaagctcggtttgagctgtactcttcatcaaagttagtagatttgctggattgattcggctccggacgtaggcttaatcacactgatcttgctgaaccgggtaaacagaccttgtctcttcgttcttcttcaacagttcttaaatcttgtgtgtgttgagatcgatcaaacgtaacaaaaaattgatcatcttcatcgctagattcaaacgaatcgcagctcaatttctaacactttctctgattcgtttctaaaaaaaaactcattcctcgctccattatggcttgcaattttgggtactctatgtctttccgagctttagcggtgaagacatccgtcaaacattcctcagccactttctcaaggatcttgatcggaagctgatcattgcttttaaagataacgagattgagagaagccaatcgcttaatcccgatcttaaacgagcgattagagattcgagaattgcgattgttatcttttccaaaatctacgcttcttcaagctggtgtttttatgaattgctggagattgttagatgcaaagaagatagcaatcgattggtggtaattcctgttttctatggcttggatctgtctcatgttaggaaacaaatcggcaattttggaaaaatctttaagaagacttgtcaaaacagaacagaggatgagataaatctacggaggagagctttgatcgatgtagctaatattcttggatattattttgtgaattggtacgttaacttgatttgattattcatactcgttgtgtgttgagcttgctttgtgtgttgaacttggttttatgtattgattggtttcttgttgttagggttaatgaagcaaaaatgatagaagaaattgcaaatgatgttttgcttaaactgaatttaactccatccaaggatgttgaggattttgttggtattgaagatcatataacagagatgagttcattgttgagcttagaatatgaggaagtgagaggatggttgggatttggggttcctccggaattgggaagactaccattgcaagagctttatttagtcgtctatctcgtcatttccaagctagcgtcattatagatggtgcttttgtatctaagtgtaggaagaattaccataaagccaatccatatgactataacatgaagttgcatttgctacaagagaacagggggttaacgactataattatagtcgcttttatagtcgttattttggattttacgactatttggcgactaat

SEQ ID NO: 162974 - DNA, 2958 bp, Arabidopsis thaliana landsberg
atgataatagacaggcaagttcaagttcctactctgttttgtgagattcccatatgaacaacacatctaataatacctctctctctctctctctctatctctgatttacataaatgtatgcaggtgtatattgtgtatatgggaacacttcctgagattaagtactcacctccctctcaccatctcagtatactccaaaaacttgttggcactatgtaagattcaacctgtttcctccttatccttattccaaacactttacatatgtaatttttgaatgaggatcaacatgtttctctgtctctggttctttttttcagtgctgcatcgcatttgttaattagaagttataaaaggagcttcaatggattcgctgccaatctatctcaagccgagagtcagaaactgcaaagtgagtatttcataaatcatcatttcttacaaaacaaatgtcagaaactttggaaaatcttccacaaaacacacaacgttttctgcaatttataaatgtgtagatatgaaagaggtagtgtcagtgtttccaagcaagagtcatgaactgacgacaacaagatcatgggactttgtcggatttggcgagaaagcgagacgagagagtgtgaaagaaagtgatgttattgtcggagtgattgacagtggaatctggccggaatctgagagctttgacgacgaaggttttggtccgcctccaaaaaaatggaaaggttcctgtaaaggtggcctaaaattcacttgcaacaagtaaattatattctaacctcgtaagaatccaatcattcaatttcctggacatggtattgatataagggttacgtttcttgtgttacaagcaagctcatcggagctaggttttacaataaatttgccgactcagcaagagatgaggaaggccatggaacccacagtgcgtcaacggctgctggtaatgcggttcaagctgctagcttctacggtttggctcaaggtactgctcgtggtggagttccctcggcgagaatagccgcatataaagtctgcttcaaccgctgcaacgatgtagatattctggctgcgtttgatgatgccattgccgatggtgttgatgttatctcgatctcaatctcagccgattacgtctccaatttattaaacgcttctgtagccattggttcttttcacgcaatgatgagaggaatcatcacggcaggttcagctgggaacaatgggcctgatcaaggttcggtggctaatgtatcgccatggatgataaccgttgcagccagcgctacggaccggcagttcattgacagagtcgttcttggtaacggaaaagcattaacggtacattttcttatctagtgacaacgtcatttcacatcctagttcagatttagtgacaaagttcaagagtcgttgatactctgtttctttatacagggtatatcagttaatacattcaatctcaatgggacaaagttcccgatcgtttacggccaaaacgtgtcgagaaattgttcccaagcccaagccgggtgagtaagaagtctcttctttttcttaaattattctacgttcacatctgaatcttgaatcaaaacacattgatgcctctaatagttattattatggacagttattgttcaagtgggtgtgtggatagtgagctggtgaaagggaagatcgttctatgtgacgacttcctaggatatagagaagcttacttagctggagccattggagtcattgttcaaaacacattgcttccagacagcgcctttgtggttccctttcctgcctcttctctgggatttgaggactacaaatctatcaagtcatacattgaatctgcagagtatgtaagcagtaatgaatacgaacagctttgtttttcggtcttgagatgttaaaagagttaactttgcaggcctccacaagcagagatactaagaaccgaggagatagtagatagagaagctccatatgttccatctttttcttctcgcgggccaagtttcgtcattcagaacctcttgaaggtagtgcaaccggaacaaagatcattaagcttgtgttggctttatatccgaatcattgtttttggaataacatcaatgttagtttgcagcctgacgtaagtgcacctggattagagattctggctgcattttctccggtagcttctccttcaagttttttgaaccctgaggacaagagaagtgtgaggtatagtgtaatgagtggcacatcaatggcttgtcctcatgtggcaggtgtagcggcttatgtcaagtcttttcaccccgactggtctccctcggcaatcaaatccgctataatgaccaccggtataattcaaaacaacaatacgttcttctgattttcttacttttggaataatacaaaaacgtattattgtcatggtatgtagctacccccatgaaccttaagaagaaccccgagcaagaatttgcatatggatcaggccaaattaacccgaccaaagcaagtgaccccggacttgtatatgaagtagaaacagaagattacctcaaaatgttatgtgcagagggttttgattcaacaacgctcacaacaacctcaggacagaacgtcacatgttcggaaagaacagaagtcaaggatctgaattacccaacaatgactacgtttgtctcttctcttgatccattcaatgtcacgtttaaaagaactgtcactaatgttggattcccaaactctacgtacaaggcaagtgttgttcctctccaaccggagcttcagattagcatagaaccagaaatactgagattcggtttcctggaggagaagaaatcttttgttgtgaccatctctggtaaagaactgaaggatggaagttttgtaagttcgtctgtggtttggtctgatgggagtcacagtgtcagaagtccaatcgttgcttactcaatccagccttaa

SEQ ID NO: 162975 - DNA, 3925 bp, Arabidopsis thaliana landsberg
atggcgagtgtgtcaccattagcaaagtacaagctcgtgttccttggagatcaatccgttggcaagaccagcatcatcactcgtttcatgtacgacaaattcgataccacttatcaggtttgatcattttcttctatcccatctcgatcaaaattaattttgatccattgtctgtgagatccacgatcctgttgctgtaatgaatggatcagattcagaattgctagaaactcatagcattgtgttcattggatcaaattctgatattagttatggtgtttatgttgcagacaacaattggaattgattttttgtcaaaaacaatgtaccttgaggataggactgttcgtctccaactatggtaattcaattcaatatgctcctatcttttgatctaaaacttttcacctttatcaaatatatatctagatgagcatgatctttactgtttggtataatgtttgaatggaacatcaaaatgtccatggaaattctcagcattgtgtatcaaccatgttcattcttttagttatatgtcattttgaatcatattactgtgcagggatactgcaggacaagagagatttaaaagcctagtaccaagttatatcagagattcttctgttgctgttattgtctatgatgttgccagttatgcgacttatttactctataacaaaaaatagtttcataaccactcatcatgctcgttttcttcttacaaaagttatatatgtgcaggtaagcaatcatttataaacacctccaagtggatcgaagaagttcgtgcagaaagaggcagctatgtcattattgttcttgttggtaacaaaaccgatcttgttaataaaaggtataactatgtccattaaaatcaaatcaaaagatagcttcttcatttcacaaaccccatatgatgttgtgtgatgtgattgattaaactataggcaagtttcgatagaggaaggggagaataaagctcgtgagtttggagctttgttcatggagactagtgctaaagctggattcaacattaaggtaaacaaacaaaaacacacacacacaagtcaatgtgatacaatattctctttaacttggttgctgttttgctgagtgcagcctttgttctgtaagattacatcggcgttacaaggaaacgaggcagtttcttggacgaaacaagaggatttggtggatgtgaatctaaagccactcatgttttcatctcaggcaaatcatcaacaagaaagcaattgttcttgttaatgacattattatgcttacagactcaatcagcaactcataaaaattggattaaatcctttgttgttacaaagaaatgaaggatctttatagttggtgtgattagactaaatgtctctgtaaacatcggtttctaacttgatttaataaaataatctaaggtctctacaaaattttgtaatttgctacattaaggtagtaactatatgattaaaatactggaaatgtgtaatcaaaaaactcgttgtaagaaaatgaatgatgacgtgtcaaccatttttattcatggtcaccagaaaataaatagagaagaaagcatttcactttttcagcaaaacccaaaacctgagaaaatttgctctgccgcataaacgatgttagtgacaagggactattgaatcaaatctcagttttgttcttagcttaatttgtttaaatttcaaatcgcgacccattttgtttctggacctttgttcgtctgtttattctgagtatgaaaaagggttttagggtttaagcacaatgtgattcgtgattttggttgctttgtcgcagatttccagtgatgggttttagatcggtttatcaatctctcacggagttatttccacaagtaaaacaagctcttaatcattatctctgtttcactcatgattgttgtggttgcaaagccactggtttgtttgtttttgttgttcgttgtttcttcatgaaatcaagttgagtagttatttggtattactatattagatccaacagcgaaaccaagaaagctatctgtatttaatatttcaattaatgttattttatagtatgagcaaatgattgatggcaacaaatctcacgtgctaccaaatgttgttgttgagttctgctgtttcattttggtgcttaaataatgtcacattgtttttattatacattacagattgatccaaagattctaagaggtgttgcaattgagcaccaacatgatgctgatgaagctgcctctgttgttatctctgagattttccctttctcttccccaaattccactcaacctcacaacaagaacaagaccaaggtttccgacaatccccctaacttgaaaggtatacttgttctatagtatctgtatgacattttgaacatttcaggcttgtggttacttgctccacctagattagcaccattctctttcaacactgatcaaagtcggttgttggaaatgcagtaaaatgtgacgatgggagtttgtctctgtctcaatggcttcaaccatctaagcttccacatagttaccttgctttgctcaacgaagattctacacctgatgttaaacctcctctcgattacgtcgtggagaaagttgttctgccaagtcgtggccctgcaactggtctaggaggagggatccgaaccatgtactcttctgacaacattggtggttcttccttggtgaaaccctctattcgtgtacaaagccgcaccaacaatgaactctctgtaagtatctcataacatctctactttttgtcttttctttcgattttacatcctttggcggatctgaaagtagtataatctacttgcatatattatatcagggaagcagcagtaaggttcctggacgtagacgatcctctcgcaagtctgtgcagccttggtccccagactactctgaggtcaagtttcatcacattatttaagtaatgtctgatctggaaagtctctcttttcaggagctaacacttctgtttattgtatcagaagcttagaagttggaaaaaacggagcaacaacaacaaccgtgacttctcacagctctttgacaacgacatagatgtaccctcgacacgatccaacaaatgttataccaatgagcgtgtaagtatcacgtatgatgattccatctgttgtttgatgttatatgaaccattggttctacgttttataggagcgcaagcagagaattgccgataacatcaaggcattagggaaattgctcccacataaagttgaggtaacattgttagaattatatatttcatatttttgcaaccagagcttgtccacatatagcttatgagagattgaatcttaattgttgattttatgtgatcttgtagggggataaccatgaattgacactgaatgccatggttgatcatgttaagcttctgcatctacagatgaaggtattgtcttgcttctcctatcttttttcttctttctcaacttgtttattgaggacaaataggtttgatagagaaagccaaatccaaaccaaaagctcccaatccaaaacctgacattctaagttattacgtatataggaattaagtcgaagcaggttgggaggagaaccaatatctcatcataaggcaatcattgaggtaatacatttatgtatctgaagcaaagatacacgatatagtctgtttttgtatcttagagtgaatgtagggtttgtgatagggatacggtcactacatacatcacgagcagacgatgggtaaatctctggcggaagtaatggaagatctgcttacaaaggactttgatgctgcggctaacttgttggagagcaaaggcctttacttaacgcctttgtcctctgtccaaggctcctgctgactcctctcacaatctcaaacacatggaatcaaaaacaaagtaa

SEQ ID NO: 162976 - DNA, 3349 bp, Arabidopsis thaliana landsberg
atggcgggaaactacaattatggcggtagtggcggtttctatcgagattggatgtacaagagatttgataaagtgacggggaatttgtcagccgaatacgtcgcaggagttgagcaattcatgatattcgctaatagtcagccaatagtacagagtagtcgaggtaaatttcattgtccttgtagtgtatgcaagaatgaaaaacacatcatctcgggtagaagagttagtagtcatttgtttagtcattgatttattcctgattattatgtttggtataagcatggagaagaaatgaatatggatataggaacgagttacacgaataggacgtattttagtgagaatcatgaagaagtggataatattgtagaagatccatatgtggatatggtgaacgatgcatttaattttaacgtgggatatgatgataactatcgtcatgatgatagttatcagaatgtggaagaaccggttcgtaaccattcaaataagttgtacgacatgttagaaggtgcaaataatcctttgtacgatggttgtcgtgaagggcagtcgcaattatccttagcatctagactcttgcaaaacaaggcggagtataatatgagtgaaaagttggtggactccgtttgcgaaatgtttacagattttttaccagaaggaaaccaggctaccacttcacattaccagaccgagaagttgatgcacaatttaggacttccatatcatacgattgatgtttgtcagaacaattgtatgctattttggaaagaagacgaaaaagaagatcaatgtcgattttgtggcgcacaaagatggaagcctaaggacgaccgtcgaagaaccaaagtaccatatagtcatatgtggtatctacctattggagaccggttgaagagaatgtatcagagccataagacagttgcggcaatgcgatggcatgttgagcaccaatcaaaggagggagaaatgaatcatccttcagatgcagcggagtggagatatttccaagagttacatccccggtttgccaaagaaccccgtaacgtttatctcgggttgtgtactgatgggtttaatctatttgggatgtctcgtaatcattcgttgtggcttgtgatcctgactccatataatttacccccttgtatgtgcatgaatacagagtacttatttcttaccattttgaattctggaccaaatcattctcgaggttgtcttgatgtgttcctccaacctcttattgaggagttaaaagagttgtggtctactggagttgatgcgtacgatgtttcattaagtcagaattttaatctaaaagcagtactactgtggacgattagcgactttccggcgtatagcatgttatcaggatggactactcatggtaatttgtcttgtccagtttgcatggaaagtacaaagtctttttatttacccaatggacggaagacacgttggtttgattgtcaccgtagatttcttcctcatggtcatccatcccgtaggaatagaaaagactttttgaaaggaagagatgcttctagcgagtatccacccgagtctttgacaagggagcaagtttattacgagcggttagctagtgtaaatccaccaaaaacgaaggatgttggtgggaacggtcatgaaaagaagatgcgaggctatgggaaggaacataattggcacaaggaaagcatcttgtgggagttgtcttactggaaggacctcaatcttcgacataatattgatgtgatgcatatagagaagaattttcttgacaacatcatgaacactctcttgcgtgttaagggtaaatcaaaagacaatatcatgtcaagaatggatattgagaaattttgttcacggccagacttacatattgatagtaatggtaaggctccatctccagcgtattgattaacagacgaagccaaacagagtttatttcaatgtgtcaaacatgatgttagattttcagattgttattctagcgatttggctagttgtgtagatctggagaatggaaagttttcaggcatgaagagtcatgattgtcttgtttttatggagcgactacttccatttatctttgttgatctccttgaccggaatgtccaccttgccttatcaggtataatacttactattttatttgccaacatttttttatctaattatttaacttgcacatatatttcaggaattggaacatttttccgggacctatgttcgagaactttacagacaagtcgcgttcaaattctcaaagagaacatagttttaatcatctgtaacttggaaaagatttttccaccatcattttttgatgttatggaacacttacctatcgatcttccacacgaagctgaattcagtggccctgtccaatataggtggatgtacccatttgagaggtttttcaaaaagttaaaaggaaaagcaaagaacaaaagatatgctgcaggctcaattgttgagtcttatatcaatgacgagatttcttactttttagagcactattttgccgatcatatacaaacaaaatcaaggtaaatacatttatttattcaactattttctatacttcgatcttcattcaattacctgaatcaggataacaagattcgatgaaagtaaagttcctgtatatcatgtccgtggagtacctaacatatttatgcacgtcggtcgtccaagtggtgaaatgcatgtagaatggctttcagagaaagactaccaaagcgcacatgcatatgttttaagaaattgtgactattttaaaccatttgagaggtatttttaatcactattaattcgtttgtaaattttcactaagatcactttgatttattttctttgtttgtaaatatagtatgttcgaggattgtctttctgcgaaatatccatgcttgcccgaaaaagaactctacgcgagaagagctgaagaatatcatttatgggttaaagaatatgtaagtctacatcattttagtaatttttaaaagtgatcatttaaattatgttgatattgttattgtttatttattatgtaggtaacatattggaaccctacttttccatttcctacttgggttcaagagattgtgcatgggcctttgaacaaggttaaaacttggccaatgtatttcacacgaggatatttgtttcatacgaaaaatcatgacgttagacgaaaaacatgtaactatggggtatgtgttaaaagagaaaattacgtggattcatctgatgaagcggatttctacggtaccttatatgatatcatagaacttcagtatgagggcatcgtcaatttgaaaatcacactttttaagtataagtg

SEQ ID NO: 162977 - DNA, 1930 bp, Arabidopsis thaliana landsberg
  unsure (1)..(1930): unsure at all n locations
atggctgacgaaatctggttcttccaactcaacaccggagcaaagatcccatcagttggtctcgggacatagcaagctgctcctggcgtcgttggagacgccgtcgccgccgctgtgaaggttcttctgtgattttccgtctcatggtttctcatttgactgatcctgagagatctttgattagatgttctgatccttacatagtttggttttccctcaatattggttgatcttgggatttacggattgatttggaaattcgtttcagtagcagaagaacttaataatcatttcgttttctgcagattggatatcagcatattgattgtgcttcaagatatggcaatgaaattgaggtaaaattcaccgatccgaattctgtatcttccatagtttgcttcatatagttcatcttttgacggctcgttacttgatttgcctttatatagaacagtatatagtatgatcgttcttactcgattggctgttttatgtaattcttactaaggttaaccaatttacatttaggaatgacaattgcacacattgtcttgtgtatctttttcttaaactagctttaagttatgtaggattaatggagttatttgttatagactgtttacaagttcatttgaaatgtggctttttgtttttcttgatggagaaattgaaagctttttttaacctgcagattgggaaagttctgaagaagttgtttgatgatggcgtagtgaagcgtgagaagctgttcatcacatcaaaaatctggtattttgttcatgaagtttctgcatctctatcatttttatgcattttcagtttccctgtttgcttaagcctcttaacctattaaaatctacaaattatgcaagcacaggttgactgatcttgaccctccggatgtacaggacgcattgaacagaactcttcaggatctgcagcttgattatgttgatttgtatctcgtaagcacgacttctttgaacaaatgctgattttttaataagttctaacagttttcaagatccgttcctttcttcaatatctagcctgaattgtccggatctctggatttgaaactatacatatgcttgcttatactttgatttgtttcatttgatatttttttcaagatgcactggcctgttcggttgaagaaaggtactgttgactttaagcctgagaacattatgcctatcgatattccgagcacatggaaagcaatggaagcactggttgattcaggcaaggcaagagccattggcgtaagtaatttctctacaaagaaactctcagatcttgtggaggctgctcgtgttcctcccgctgtaaaccaggtggaatgtcatccttcatggcaacaacataagctacatgagttttgcaagtccaaagggatccacctctcagtaagttttaaaacactaaacatttccaaatcatttaatgagtccgaatgtcatatnnnnnnnnnnnnnnnnnnnnnngattgtggcagggatattcgccattgggatctcctggaacaacgtgggtgaaggccgatgttttaaagagtccggttattgaaatgattgctaaagaaatcgggaagtctcccgcacaaaccgcgcttcgatggggacttcaaatgggtcatagtatacttcccaaaagcacaaatgaaggaagaatcagagagaactttgatgtcttgggatggtctattccaaaagaaatgtttgacaagttttccaagatagagcaggtaagtgaaacaataaaccacatttctgcaaatttcgtatctgtgagtagtcttaactgtaacctcttgtattttggattttgaatcatctctgtgcaggctaggttagtccaaggcacgtcgtttgttcatgagacgttgagtccttataaaacacttgaagagctttgggatggtgagatc

SEQ ID NO: 162978 - DNA, 1053 bp, Arabidopsis thaliana landsberg
  unsure (1)..(1053): unsure at all n locations
atatcaagccggagatttagagcggcgatggcggttaagtagagatagctttctctctttctcgccaaaattcgaggaaannnnnnnnnnnnnnnnnnnnnnnnnnnnnnccaaatcggatgtttcgtttacggcggcggaggaagaagaaactctgccggaagagctacatgcagagctgatgccgaaacatgtggcgattataatggacggaaacggaagatgggcgaagaatcgtggtcttcaaccttgggatggtcacagagctggcgttgaagctttgaaagagatcgttgagctttgtggtaaatggggaattcaagtccttacagttttcgctttctctactgataattggattagaccaagagtgagtgacaaacctaatttttaaattttagggtttcttttcgaaatctcagattttgatgcgattatgagtttattcctctgcagattgagattgatttcttgtttagtttatttgagagatcactcaaaacagaatttcagaacttagccaagtaagtattgcgtataatttgtaatcaagaagtgtttgtgattgattaattatgtctcaaaagctaatcttttatatgtaggaacaatgttcggatatcgatcattggagattcctcgaaacttccgaaatctcttttaagagtgattaacgaagttgaggaagttacaaagaacaacacgaggcttcagctaatcgtagcggttggttacagtgggaaatacgatgttttacaagcgtgtagaggtatcgcgaggagagtgaaagatggcgaaatcgaagttgaggagatagacgagagactgattgaggaagaattggagacgaattgtactgagtttccttacccggatttacttataagaacgagtggtgagcttagagtgagtaacttcttgttgtggcaattggcttatacagagcttttctttgctcaagaactttggcctgattttgggagaagcggttttatcgaagctttgatgtcgtttcagcagagacaacgacgctttggtggtcgtaaatcttga

SEQ ID NO: 162979 - DNA, 2440 bp, Arabidopsis thaliana landsberg
atgtctgcttatacctcattaaactttctcttccttctaaccttcttcattggaagcttgagagcttctgcacaattacaagacccaacttacgttggccatgtttgtactaacaggatatcaagaaactccatttacttctcaaatctccaaacacttttgacctctctttcttctaacaatgcttacttctctttgggatctcatagtctaacaaagggtcaaaactccgacatggtgttcggactttatctctgcaaaggagatctctcgccagaatcttgccgtgagtgcgtcatctttgctgctaaagacactcggagtcgatgtccaggtgggaaagagttcttgattcagtatgatgagtgcatgcttggatactcagacaggaatatattcatggatactgtaaccacaactacaataatcacttggaacactcagaaagttacggcggaccaatctgaccggtttaatgatgcagtgctttctctgatgaaaaagtctgcagaggaagcggctaatagtacaagcaagaaattcgcggttaagaagtcggatttcagttcgtctcagtcgctttatgcatcggttcagtgcattcctgatctgactagtgaagattgcgtaaggtgtcttcaacaatccatcaaagaattatatttcaacaaagttggaggaagatttcttgtcccaagttgtaactcaaggtacgaggtttaccctttttacatggaaactatagagggaactgttcttcctccgccggtttcggctcctccactaccactggtttcaactccttcctttccgcctggttagagctctgttttatttatttacctaatagttagtttggtttgaattcatgtctaatctaagacttatgcaggaaaaggcaaaaattctacagtgataatcatagcaattgttgtgccagtcgctatctcagttcttatttgtgtggctgtttttagcttccatgcaacaaagatagcaaagaagacttatgatacaccagctgcaaatgatggtaaagattccaaaatctatgtgtctgttgcttaaacttttatggatttgaattcttaaatattttgcagaaggggatgacattacaactgcaggatcattgcagtttgattttaaagttattgaagctgcaacagataagttttcgatgtgtaacaaactaggtcaaggtggatttggacaagtttacaaggtactactaccagttcattgagtttccttgttacttgcataagaggatcaaataaggggacggctctgtttaattcacaatctttttagggcacacttcctaatggaatacaagttgcagtgaagagattgtcaaaaaaaacagaacaaagtaagaaagagttcaagaacgaggttgttcttgtcgcgaaacttcagcatagaaatcttgttagacttctcggtttttctgtcaaaggagaagaaaagatcatagtctacgagtatttgcccaacagaagtctcgactacatcctctttggtaagaaaagatacagataatagggttatattctctgaaacactacttcttgatctcatatcctaatttgtgcagaccctacaaagcaaggagagttagactggaaaaagcggtacaagatcattggaggaactgctagagggattctatatcttcatcaagattcacaacccacaatcatacatcgtgacctcaaagcgggtaatatcctcttggacgctcatatgaacccgaaagttgcagattttgggacggcaaggatctttgggatggaccaaagtgtagctattacagcgaatgcagccggaactccgtaaaattctcttatatattactcatgatggttatgaactttaattgcaagaatattttcttgaccaaagtagaattaatcttgtagcggttacatggccccagaatatatggaactaggcgaattctcgatgaaatctgacgtgtatagctatggggtcttagttcttgagattatatgcggcaagaggaacacgagcttctcatctccggttcagaattttgtcacatatgtgagtactataatcgtatctcactgttgttgtaactgtaagatttggattagatcattgaattttgtttcaggtctggaggttatggagaagcgggacaccattaaacctcgttgacgcaacaattgcagagaattataagagtgaagaagtgataagatgtatccacattgcgctcctatgtgttcaagaagaacctacagatcgtcctgacttttcgataatcatgtcgatgctcactagcaattccctcatcttacctgttcctaaaccacctccatccttcattccaggtagaccaaaccaatctacgacgaggcccagttcccaaaataaagatgatggaaggtggtccttgttgaaaatgatg

SEQ ID NO: 162980 - DNA, 866 bp, Arabidopsis thaliana landsberg
atctttgatgaccaagtgtctagagcatatccacacatgacagagactcgaaaagaggaaatgaagcagaaacaatatgcaaattggttaaaataatatgttagttttctcaataaatttatattacttagaatatggttactaattattatcatcgctaatatgatttaattatcttcagatcaaatcagcagcaagtaggcaagaacaatatccaacatggattgaaaagttggttggaagtcctctatcgagggcgatgtagtacccgatgtattgcactcgaggctacgtttttataaaacgttcaggaatgactaaaaggaaaacagtaaatgatgtggtcgtggttcgcacagattcgattgactactatggtgaaattactgatatattggaagttgagtatccaggagtcataaatttgaaatgtatactcttcaaatgtgactggtacgatctgggtacaaaaggtgttagagttacaaagtatggtgtcacggaagttaactcgactaagcggttaagaaagtacgatccatttattctggcatatcaagtggaacaggtttgctacataccatatcccgaagtaggtgagagacaatacccatggattacggttccacaaatcaatccaagacgtagaaccgatggggtgaaagaaacgaaaccgctccaacaaaatgcagtaactagtgattacccaaatagatcaatctgttggtgacattccccttgttgatattaaaaatatagaagttgcagagatttgcgacaatgtagaagacgaagagggtgcacaagagtttgaacatcaaaatgattctgctagttcagattattcttctgactctgaataaatt

SEQ ID NO: 162981 - DNA, 1006 bp, Arabidopsis thaliana landsberg
atgaggaaaagaggaacaaaaagaaagattgaaattgagaaacgcctgactaaacaacaacgatctgtggcctgcagcaaacgccgtcctacactcttctccaaagcggctgatctttgccttctctccggagccaacatagccgttttgtaacttctcctgatgagaactccgacgtcgtttattcattctcgggctactctcatgcctctgaaattgttgactgttacctcaacggcaagtatacctcccaagactactattaaccccgaatcatccaagttttggtgggaagaccctaatctctacggtgattgtgacgatttgtctgagttaagaatcatcgaagatcgtctgatgagaacgaagaagcatctcatggattgtcttgagaagaaagaaaaatcatactctgtttctaaatctgatcaaaaccctaagaacaacggtgggtcttcttcttcttcttcttcttcttcttcttctcaaattgcttctgattctggtcaaaaccctagtacctcttatccgttttttgatcaccactcttactcctcgcttgagccttcgtcacaagttactacttgttttgatcaaaaccctattttctctgttggcagcgagtcatcatctgatcaatctcgttacttggtgaatgaagattctggatttgttgacggcctcttatgtgaaacagaggaagagaataacggaatgcgtcttccccaagaaacacaaacacaaccgatgttcacagaggaggatcagagcttttgggaaaacctagatgtcgacgacgtgtttggtctttttaaggacgacaacaatcttgaggttcctcttcaagatcattcctcaaccaacgaagacgacgagttattgatcgacataagtgaatacttaagcgaagaagcaatggaatgcccatgttttagttagttctcacagcttgattaagcacgatctcatagttaattacggttttagttagttcattaggtaatta

SEQ ID NO: 162982 - DNA, 794 bp, Arabidopsis thaliana landsberg
atgtcgggagatcacgcccaagaaggagatggagaccgacgaaaacccactacaagccacgggagcacttcatcggaagaatcccgcaccaagaggaaggagaagaagaagagctcctccaacaaaggaaaggagaagaaatcttcttcgcaccacaaagagaagaaggagagatcttcctcccacaagccacatcggagaggagacaagcacaaaaggatgaggaaagtggtctactacgagaccgacacttcatcaacatcgacctccgactccgatgcgccctctgtaacttctaagcaccaagagcgtaagaagtttagtaagattctcctacactaccctcgcatttctaaacatacacctttactttccgacccattagcaaaccaccaacatttgatggtgaagattatgctaggtggagtgatttaatgcgatttcatctaacctcactccacaaaagtatatgggatgttgttgagtttggtgcacaggtaccatccgtaggggatgaaaattatgatgaagatgaagtagcccaaatcgagcacttcaactcccaagccacaaccatacttcttgcctctctaagtagagaggaatataacaaggtgcaagggttgaagaatgcgaaggaaatttgggatctactcaagaccgcgcacgagggtgatgaactcaccaagatcaccaagcgggaaacgatcgagggggagctcggtcgcttccgtcttcgccaaggggaggagccacaagatatgtacaaccggctcaaaaccttggtgaaccaa

SEQ ID NO: 162983 - DNA, 2098 bp, Arabidopsis thaliana landsberg
  unsure (1)..(2098): unsure at all n locations
atggaaccagaagtaatcagagacaaagactctatgagaaaatggtctcgagccatgagatcacaaggcaagaccattggtttagtaccaacaatgggttacctccacgaaggtcacttatctctcgttcgtcaatcactagccctcactgacgtcaccgtcgtctcaatctacgtcaatccaggccaattctctcccactgaagacctctccacatacccatctgatttctccggcgatctcactaagctcgcggctctttccggtggtaaagtcgtcgtctttaacccaaaaaacctctatgattacggcggtgagacgaagaagataaacgacggtggtggtaatggtgggagggtagtgagttgtgtggaggaaggtgggttagggcatgagacttggattagggttgagagattggagaaaggtttgtgtgggaagagtaggcctgtgttctttagaggtgttgctactattgttactaagctttttaatattgttgagcctgatgttgctctgtttggtaagaaagattatcaacaatggaggattatacagagaatggtgagaattggtaacattttgcacaatttcttgctggtatagagattgtagagaatggtaagcctgatgttgctgtgtttgttatgtaggttcgagatcttaattttggtattgagattgtaggatcagatatagctagagaaaaagatggacttgcgatgagttcgagaaatgtgcgtctttcagatgaagaaaggcaaagggtaaagtaacaactcctttatgttctggtatgtgaacaaggatcaaggatggcttactttgtttctgttgttttgttatgatatggtaggctttgtctataagtaggtcactggccatggctaaagcttctgttgcagaagggaaaaccaattgtgcagagcttaaggatatgatcattcaacaagttgttggatctgcaggacgagtagattatgtcgaggtaagcatttcattttattggaagtggagttgaatttcagttgttgtttggatcaatctgtacacacatgtgttttgatgtgagccatgcgattgtgtgcatatgcagatagttgaccaagaaactcttgaaggagtagaagagataaagagtggggtagtgatttgtgttgctgcttggtttggaacggtcaggctcatagacaacattgagatcaatgtctctctctagatctcactgtatgcatcaaacttcatgaaaaaacttggaagcttcgaagctagttatttttgactggaatatgtgacaaaaaaatgcattcgcaaatccaaaagattgatgagtatcatcgtaaactatcagcttcaccatgtttgtgtgtacgtgataggattgaagcaggaatgatatttgcacattctcgttgtctctgttataacctctttcattgcaaacctgagtgttttgagttttgaattttacacacagttttggtattctgtatacgcaagtcggaatgaattaaacatcacaagctggccatgatagagattcatctttatacatataatatgttacttatatggaaagacccgtctgaaggggatcgatcacgagcatcagattactccagagtgatatgatattgaatcactttgacaagctcattgtacaaagctatctgttagttatgcgtgacacaatggacatgcacacacttctggcaatggttaagcaaatgtccgcttttgcactaagagaggctgataatgctcttctcaaatggctttggctgctcctcaccattttaacgattanatanaagaatattgtggggtgagagaggctcgaactctcgacctcaggatcactcaatagctatgagacctacgcgctagccaactgcgccaccacccctttgctgtgttacctctctctgtcaaaatatataattgtttttgttctttctctgttaagttgtactcgtttatgggtcgtttggcccaaaccacacatcacagttttgattcaccagttgttgagataatcttaaaacttaagaatgagttttctcagaaatttatcaaaccgtcatacaatgctccataa

SEQ ID NO: 162984 - DNA, 2484 bp, Arabidopsis thaliana landsberg
cacaagtccatgtagatttcataaccgaactatcgccatgtgtgatcgatgaagtccctaaagaaaacggggatgctctacgcaaatggctcttcatcactacaaggttacggtcttggaatcctactctagtctccgaccggggaggtgcttgaacagttgctccgacttccattcaaagcatccaacaacaaagcgcagtacgaggcacttctcggcggacttcgcctcactgaagggattggggccaaacgaatcaaagcctttagcgattctcaacttgtggtaagccagtttagcggggacgaaagaatgcgagcttatctttcaaaattgacatgattaaaattccttggagagataactcttcaacaaatgccttagtcggtctagtcttgtcgagagcataagcaaaccacgtatcaaactaccaattttgacatgcgtcatcgtggatcctataacgaccatggatgtagatgccgatgcaaccgacacgccagatatcgaagtagacctggaaccttcagattggagagatcccataaaactctatatcgccgactttgtaatctagctcctgttagcaaacttggatggaaccaactctaataagaaatggctcctccacgtcgacggctcctccaaccgacaaggaccgaagtaggaatacaactcacctcccccactggggaagtcatcgaacaatcgttccgactcagattcaacgcatcaaacaatgagtctgagtacgaagccctcattgctggcattaagctagcccaaggaatggggatccgcgatatacacgcccatagcgactcccaactcatcaccagccagttccacggggaatatgaagctaaagacgagtgcatggaagcgtacctcgaactagtcaaaaccttgacccaacagtttgaatcgtttgaactgaccaggatccctagagggaaaacacctctgcggacgccttggcagtctcgcctacacgtcagatcctttcgtcaaaagaattatcccagtcgaaggaatagaacacccaaacatcgacttaacggtcaaacacgttgggacagaaacctcggcaacttgcaactttacgcaagtaacccgaagcaccacctccgcggcttgagcccttgcagcggccgcagaggcaggtgcagcggaggaagagccggagctcgggacccccgaacaacctgcctcgcacgaacctgaaccgtacaatgactggagaatcccaatcatcgattacatcgaacgagggatcacacctcccgacaaatgggagaccagaaaactcaaagcccagagcgcaaggtactgcattatggaggggagactgatgaaacgcagcgtcgtaggtccctatatggtgtgtacctacgggcaacaaacgaaagacctcatgaaaagcatgcacgaagggcaatgtggtagccactgtagtggacgtaccctcgccctcagtattaaaaagtaaggctacttctggccaacaatgctagccgattgcatagctcattcactcaggtgcgataaatgccaacgacatgcacctactcttcatcaacctcccgaggaaatgtcctcgatatcttctccttacccatttatgaagaggtccatggacgtcgtaggtcccatggaagcctccggtgggaagaagaaactaaaaaacctactagtcctcaccgactattctaccaaatggattgagctaaagccttccaacaggtaaccaagaaacaagtcgaggacttcctatgggaaaacatcgtatgcgacacggcataccttatgagatcgtcaccgataacggactaacctcacctcgggaaaaatcaaagcattttgcgacaagtggaagatccgtcttaccatatccacccccgttacccacaaggtaacggacaggcagaagccgccaacaaagttatacttagcaacatcaagaaaagacttgattcaaaaaaatcaatgtggtccgacgtgctccacggagttctctgggcctaccgaaccacacctcgcaaatcaacgcaagaaacactgttctccctcccttatggtttagaagcagtaatccctgtcgaaaccatattaccaagggggagaaggaccgccagtcctgctaactcgtacctgaacacgcaaatgttacaggacaacatggacttcatcgatgaacgcagagatcagacaatgatccgagttcaaaattatcaacaagctgccgcccgctactataactccaatatcaaaattcggagattcgaagtgggagagctcgttctacgaaaagtgttcagcaacacaagagagctaaacgccggaaaacggggaactaactcgaaaggtccctatcgaatcaccgaggtggtacgcgacggcgtctataagctagaaaaagttatcaacggagtacctgagttacggcctcggaatgccatgcatctcaagaaataccacgaatag

SEQ ID NO: 162985 - DNA, 1896 bp, Arabidopsis thaliana landsberg
gaggtttttgggtcatgcagggttctacaggagatttattaaagattttaccaagatcgctaaacctcttactcagttggtgtgcaaggaacaaaagttcgagtttaatgacagcaatttgtaggcattcaatatagttaaggaatctcttgtgagtgctcccattgtgcaaccgccagaatgggaactaccttttgaggtaatgtgtgatgctagtgattatgttgtggatgttgttttgagacagaggaatgataaaaagttgcatgctatttattacgctagtcgcactcttgacggagcacaggtgaattatgcaacaacagagaaggagcttcttgctatagtgtctgctttagagaaattagattctattcggttgggtctaaggtcattgttcacactggtcatgccgcaatgagatacctgttgtctaagaaagatgccacgccgagactattgagatggataattctgctgcaggagtttgacttggagattaaagataagaaaggtattgagaatgaaaaccttgcttcgattgaagattgctacatggatgaggtggagaggttacgagtgagcactcttgagcttatgacattacacactggggaaagtaatttcccttggtatgctgattttgcgaactacctttcttgtgaagtcccaccacccgattttaccggttacttcaagaagaaattctaggatgagccttctttatataagaagtgtgttgataaccttttcaggagatgtattccagagagtgaagtcgaaggtatcctttacagttgccatgcttcagattacgcaggacactttgcctcattcaagactgctacaaagatcctccaagctggtttctggtggtttactctgtttaaggatgctcatggatttgttgcgaagtgtgacgcttgccatcgtaaggagagtataagcaaaaggaatgagatgcctaagaactttattctggaagtagaagtgtttgatgtgtggggaattgacttcatgagaccattcccatcttcataaggaaataaatacatactggttactgtagattatatctctaagtgggttgaggctatagcatgacccaagaatgatggtgcagtgttactcaaaatgtttaaaaagatcatcttcccaaggtttggagttccaagaatggtgatcagtgatggaggaagacgcttcatcgataaagtttttgcgaacttgttggcaaaacattgtgtcaaacataaggtagcgacaccctatcacccccaaacatgcggccaagtcgaactttccaacatggagattaaggggatattggagaagacagtgggaaagtctagaaaggatggggctgtaaagctagataatgctctttgaacatataggacaggctacaagactccaattggaacaacgccattcaacctcatctatggcaaatcttgtcatctaccggtagagctagagtacaaagccttatgggctacaaagttgatgaactacgacattaaacccgctggggaacgccgtttacttcagctcaatgagttggatgagattcgtttgaatgcctatgagagttctagaatttacaaggagaggaccaaagcccttcatgacaaaaagatcattttaaggaagttcgcagaaggtgataagatactcttattcaactcaaacctcaagatatttcctggaaaacttcgttcaaaatggtcaggccctttcgtcataaaggaaatgcgacctaacggtttagcaatactctgggataacaatggaaagccgttttctaccaatggacaaaggctgaaaccgtaccttgctctttccactcctgaaaagggcatagcagttcctctaacggatccaaataaggcataa

SEQ ID NO: 162986 - DNA, 948 bp, Arabidopsis thaliana landsberg
atggaggggtttcatatggtctcagatatgtgtcctcagatcactgggtggcgaatttatgtctttgtcgtgagagtcttcaagaaggttatatcgcctaacgtcttcgaactcggccttatcctggcagattacgcggtaatttccgtcaaatcattatgtgtttttctcgttcattcgcttaacttgtatataaaactgtctactatcatgttctgtagggatcccattcccgtattgaggccaccgttgatcgtcgccttgctccattttacgaagaccgattcgttgaaaatgagtggaagacgatcacctctttcttggtccgtaagcaactgactcagtcagagcaacaaagcatgaatacggcatattgtttatggatcggaccgtcgtcgttgaggccccaccgagatcaccaccagttccagatttcgatttcactcccttcgactacattttggagaaatctgcttacaagaacgttttagtcggtgagcaggatttctcccgatgctttatttattacatttttgaaactttttaattattatctttgtttctccatcatctagatgtcgttggagcgttggttgatgtaggcggattgactacagactattacggtctcaaactgagtttcaagataaaagatagatagtaagtgttcttttcatttgttttatttacaatgtcactctaaacgctaactgtccttatttctaacgtagcaatgaagtcttggagtgagaagctcgcaatcaacaggcggaggacttggatggttactttcagagtttgggtaagggcaattttgttgtcgcactcagcttttggcgtttaaccgaattgtctaacccgaagcttgcgagccatggtcctatatcaaaggtagttgccaatccggacatattagaagttgcggatatctcgatggtggttttttag

SEQ ID NO: 162987 - DNA, 2612 bp, Arabidopsis thaliana landsberg
cttagaagacatgagagaatcgttagttgcaatcttggtgactgttatatcagttcttggagcaattcaccaagtgaaatctcatgaagaccaacctttatcaggaattgctgtccataagattacatttggtctcaatgaaaaagcttatgtcaaagcatctccaacagttcttggatctaacgtaattataaccattctcttcctctatttctcatcgcttttgatgaattactaaacctcaatgcatttttttttcagggtcaacatagtgaattagtattggtccaatatagttctccgaaaccatctgatgatgattggattggagtgttttctcctgcagatttcaagtagtttaacacatccttcttatcaaatcagtgctgagattgtaaataagagatttaacactgttttgttcctgcagtgcttcgacttgtccaggagataacaaaatggtccaaccacctcgactttgttcagcgcctgtcaaggtttccttgttttctcactgttgattctacttttcttctctgttgcaagtgttttagctttctcctcctgtttctttctttacagtttcaatatgcaaactttagtaatccaagatacaccaatactggaactggttccttgaagcttcaactgattaaccaaagatcggatttctccttcgcgctcttttctggcggtttgttgaatgtaacactctcattcatctacaacttctctagctttactagttgttagcttcatctttaaccatcccttggtttttttcttttcttgtgtgatatagcccaagcttgtggcaatctcaaacaaagtagcttttgagaatccaaacgcaccagtttatccgcggttggcgctaggcaaagaatgggatgaagtatgattctaaaactcttttggttatcatattctgtgctacaaagaagtgaaaatgagttatgtaaaatagatgacagtgacatggactagtggttatggactcaacctagctgaacctgttgttgagtggggcgttaaaggaggagaacgtaaactgtcacctgctggaacattgaccttcgcgcgtaacagcatgtgcggtgctcctgcaaggaccgtgggatggcgtgatcccggatacatacacacagcttttctcaaagagttatggccaaactccaagtatgtgccatgtgttttctctgttttgtaccaatgcattagcttcatggagtaataatcactgagctttgattgatcattatataggtatacctacagagttggtcatagattgtccaatggtgcattgatctggagtaaagaatatcaattcaaatcttctcctttcccgggacaaaactctgtccaacaagttgtaatctttggagacatgggaaaggtttgatcttttagtcttaaagcatatcagactgtttattgctgtggtctcaaaaccgcatttatgtccttttcttgtgccatgttgttgcaggcagaagtcgatggctcaagcgagtacaatgatttccaacgcgcttctctcaacaccacaaagcaacttattaaagatctaaagaagactgatgcagttttccacattggagatatttgttatgcaaatggatacctttctcaatgggaccaattcatagcacagattgagcctattgcttccactgttccatatatgattgcaaggttttgctttttttgtttcttttttaaagacaatgttgttggctttcttgtttacctagtcttgaaaatttgactctgtgcagcggaaaccatgagcgtgtctggcccaactcaggatcgttttacgagggtttagactctggaggagaatgtggtgttccagctgagacaatgttctatgttcctgctcaaaacagagctaaggtctggtactcgagtgactacggaatgtttaggttctgtgtggctgacacagaacatgactggagagaaggaacagagcaatacaatttcattgaacactgcttagcatcagtcgacaggcaaaagcagccatggctgatattcctcgctcaccgtgttctcggttattcttccacatatttttatgcggaagaaggctcttttgccgaacctatgggaagagaaagtcttcagaagttatggcagaagtacaaagtcgacattgctatctatggccatgcacataactacgagagaacatgcccggtttaccaggtaaacatcatgtactgtactggcatatcgaagaatggttcttaagaaaagggaattattccattgtttgtttcgtttcttgtctgtagagtgtatgcacgagtcatgagaagagtaactacaaagctccattgaatggaaccattcacattgttgctggaggtggaggagctggtcttgctgaattctctgatcttcaaccgaattggagtctgttcagagactatgattacggattccttaaacttacagccattgatcactcaaaccttctgtttgagtacaagaagagcagtgacggacgagtccacgattctttcacgatatcaaaagattacagagacatcttggcttgtgcggttgatagttgtcctgcaactacacttgcttcataa

SEQ ID NO: 162988 - DNA, 1558 bp, Arabidopsis thaliana landsberg
atggagcacctgcctatacatctcccctacgaagcggaattgggcagtcctgtccaatataggtggatgtatccttttgagaggtttttcaaaaagttgaaaggaaaagcgaagaacaaaagatatgcggcaggatcaattgttgagtcttatatcaatgacgagattgcttatttctcagagcactactttgccgacagtatacaaacaaaatcaaggtaatcaaatatctatacttattaatttaagtttctatgaataaaaaatcatgacttttaatatagtttatttcgatcaggttaacaagattcaatgaaggtgaagcccctgtgtatcatgttcctggagtaccaaatatctttactcacgttggtcgtccaagtggggaaatgcatgaagtatggctttcagagaaagacttgatatgcgcacatgaatatgttttacgcaattgtgattattttcaaccaattgaaaggtatatgatatagtttaatttaaaaatttagcatatttgtgaaacttctcatatattttttggtttaattttgtatagtatgttcgaggatatgctttctataaaatatccaggaatgtctgaaaaagaactctctacgaaaagatctgaagaatatcatgtgtgggtgaaagaatatgtatgtttgtttacatttattaatgtatatatgaatgcatttatttatacttattaatttatataaatgatgttcgtttacatatatatatgcaggttacatattggagcgacaagttaacatttcctttttgggttaaagatttagttggtggacctttgcacaaggtcaaaacgtggccaatgtattttactagaggatatttgtttcatacacaaaatcatggcgcaagacgtagacgtgtaactatggtgtctatgtgaaaggtgaaaattacacaaatgcatctgataccgcagatttctatggatacttaaccgatatcatagagattgagtatgaggggatggtcaatttgagaattacactttttaagtgtaattggtttgacacaaagatcggtagaggcactcggacgaacaatagtggcgttgttgacgttcttgcctcgagaaagttcaacaaatatgaaccattcattctaggtacgtacaaaattatgtgtatgtatcaattaaaaaatttaagatcacatacataaatctaataatccgcgctttatggtccaaattcaacagcctctcaagcggatcaagtgtgttacattccttatccatacacaaagtaagcttatgcgggagtggctcaatgttttaaaagtaaatccgaggggaaacttgttaggagaatatgaaaacaaagacccgactcttttgcaaacagaaaatgatgatggtgtattattgactacagttgaagatatcgtactcgacaatctgacagaagacttgaacccaataattctcgattgcgatgtcggagatgcagatccagaagatgaatttcagtgtaatttatcgtcatctgatgatgaagaagaagaagacggagaaccaaactaa

SEQ ID NO: 162989 - DNA, 5011 bp, Arabidopsis thaliana landsberg
  unsure (1)..(5011): unsure at all n locations
atgttggacaagtcatgggtgcatctatgcaggtaatgaataaaattatatagataggtttaatttaaattggggtttacaacattgcttgagttttttttcaacttaaattcttcattgaagagctgatcctggttatgagagaggtgctcggaagtttgtatttgatgtggctgcgggtttaggagatatagataagatattatgtccattcaaagactgtcataatgtgtaccgccacttaagtagtgatgtggtggttcatcttgtaacgagagggatggatgaggcttacaagctgcagagtgattggtaccatcatggagactcagtagctgatggagaaggtgaaagggaagtcaatcattggaatgaggaaattcatgagttatacaaagctgctgaatacaatgaccaagagttggcttctaatggtgatatagataacaatccagtggttgacttaggtgagattgcaaagggtgaggacaagagagaagatgagtttctagccaagctagcagatgcagaaacccctttatatcctgattgtttaaaccacagcaagctatcagcaattgtgtctctctttaggcttaagaccaagaatggatggtctgacaagagctttgatgagcttcttgagacgctgcccaaaatgtttcccaaggacaatgtgcttcacacatcattgtataatgtgaagaagtttttgaagagctttgatatgtgatatcaaaagatacatgcgtgtgtaaatgactgctgtcttttctgaagaagtacaagaagctggaaaattgtcccaaatgcaatgcttcaaggtgaaagattaatatgcagacgggtgaagtcaagaaaggtgagccacaaaaagtattatggtactttccaataatctcgcggttgaagagaatgtttagaacagaggaaatggcaaaggacttaagatggcatttcagtaacaagtctagtgatggcaaactttgccaccctgttgattcagtaacatgggatcagatgaatgcaaaataccctttatttgcatcaaaggaaaggaacttgaggcttggtctttccacagatgagtttaatccattcaacatgaaaaacacaaggtatagctgttgtcctgttttgcttgtaaactacaatctgcctcctgacttatgcatgaagaaggagaacatcatgctgacattgttgattccgggtccacaacagcctggaaatagtattgatgtatacttagaaccacttatagatgatttatgccatctgtgggacaatggggaattgacatatnnnnnnnnnnnnnnnnnnnnnnnnnnnnnnnnnnnnnngctgctttggacgattagtgattttcctgcttatgggaatcttgcgggttgtaaagtgaagggaaaaatagcgtgtcctttatgtggtaaacattcagaaagcatgtggttgaaattcagcagaaaacatatctatatgggacatagaatgggtctgccaccatcacataggtttagaaataagaagtcttggtttgatggtaaagctgaacatcggagaaagagtagaatactaagtggtttggaaatttctcataacttgaaaaatttccaaaataattttgggaatttcaaacaatctacaaggaagaggaaacaaccggagtctgttaaatcaggatcagatagtgatgatctatctagtgactcggaggaggatgaggaagaagaggcagaagtagatgaggaagagttatcaagatggaagaaaannnnnnnnnnnnnnnnnnnnnnnnnnnnnnnnntctgttctcttttcttgaaatatgttttattgtttagattgaaacaaagggaaaatgtctaatgcattttgtttgtctgttttgcaggacctaccagtaaggcataacttagacgtcatgcatgtggagagaaatgtggctgcatctattgtatcaacattgttgcattgtgggaagtcaaaggatggtctcaatgctcgcaaagatctcgaggtgcttggtataaggaaggacttgcatccgcaaaccaaaggcaaaagaacatatcttctcacagcactttggtctctctccaagacagagaagaagatcttctgcaaacgtctatttgattttaaaggaccagatggctactattcagacatagcaagaggtgtatctttagaagactgtaaggtaacaggcttgaaatcacatgattatcacgtcttaatgcagcagcttcttccaatatctttgagagggttgttacctaaaggtcctagggtagcaactgggcgcttatgcaaatttttcaatcacttatgtcagagagtgattgatatggagcagcttttggaaatggaagctgagattgttgaaaccctttatctgtttgaaaagttttttcctcccagtttctttgatatcatggtgcacttgacaattcatttagggagagaagctcggttaggggaaccagttcatttcagatggatgtaccctttcgagagatatatgaaagtcctcaaagattttgtgagaaacactacaagatctaaagggtgtattgctaagtgttatttagctgaagagtgcatccaattctgtagtgaatttttgaagaagacaacaaaaattcaggaaaaggcagatataaatactgagtacgagaacaactctatccttggagggcgtcctatctctgcaggcaggtttattaatcttacagaaatggagaccaaaatagcccatttggctgtcatccagaatatggctgtcgtcgaaccatatgttgagtaagtgccataattgcttttcattcaacattttccaggcaattactatggctaaatcatatttttttttatctttttactagtgagcacctgtagcttctacaaaacactaatgggagatgcagacgtgatgcatctctgttatggagtatgcacacccaaaattttgtttcttagcttatagaacaggctagtaattgtctttcacttattaatttgtttgtgatagatataagagcctgactttttttgttttttttatagatacatcttgattctagtactcatggagaaacactgaaatggctggcttatggtccacgtagttgcgcaaggtcatttactggttacatagcgaatgggcaacgattacacacatgaacagttgacaagaaaacatagaatagtggtgttttctatgaagcgacaacagtttgtaggtctagtgcaaaggacaattcacaagtgatggatttggtgcagtattatggctgcataacagacattatattgttggactataatgtcttctatgttcctttattccgttgcaactaggcagtaaagggcaatggagctaaggaagaagaagggtttacatttattaacttgaatcatagtcaagtctcttttttaagggatccgtatattgtagcttctcacgcaaaacaagtgttttacatgcgtgaagatgactcgtcaacttggcatgttgcaatgagaggtccgtcgagaagattcagagaggaagagagtgacgatgttactcttgacattgggccattgcccacaacagttgacatcgatgttgacttggaagtagctgagaatgagagaagtgattgtgaagggatttacattcgagtgatgattttttgtctgtctttgaagtgagagaagtgactttgttttaactttgagtgatgattgtgtgtctgtttgagtgttgattgtctgtcggtttgtgtgttcattatctgtctgttattgtgtttcacttattaatggaattaatgctctttttttcttttttctcagtgatttacagtgggacaacagaagaaaaagcgtggaagacaatctaaaaaagcttctcctaagaaatgcaatgacgataaggtgaagtatgtgggtacaatagagccaacagatgtagaacaaactaatcaagttccagcagaaaacattgaggaagctgtaaacaatgtagagacagaaaaagaagctgaagttcaagcaacagtagaacaaggagataaagaccctgatgtggaagaacctgaaggcgagcttgaattatctggagatgaagatgcagttcaacctaagaccaagaggcaacgtggaccaactaggatgaaagatattgctaaggatccaaatgccagttttagagtggagtacaccatgatgggagagcctattggtaaaggctcaattaagttagcatcatatgcaggcgcattggtccgtgaacacgttcctatcacaattgatcggtggacaaaaataggtgaagaaatcaggacacttctctggaaatctgtccaggtaacacttcatttttttttttttttgtaatatttgactatctttccttatcacagcaataatcactttttctgtaattgattgaaggcaaggtttgaactagatgaggagtatcaaaaggttgcagtgcttaagcaaatgggatgtttgtggagatcctggaaatcaaggcaagtaactaagtttagagaagcaaagacaaaccagcaaaggatgaatctgagacctaaaaatgtttctccatttgagtggaaaaaatttgtgaagagcaaaactagccctgaatttaaggtatgttgagggagaagattaaactaagtatatttactatgtagaaagttactaattaacaatcattgttaggttataagcgatagctacaaggaaagaaggcgcaaccagattcctcacacttgtagtcgcagagggatggttagacttgcagaagatatggtaatcttatgtgcctgttaggttatgtttcttattgctttgaaattttaaaacacttagcttgctagcaatattggcatgttgtgtttttcagaaaactggtagtgcagacccaactgaagtgacgaggctaaaggtttgggttaagtcacggaccaagaaagatggaacaccagtgaatacaaatgcggctgaaaaaatt

SEQ ID NO: 162990 - DNA, 5233 bp, Arabidopsis thaliana landsberg
atgagacgacattggatcgccttgtcttatccctttcttcccttgaaagtggcctatcaactcaccattgaaagcaacactataagagggagtagagatacaaacccggatccaaccaatgaatacttgtggcagctccatggcagtgagaatgttgagaaggaaatcccagttaacattatcataagccttcgtcaagtcaatctacaagcagcccctagacgtctcaccagccaagtgaaaatttttgactagctccgaagccaaaaggacgttttcacataagaggcgacccttaatgaaacccacctgattcccttgcaccacatcagggataaacatcttgagtctcttagaaatgaggcgagtaattgatacaagggttttgtgtgtcaattccctaaatgcattttatgtcattgtagcatttaaggtgtcaatccaattgggtgtaattgctaacaatcaggatgtgataagagaatactaagtcaagccaagtgtgaataggtttggtgtgtttctactaaacctaggcaacaagttaacatgcaaatcgaattcagaaacaaaactatactaagcagaagataaagaactcaaataacaagagcagaaatgaaactaaagaccaggaactatcaaatgcaacaaccagaaagtaaaccaagcacaaagtgaggcactcggccgagcatactactaaaacaggtcgagtagaatactaaaaacaccaattttgcacgagaactaaacaaaacgagtagagtactaaagacacgagttttgcacaataaaacgaaacagagctcttaagaatgggttaattggttctagtggactcctcaatccattagctaactttcaaactccatcaagctatccctagacaatagatttaaaactagatcaatccacttcgatgacaatgatcctcataactttaccacttcctaatctcaatttccattgatgaaacatagcaaagcaggctttaaacaccaatctattaaagtcaataaacagtctaaacatccaatgtcttgggttagaatctacaaatctctaaaattagttggttcagacaattcatcaaacatttgttaggtggagaaagtctgaaatcaattttcaattgattagaaagaaaatagcattaagaattcctaaaccataagggaatcatgcatataaacacttagctagctaaagaacaatgaaatccacctaaacctaacccatcctcaagaactctgaaaaagactactcaagaaccatgaagaacatcatacaaaacccagaaaaatcataaaacccagaaatcattataaacttagtatgcaatagatctaagcaagataaacaactttgtaaaagaaaataattgcaaaaacttaaaaattcaaaaggaaattaaaggaacatatttagggttttcacaaaagaggctagaacaaaaggaataaaagaggaatctccattaggtaaagggaaggggtctatttatagcaaatactaggttgccctaattcgctagaagacaaaataagaaagtcagcgcagcaccactcgggtctaggccgagtagaaaagtcgagcagcttcccttggtcacatcactgggctgtagtccgagtagcttggtagagtaggtgcgaatcttcaagattcactttttcttcacttactcgacatgcacgtcgagtataaaggtcgagtacaacacaaatcctcaaaaatggcttctgctgcacattctgttgtcactgttgcactgctaaaacttctgatgcaccactcgaccttatcccgtgcttagatctcgagcatagcttcatttctttgcgtggcatctctttggcttgatcactcgacgacatcccgagtattgaccacgagctcaacttcttagttccaaaaactcccaaaataggtccaaaagcacctgttccacctgtaaaacactccaaatgcaaatatgctatgtactgcaatgcaaaatgtgaaaaggaaggaaaatggactaagaatgcatgaaaaaggcatgaaactaagctaaatgcatgaaaaacaagggcttaaaatggttaaaatctagtgttatcagtgagtacaacaactagaaccgcaattggattttaaaagcctaagtattgtattcttgtaagaagatacaaagacaaacagtcatatgaacttcggctacaccatcaaagctttaagaagcaagaagaagcttggttagtgttttggagtgaaatatgacttgatgtgatgtgtatgagtgagtataacaactagaaccgcaacaagattttaaaagcctaagtatgtatcttttacattgttcgtttgtctatagctggattcagcgaccaattatagcgacaatcgctaataactgtcgctgtgttgttcgtttgactgtcgctataaacagtcgctatattgtttagaaaaattaattattttttgtgctaatttatattttaaaatcaaaatgtaaatcatatatatcatacaccatgagaaaaaataaattaatatatttctttattttagttttatcaaatttaatttgactataattagcttacattatttgaatttaatttattttatcttcatttaataaaaaaattaataattaaactagaactcaaacccctcgtgatatcgcagagaaaaatatgataaatttgtttatataataatttctttaaaacaaatctaactccaaatgatgcatattataaatttttgtagttcttcaatagtatatatataagtaaccggaaaaaaataaccgtaaatattttgactgaaaatgacaatataggaaagttgcaataaaagacacaagcgagaaatatcaaccgtcaatatttttttacgaaaagttgcgatgaaaagacacaacaattcagaatgcaaaagacatttatttaagtttcatttaatttaattctgtttaatttaattatttttaattattctttaacttatattttttgatcgctaagttgttcgtttgcatgtcgatggattcagcgaccaaaagcagcgactaatcactgaaatcagcgcctgatcgcaaaactttcggcgaccaaaaattgcggtcgctggtcactggcgactgtcgctacttttgatcgctgtcgttggtttcagtcgccagcgacaggcaaacgaacaggacctttgttagaagatacaaagacaaacactcatacgaacttcggctacaccataaaagctttgagtaggaataaaaaagcttggttagtgttttggagtcaaataagactagatgtcatgtgtataattgagtataagaactggaaccgcaactggttttcaaaatcataagtagtgtttccttgttagaagatacaaagccaaagactcatacagacttctgctacaccatcaaagctttgagaagcaataaggagcttggttagtgttttggagtgaaatatgacaatatgtcacgtgtatgatgtagtataatgatatgtctaaaatttgcatgttttcagtgtccattcatcatcgttttgagtccagtttcgtatcattcatcactgttttatatcatttctcatcattcttgcatactttgcatgattaggatagctttgcatacatattgcatttctgagttgttttcaggtgatttggagctgtttgcgagcaaattggaagaaacgagtcagaaacagaagacatactcgacccccaggtcgagtgactttggagccattcttcccacatactcgacccccaggtcgagtgactttggagccattcttcccatctactcgaccaccaggtcgagtaacctcagctcgaccgttcactctaccacattactcgaccccctggtcgagtatcacttcgccacaccacctgaccacactcgaccgttcactctaccacattactcgaccccctggtcgagtatcacttcgcaaaccacctcacaacactcgaccattcactctaccacgttactcgaccccctggtcgagtatcatcactcaccaccatcaccatcactcgaccagacactcgatcacgtcttcacagtctactcaaatccgcactcaacaagacaagctgagcacaaggaagagaagaggagaagacaaagtgtttggaagcggcctggacctccatcggatcacgaagcccatctcggcccattatcactctatgggtcgggcgattaggttattggcctgcctactatcattttatttcgttttgtataaatagatttcttagggttctgtcctgagacatctagtcgacattgagtttttgcttcagttttattttctgttttactctgctgcgccgcttttgcttctacaacctgtaattcgagatttttccaagttattcagattccgcatttgatttcatctgtcatcttgtttctctactctttatctctttacttatgcaatattatcgtttatctgtgtttaagtctttgagcatgttgtctgagtagtgacttagaattatttgggatagagtagttgtggaatccgtagtctgtagaatggttaagttttagaattgattgaatccctttaggactagttgtgttactgcttatttctttctgataaactggaattcaattccaagcattctcgcacccagaaggtgttcgatggaatgtttgatcccctagtttctgagatattcatctctatcccaagggattggacttttagagtgtttattgactttattagtctgttctgattgcctgcatagttagattccgttaatgggaattaatctgggctagctttgcttgaggatttctatcacgggaaagaattgatctgttgttgaacctgttgtctagggatagcttgattgtgcttgttaaccattcgaataggctaggataccactttattcgattaccccatccttaggaatttctcgtctatctgatttctctgttttatcgttattgcttaatcgttctcattgcttgattctttatttttgtaattattcgaccagtatactcgaccacacctagtgtctggcaacaaactgtgcagtcgagtatatctgtttcatatcctgtctgttactcaacctgttactcgaccacatcctacttttggcatcagcctgttgtggtcgagtgattttagtaattctgttattgtttctgttttctgcatgttcgcttagg

SEQ ID NO: 162991 - DNA, 1194 bp, Arabidopsis thaliana landsberg
atggggccaccttacaaagactctcatctcctggtggtctctgatctgctcctacctaactctagtgtttggaacttaaaactcattagagttatcctgccagaatacgagaaatgcattctcagtcttcacccaagctatctaggtgccatcgatcactgggcttggctccctacaagttctggagactaaacctctaaatctggctactgggaagcccttaaacttgaggaagacttggatccctttggtccccgggtttctcctgatcctttcaactggaaaactcacatttggaacttaaaaacttcgccaaagactaagctcttcttatggaaagcatgtcagaatgcccttccagttggcctcaacctcacccaccgacatatcactgagtcagcaaaatgcccgttttgtgacgctgatgaatctgttctacatcttctcttcaagtgtgcttttgcccaaaagagatggagtttggcccccttcaagtcccctctgatctgcgcttcaactctttcagtcactgaaggtatcgcctcttcgagtaaggctatctgtctccctccatcaggattaggtggtggtccgctctcaccttggcttttgtggacaatctggtcttcccgaaaccaactgatcttcaataagaagcaaattctggcggaagatgcttagctccttgcgattattcgagcaaaggaatgataatcagccaatcagactcaatccttacccgctagaatccctgatccaatactgataactcgatcccattctatcgatcctgttcgttgtacagatgctgcttggaagaccgaaggttccgcgggttttggttggatctgcaaagattcacgaaaccaaaccatttttcagcggtcttccgcatcgtcgtcgcctgttgtctcgcccttagaagccgaagctctagcaactctcctcgcaattggagttgcaattgaatcggaaattaagcggatctccttcgcttcggactcgttaacacttgtcaaagctatcaatcggaagcttctcgcaaaagagcttcacgggattctccatgatatcctctccctctcaatttcttttgatgcttgtagtttcttctttatttcacgaaagcataattgtcaggctgatgccttgacaaaagatgccctcctatcctgtatgaactctcttatctaa

SEQ ID NO: 162992 - DNA, 2710 bp, Arabidopsis thaliana landsberg
atggggacgtgctgtactttcccgagctcacgcgccttcgacgcgttcttcaactcttttggacccgacgcacctttatacctctatatatcgagctattcctctgaagtcgttcacttgaagtttctgaagaaaaattcgaggtttgttctctctcttctctgatcttgattttcttgtaagttccttcttttccggtaaatctccaccgctttttagttgtttttgatttctccggttagagaatttctgttttccgatctttatttcgttagacagttccgagccgagcatgagtttgtcgcattctaacgcctctctttcggccctagtgatcttctcgccgactcgaatcatcttgacaaccttcccctgatttacaaacaaaggatggtctgggcttcctctaagggttccgagactaacacagcatcatcttctaatgcttccgaagaggcggtcccctttttggctcgggaggatgccactactgacatcactcgggatctagacttacctgaagaccctgagccgtctctcgtccgcatgactcgcgttccggctgttaacgaggctggagcgtcgaattggcaagatgtgcccaagccgttcttccccccaattaaggtcgaggagcatctctacttcggtccggatgaaacggaaaatatcatgtgagcgtttgactggaaggccttcgaggagaccgagaagaaaaagaaaaagaagaaaagtaaaaaggtggtgaggccaaatcctcctggctcgtctttatgcaccgagcggtcgctatcgaacttaagagctcggtttgattttggcgattggggtaactcttcgcgttccgagcccggacgagcgcgccgacaatcctctagagagtttttataccttatatgaggggttcttttctctctgctttttgtggttgcctgttctgaggctaatcctggagtacgtgacctcgtacaacatagctctctctcagataacggctcggtctttgaggcatctcatcgggatactggtgcgcggttatgagaccgaaaccgaggttacgctttcccatttgaggaattatctagaaatctggcgagtcccgaagtccgtggtggaccgatattatatttctcctgctaagggtagaaagattatcgacgatttcccaagcaaagacgacgcttataccgactacttcttcctcgtggctttggaggatgctgtccttgacgacctcgtcgggaaagttctgacaaaatggggacttttgggtagtttagatatttacggttgttttactcgtgcccgagatgattattatgactttcgcttatgtgttttctttcgtcgtagattgcccaattcgattcctcgagccgtgtcccgaagacctcatttggtgttatcaagagttatcggctcgtacgtgccattggacaaagcatttttcccgagaacgggttgagcgagcacttcgactatttcacgacgttttctgcccttccagctcggaatcatcagaccatcgaacccaatttttcgtcgacatgcagactagcaaacttactatccgggaggtttatgaaaagaagaggctcgccgccgaggagaaacgtgcggccgaggagaatcgcatcgcggaagagaagcgtgctgctgaggggtcgggtgtcaatcctgaggcgtctgagggtcaagaggttgttcccgagggtgctgtggctgcggcatcgggacttgctgaggctgagacaccggttgaggcagctatgtaggcagtggttgcacttatggtcggcgacaaggcctcgggcaagcgtcctcagatttgatgactccaaggagaagaagaggaagaagaagaagaagtcggcgcaaaaggaggacaagcctcctatttttgaagataaggtcgcttcggcgaatctccttggaaagtgtgcgggtcgcctgcttctgcctccagataccttgctttaatctagaaagtacgccgagacggcgtcccattttatgcgggtaagcgcattccccgagccattatgaacgtggattcctgtttatgtttgagggtgtaggttcgatgaatcgaatggtccagtcttatgactcgacaatgcaaaataacctggaggcggttaacatattggccgaagccgaggcgaaggtgaaagaggccgagcagctgagagatatgacgatctccgaggccactaaggcgaaaatggcgagggaagaggcttagagagaagccttcatcaataaggagaatgctatcaagatggctgagcgcaatctcaagatggactcagaggttgttcgttgcaggcgactgctcgctgaggctagggggcttagagacagcgaggtggctcgggctacgcagacaacgaggcgagaaactttggaggccttcattgccaggtttaaggtggccgaggaaatgatgtcgctctttgaggaagctaacaaccggtttatgtatttgtcccaagtgcgggctaatgcataactgatcaaggcgcttgaagaaagtggatctttagcgaccgagaagaaacaagtctaggagtggctcgaggattttgccgacgcataggtgaaccttactcgtctcatctctgaagtgaaggaaacgctcaaggccccgactcccgaagtggcacctctaagtcttggaggtcataggtcggtcgaggctctcgcggat

SEQ ID NO: 162993 - DNA, 719 bp, Arabidopsis thaliana landsberg
atgtcggacatggatgatgaaatcacgaggattttcaaggtgcgtcgcacggtgcttcagatgctgagggatcgaggttacactatagaagaatcggacttgaacttgaaaagagaagagtttgttcagaggttttgtaaaactatgaacaaagtgaataaggaagctcttttcgtctcagccaataaggggccaaatccagccgacaaggtacatacatatatgaagaacatgtcataaagttgtaagcttttgatccattgctgaatcttatcttgatctttgacttggtgcagatttacgtgttctacccggaagggcctaaggtgggagtcccagtgattaagaaggaagtggcaataaagatgcgagacgataaagttcatcgagggatcgtagttgttccaatggccataactgctcccgctagaatggccgtatcagaactcaacaagatgctaacgattgaagtctttgaggaagctgaattggtgaccaacatcactgagcataaactcgtcaacaagtactatgttctcgacgatcaagcaaagaagaaattactcaacacgtacacggtgcaagacacacagttgcctcgcatccttgtcactgatcctcttgccagatactatggactcaagcgaggacaagttgtcaagatcagacgaagcgatgctacttcattggactattatacctaccgatttgctgtttga

SEQ ID NO: 162994 - DNA, 1491 bp, Arabidopsis thaliana landsberg
gtattgatgagtaatcttaacgataattcggtaagcacgagacaacaaaaatatatataacaagaaatgataaatatgaaagaaaaaaaaacagaaatgaaaattctcatattcatgtaacatatacgaattacaccacgtgatcattacaattcctctatttaaacatctccaactgatcaacgtctaaaaaaatcaaatattggagaagagagagtgaacaactatgaacgtcgaaagagaccaacacatatctccaccgtgtctcctaaccaagaagatccctatcgttgatctaagcgatccaagcgacgagctcgtggctcatgcagtggtgaaagcgagcgaagagtgggggatttttcagttggttaaccacggcattcctgccgaattgatgcggcggctgcaagaagtggggaggcagtttttcgagctcccggcttccgaaaaagaatctgtcacaaggccagccgactcccaagacatcgaaggtttcttttccaaggatccaaaaaaactaaaggcttgggacgatcatctgattcacaatatctggccaccatcgtccatcaactatagatattggcctaacaatccttcagattacaggtattgaacatcattgaaaagccgatatatagtttatagttataaaccttaacattgtataagagctcatgtaagttatataatatccaacaaaatgtatgtaattaaatagtatacaagttacatgaaacttgattgcgttatttcttaccattaaaaaacattcatcaagtttttacattcttcatgatacttaaaatgtttttcggctatatagattattatgtagctgaaaattaatagtattatttgggagtggtgatggtttcagggaggtgactaaggagtacacaaggaatgttacaaatctaacggagaagattgttggttacttatcaaaagggttagggttacggcgtgaggccttgcaagaatgtctaggtggcgataaagcacagtatgtgatgaggatcaattactatccgccatcggattcagccatcggagcaccggcgcacacagatttttgtggactcgcacttcttgtctccaacgaggttccagggcttcaagtgttcaaggatgaccattggttcgacgttgagtatatcaactccgcagtcattgtcctcattggggatcagatcatggtccgtttgtgtttggtttttaacttttggaaatgtttttggggtttggtttttaaaatgtgtgaattgcatgcagaggatgagcaacgggaagtacaagaacgtgctacacagatcaataatggatgggaaaaagacaagaatgtcgtggccggttttggtagagcctaagcgtggtttggtcgtgggacctttgcctgagctcacgggagacgagaatcctcccaagtttgagtctttaacttttcaagactatgtataccgcaagatcataaaggttcttcgtgat

SEQ ID NO: 162995 - DNA, 975 bp, Arabidopsis thaliana landsberg
atggcttcgagtctgggcggcgatgagagaagcgagatagcgtttttcgaccttgagacggcggttccgaccaaatcaggggagcctttcgcgattttggagtttggggccatcttagtttgcccaaggaggctagaggagctctatagttactccactttggttcgacctactgatctttccttaatctctacgctcacaaagcgacgtagcggcattacgcgcgacggagttctctctgcacatacattctctgaaatcgccgataaggtctatgacattcttcacggtaagggattctctctcttcctcgctttctttctcacgaagctaaaagtgttgattttggtgtttttgtaggacgaatttgggcgggacataacataattcgattcgattgtgtaagaataagagaagcatttgcagaaattggtctctctccgccagagccgaaagctacaattgattcgctttcattgttgtctcagaagtttgggaagagagctggtgacatgaaggtctctctttttcccgattctcaatgataaacctcaatgcctgtagctttcttgttagattcacatcagagttgctaaagtttactccttttaactaatgtagatggcatcacttgctacatacttcgggttaggagatcaagctcacaggtaaatctaaacgatgccctgagccttttagcgattcaacagttgtttcaatatgggactaaacaatggatatgattcaccaggagcttagatgatgtccggatgaatcttgaagttgtcaagtactgtgcaaccgtcttgtttctggtaatgatgtcttctcatttcttgaataagtgataaactgtaacttttaggattatagtttgcaaaaattgtgtccatgtttcttcgcagaccagaacttttccaagccctgaacatgatctgcaagactgcagtatactttgtcatatgacatgataac

SEQ ID NO: 162996 - DNA, 1722 bp, Arabidopsis thaliana landsberg
agttcgttcgccggcggcggcgagtcatcgtcatcaatgtcaaacatcgttgttctagacaacggcggtggtctaatcaaagccggacaaggcggcgagcgtgatcccaccaccgtaatcccgaactgtctctacaaacctctctcttccaaaaaattcatccacccatcaccactcaccactctctccgacgaaatcgacctcacctccgccgccgtacgccgcccaatcgaccgtggctacctcataaactccgacctacaacgcgaaatctggtcacacctattcacttccctcctccacatagctccttcctcctcctctctcctcctcaccgaagcaccactctcaatcccttccgttcaacgaaccaccgacgaactcgtcttcgaagatttcggattctcttctctctatatagctcatcctcaatctcttgttcatctctatgaagctagtcgtcagcctgattcaatcctctcaaagactcagtgtagtctcgttgttgattgtggtttctccttcactcacgctgttcctgttcttcacaatttcactcttaatcacgccattaagaggattgatttaggaggaaaagcttttactaattacttgaaggaattggtttcttatagatctattaatgttatggatgaaacttttttagttgatgatgctaaagagaagctttgttttgtttcacttgatcttcttcgtgatctccgccttgctagaaatgggaacactcttatcaagtctacttatgttcttcctgatggtgttacacataccaaaggctatgttaaagaccctcaagctgctaagaggtttcttagtttgtcagagaaagagtctgtggtggtgatggataaggttggggagagaaagaaggctgacatgaacaaaaatgtaaactttttttcgattcttttgtctctgtggtggtggtagggatttctctcaagtttgagggtttttttttgtctttgcaggagattgatttaacgaatgagcgttttcttgtacctgagacgttattccagcctgcagatttaggtttgtgttgatgaatgttagaatgtagttgtagatagaagatgatgatgagatggtattttattttgttttgggatagggatgaatcaggcgggacttgcagagtgcattgtccgagctataaactcatgccattcttacttgcaaccagttttgtatcaaaggtggttttcaaatggattacttatttttaatcttctgctgttattgaatgagctttgatgtctaatgtttgatgttttaccgcagcattatcttaactggtggaagtacattatttccacaacttaaggagagactgtaaggctaaatttatgtgatgaatcattcattagtactgctttattattagagaagttgatggtctgagacattattgcagagaaggagagcttcgaccacttgtcccagatcactttgatgtgaagataacaactcaggaggagtaaacaacctcaatcctttttttttttgttttcttactctttatatttgcagctctttctttgttattttaactccttttgtatttgcagccccatactaggtgtatggagaggtggttcacttttggcttccagcccggatttcgagtccatgtgtgtcaccaaggctgagtacgaagaacttggatcagctcggtgtcgtagacgattctttcattga

SEQ ID NO: 162997 - DNA, 3589 bp, Arabidopsis thaliana landsberg
atggcgatggtcgttagactggttcgaggagagtggaaaaaacatgaatccggatgctatgaacacgtagccgagttagatgggttatgcttggcggtaaagctccgtgagagagacacgttcgctaaagtggttgaagctgtgaaggaaagactgacgctaagaccggaagatgaagtggaactatcctatcagtggccgcaatggatgatgggcccagattggcagagggcaaacccgatccatattctcgatgacgaggatatgactttgtttatggcgattcgatctgatctagaggaagttcacctaaaggtcaagaccatacaaaagatgttgggggcgtcaacagtaaattcctaccgaagcgtcttagatataggaggtatgacctcggaagcgatatccgataagtattggaatagcagtgaaacaagagcagcttgggattcggcggtaacgagaatgttatttggtaacgtcgctggtaatagtgtgattggtgatctcggacttgacaagtatggtgtaggaacccacatagtaaggagtgggggcataactattcgagaaaatacgggggagactagtgtaggaaacgtcgcaccaagaaccatatcccaaggccaaccaagtgcaaccgctaaagggaaagaacgtgtcttggacgataagagcattaaggacttggagttcgcagtttggaggaaaacccaacagcagtaatgctgagagagatgcaggaaagagaaatacgactggctggctctatggtaggataactcgacatgactccggctaatgctaaggataacgaggttagaaggcacacaagttcaaacccggaggaagccattcgtcttacacttggcaatgcggacccagctcttgacgtggtatcaatagtggcgttatcttcactgactcgacattcaagacaccgtcgaatagtataagcttctctagtgaggatctaatgggcgaagatgaaatatctagtaacaattgtttggccaggataggtaagttatcaaatacagttcacattatcgaataacatacatgttgacttgtaacaaaaaggaaacaatctgataacggtcttcttattcatatacacaggtgaagccgatgtggcacactactaatcagaccccgacggaccgctgcgtatggcacccataaatacaccaaaaataagtatagtcaacaacattgttaggggggaggttgttgcaactcaagaacaagttactgagttaaatatccatgttcgccggaggttggcagatatatatttgaaagaaacaccagtgccaaccgtgttgtatgacaaggacgccccaccatattttgacgatccgggagaagaaggtaaaacatgttaggatataaaatggattggcacctaagttttaatgtatctacaaattttaatgataatatatgacatttattttagacgatatagtatagtaccattaggtcagacgctaagatattaagagtaattcgggtatttacctcggtaaacattaacatatcttccatatggtaaatttcagattatttgcatcgagctctaaaggacgccggctatgaaggagacgatatcttcataggcagactgttcaagaataatcaagactgtgcaacaaaacttgcaatacatgcgatacggcgaaagtttcacttcattaccgccaagtcttgccctaacattgtcctcactgtgtgcgtaagtcatacatgcctgtggcgtgtttatgcgacaaaattggaggatagtgaccggttcaagataaaatgtgcaagttaacatcacacctgcagtgtagacaccagaggagactttcacaaacaagcatctacagctgtgactgggaaactgatgagaacaaagtattttggggttggtaggaggccaaggcctaacgagttgaggaagatgctccgagatgagttcagcctaaatgtctcgtactggaaggcatgaagggctcgagaaatagctatggataatgcgatagattcggtgatgggcagctacgctttgatccagccttatttcatgcttcttctgaaaacaaaccctaactctctagttgcccttgatacggagaaagataagaaaggtgtggagcaattcaggtaattgttttttgccctagatgcagctgtacaaggatatgcttatatgagaaaggtgatagtcattgatggaacgcatatgagggaccgatacgggggctgcttaatagctgcaagcgctcaagatgccaatttccaagtcttccccattgcttttgggatagtgaacagcgagaatgacgatgcgtggacatggttcatggagaggctcacggacgccataccaaatgatccggatttggtgttcgtttcagacaggcactcatcgatatatgcaagcatgcggaaggtaagttatttactgataacggataatattaatattacagcgatatgaatatagttatttttataggaatctataaccccactattatgcagtatttatcaatcgttaacaatagggttaaatgatatataaattttactgttacctgttaactaaggagttatccatacttaaaagtctgtggaatttccctagtcatattgatagtgtgatcttacaggataacttatattttattttgacaacggttgtaaatagtgtcgttaaaataacgcagcagtgttagctgagacgttttctattagttgctaacagaatattcgaacgtcagtttctttatagtttgtgttttatccatggagtatgttttatcaataacactgatacattggctctaatttctaggtttatccgatgtcatcgcacgcggcatgcgtggtgcatctaaaaagaaacattgtctcgatattcaagtcggaagggttgagctttctcgtggctagtgcggcccgagcttaccgtccaagcgacttcaatcgcatcttcgtcgaggtaagggctatgcacccagcttgtgctgattacctcgaaggcattggttttgagcattggacgcggtcgcattttgtgggagataggtatttttttcatgacaagcaacatagctgagtcgctaaacaatgtcttaaccatggcaagggattatccagtaatatcactactagagactcttcgaacaactcttatttcatggttttctcttaggcaagaagctgcacagctcgaggggaatcattaacctccaaaggtgaatgagatggtcacagaaaattttgaaaaggggcaggttatgttgtacttaagattggtgatgtattttatgaagtgcgagacaaagaagattcggcatttacggtaaacctttgggagcgaacatgcacctgcagagaatttcagctccttacaattccatgttcccatgctatagaagccacgatcaaggaaaggatatgtgtagagacgatggttggcgtctaccacatagttccatatctgagattggcgtattatcatgcccgtctccgacatggatacactaactccttccacacacacaaccattgtaaccaaacaagtaatttcgtgtag

SEQ ID NO: 162998 - DNA, 1810 bp, Arabidopsis thaliana landsberg
atgagcatctggttccctgatgggacatctgaggcaaaggagaattctggtacgtctgtcttctacatttggttggtacttctggtattgtgttaatccatcaggtacaacagtttggtagctgaatctggtacatctgtctgatgaggaagtctggtacaactgactggtacatctgtctgatgaggaagtctggtacaacactgtgagcagtgtgtcaagtacatctgtttggaggattcaagtcaagatagagatttgttagatatgacttgaattggattgggcccttaactttagggccaatcagtttagggttaattagggtttcttttgtataagtacttttcttaacctaatctccatgtattttgtactctgttttctcaatcaataaatctgtatctttgcccgtggacgtagccaacagcaagtgttggtgaaccacgttaaatctgtgtcgtgttctttatgtttttgttatcttgctcacatctgttataacattactaaagcttaatcattttttttttgagagatcccctattacttaagcctattctgaaagggaccttttttgtctcttgaccttttaccttagccaaatgagttctttgatgatgcattgcttgattcacattccagaactaatgaatgttaaaaggattggtagatttgaaaacttgtgtaggtcgagcatatgagtcggattgattgattgatgaggcatggctaacgtttttaagtagaatttgatcttgcagcttagaactttcaacttggacattgatttcatctggtctatctggtgttttggctctgagtccccgcttccaaacctcacctccagcttgttcttgattgtttgcttgagggcaagcaaagactaagtttgggggagttgataagtgtgtattttgcatgttttgagcatccatttgtcatcaatttagcatcatatcatcactgttttataccatttcacatcatttgtcatcactttgcatgtttaggatagttttgcatgcatgttgcatatttgcgttgatttcaggtgatttggagctgttgacgagctatctggaagaagcggacctgatcatgacaaaccactcgaccaagaggccgagtaggagcttcaagatctcaagagaccactcgaccaacatggccgagtatcaccatcatcattcactcgaccaatcactctaccacatggtcgagtaccttcatcaccttcactcgatcactctaccaccaagccgagtctcacaatcatcattcactcgaccaatcactccaccaacatggccgagtatcaccattatcagtcactcgaccacttcactcaacctggaagtcgagtatcttctaacaccactcgatcacatcactcgacctccaggtcgagtgccttcaccttcactcccagaccactactcgatcataccactctaccaagaggttgagtatcaccatcaccatcactcgactacatactcgattgctagcttcagagtcttctccattccgcactcaaccaggcactggagcacaaggaagaaaagaagactccagctaatcactcgaccactcactcgaccacatgggtcgagtactgttcttaatccatcccaatactacgtcgttttgagtattagggtttcgggatatttggctataagtagcatgtacttctcattttcgaagacaagaagttttttacctagttttatttccgcagaccttgtgttctagactttttgtaatccggatttctctttatctattcagtattcagcttttgttc

SEQ ID NO: 162999 - DNA, 2289 bp, Arabidopsis thaliana landsberg
aaaacttcgctttcaacctcaagtagactcaccttactcagaggggcccatcagatctcgccgcaaatcaaattgatatcccccgaactgacagacgctcccgaatctccccctgctggacacacttgtgcattcgaaattttcttctcggagtgcggtctctacttcccacttctttatatcctcatcgagttcatgcatgagtttcgagtagcattgcctcagctttacccaaacgttattcgaaccatcttgagtcttctcactctggcagaagaagatgaatttcttctttcgctttccgacctccttcaattatacgctgtgaagaaaggtcgcacttcgggaaccttcttcttatcgcctcggaaaggtttccttgtgtttgaggatttcccagagaaaaatgaacactggagaaaatcttttttctttttccagtaaatgagctcacctttggagacaagaccgacttatttgtttctgaatgggccacccgagctggtagacagcgaacctaggaagattttaattctgaacttgttaaagatctcaacttttgtttcacgaactgatcaatgttttatctttcttcgcagctcgagttgagaaaacccctatttcgaagaccttcgccgcccacttctccagtttttgtcgacaagacttaggttggaaagttcttacaaacgacaggattcaagcatcagggcgaagactttgctctaggattgatcttgcttcttcttcaccccagttcaaaccccgaatattctccgaagcagaaatggccgcctcctcttaccgtgctgagaagaagatggagagtgaaagggcaaggaagcaaaaagaacgccttcaatctgacaaggtggtaatgcctggaactcttgaggacagcaagcttcgtgctcttgacaaagccaagcatcctcagaacgaggatgacaccggagctcgttaaaaagctcccgcttcatccggaaaaggtccagagatctccacttcggaggcaagaactccgagcaagaatgctcccaatgctcccaacaaaggaccccgcgagatgggatgttcataaacagaggaagcactcggagaccgaggcccgctctccaactcgctcttctcgtgcccaaactgaggtgaaggatgatggtacgaaccaacagaaagggagtaacaagaaaggagactcgcaagatctcgtcgttctctcctccagggggtctgagtcccgcaactcgcagcgtcgcgacacacttcctttgcctggtaaacatgtttccctagtcgttatccttaatttttttgaaaaatccttactcatgtatcttttgaactgtctcagctcctccgatgcacttcgctgatatgcttaggacacttgttcacctcggagcaaccattccgcctctaacggaactcatggcaaccaacaaggagaactacctcctcttcgcggagaagcttaacgaggtaaataattttgttctattagagaataagttcatctctcgccgagctcatactcaaaatatgcttttattactaggctgttcaagagttcaactatgccttcatcagtcacgaggaccagctctccgagaaggacaaggagattgagagttttaagcataacgaggatgaaaatgctcgtatggtggatgaggctaatagcgtacttagccgcatgagagccgcggaagctagggttcagactctcgagatttctaacactgacctctccgcgaaactcaaattgggcaagaacgcctatctgacggccattgataatgaaaaccgatcaagggccgaactccttgcttgcgaagagaggttgaagaagctcgaggaaggtcaggccgtgatgctccatgctgcgagacaagatgagagaagaaaaatccgggctcaatttgtcgacttgtcctcgaaatacgggaacttctacaccgaatctaatgaagtcaaagctgctaagatccgagctgcggaggttaaagcgaaccgggagctcctcgaagagatcgaaaaaggggagatccccagcatagctgaagaactcgaatcggttcgtgcggatgaacaaagactccacgtcttgacctcgttgagctcacttcgctcctggtggataccccaccggaagtggttgtagactccaatgctttggatgaagtgttgatcatcaacgagcagggaaccaacaaggacacaacctccaaaccagctatcgtcgccatgttccccgttgatgttgagaagaactccgaagtggcggagtaa

SEQ ID NO: 163000 - DNA, 1054 bp, Arabidopsis thaliana landsberg
atgcattgcttgattcacgttccagaactaatgaatgttaaagggattggtagatttgaaaacatgtgtaggtcgagcatatgagtcggattgattgataatgaggcatggctaacgtttttaagtagaatttgatcttgcagcttagaactttcaacttggacattgatttcatctggtttatctggtgctttggctctgagtccccgctttcaaacctcccctccagcttgttcttgattgtttgcttgagggcaaggaaagactaagtttgggggagttgataagtgtgtattttgcatgttttgagcatccatttgtcatcactttagcatcatatcatcactgttttataccatttctcatcatttgtcatcactttacatgtttagaatagatttgcatgcatgttgcatatttgtgttgatttcacgtgatttggagctgttgacgagctatatggaagaagcggacatgatcttgtcaaaccactcgaccccgaggtcgagtaggagcttcaagatctcaagagaccactcgaccccctggtcgagtagaagacatcaccacttcacctcaccactcgaccccaaggtcgagtgtcttcatcccatcacctgaccatcactcgatcacatcactcgaccccgaggccgagtgtcttcaccttcattgccagaccactactcgaccttatcagtctacctggaagtcgagtatcaccatcaccaccactcgactggatactcgatgacaagcttcagagccttcttcattccgcactcaaccagactctcgagcacaaggaagaaaagaagactccagcttttcactcgacctcccactcgaccacatgggtcgagtacagttcttaatccgtcccaatacttcgtctttttaagtattagggtttcggaatatttggctataagtagcatgtacttcacattttcgcaaaaaagaagttttatctagttttattccgcagaccttgtgttctagaccttttgtaatccggatttctctttatctattcagtattcagtattcagct

SEQ ID NO: 163001 - DNA, 1828 bp, Arabidopsis thaliana landsberg
atgtatttcccgccctcggaatatgtgaagaaaatcaagctttcaactcggtgctatattcacgaattgttgactacattcgataagttggagccgccgatgagcaagtccgagaggttatggtttgagaaccatcctagtttccaacatatcttccacatgccaagagacccgaaccaccgacttatggggatgtggatgctccttcttcgcacggcgtgcattgaaaggaagaaagaagtgtggttcatcgtcaatggcgttccaatccgatatagaatattggaacacgcattgatatcgggcttcaattgcaagaactataaacttggctacaaaaatacggggaatttggatttcaagaggaagcatttcaaggatactgttgtgaaacgcgaagacgtgagagagaagctcataggaatggtaccggagggtgaaagatcaaaagataggttgaggatgatggtcttgtatttcttaagcagcattatcatagcgcctatcaagaccggagataaggcacctcaagtggatgaattttgcctcaaggtggtgagtgatctccgttctgtaggaattttcagtgggggaggtatctttcgattacatgtaggaaccatctcacacacggtgaatcattttaatggttcagtcaccaacacgaaatagtacatatggtcggttccgggtttctgtcttccgatggaggttagttacaacttatagagaataggtgattgtttgcaatactgataatattgcggaatactatttgttatttaaaattgttttcttattctgtagcttcttgcattcgaggctatcccacagttgagggaaagatttattgaggacattgcaggaaaagatctgggatgtcctaggatgtgtaaggtgaggttcaagaagaaccatttgaaaggcttttctcttgataccatttttgtagaattgggtacaactcaggttagttgtcttagatatactgtttcacaaacgaatgttattctattttgttataataatccattcataatgttgatctttacaggtcattgattctatcgtcacacctggaattaaggagcacaaactaatgaaagaaatcactgaagaagaagacgatgttgacgtggcttatatggtggttgaaaattgggagaagcgtcgtaaagtgggccgtgtaatcaggtttgatgagctctaccagcatgatattcaagccctgcagatcaccgcaggtccaaagattgcgggtgcggaggatattcccgcagtaggtggacaaaaactcccgagtttggtttctgtggttgagatgattgaaaacttggataagaagatggtagaccagctgaatgaaattataacaatgatttctgatttggataaaagagttgaatcgttggaagcattcaaggatgagcagaaagcagaggagggaaaggtacgtattgataattgcgtaatactgagtaacactgtgataactagagtataattgcgtaatactaatataacttcgttcaattgcagaatcaagatgagatggaccaagaggaggctggtgatccgaaagagaaggatcaagaggaggatgttgttcaagagaaagatggtgatcaagaggaggatggtgtcccgaaagagaaggatcaagagaaagatgatgtcccgaaagagaaggatcaagagaaagagaaggacccgaaagagaaagagaaggacccgaaagagaaggatggagatccttcaaaacccgtggaagcaaacgtcacaagaaggatcactcggagaaccaagaattgaatttggttgttcttgt

SEQ ID NO: 163002 - DNA, 934 bp, Arabidopsis thaliana landsberg
  unsure (1)..(934): unsure at all n locations
atgcctttcggtttgagtaatgcacctgcagcgttcatgagtttgatgaacaacatgttcgaggagtttctggatgagtttatgatcatctttattgatgacatcctgagttagagatcatctttattgatgacatccttgtgtattctaagagtcctgaggagcacgagtgataagtgtgcattttacatattgtgaacatccatttgttatcactattgcatcatatcaccactgatttataccatttctcatcatttgtcatcactttgcatgtttaggatagttttgcatgcatgttgcatatttgtgttgtttttaggtgatttggagctgttgacgagctaattggaagaagcggacctaatcatgtcaaaccactcgaccccctggtagagtagatggttccacgacttcaacaaaccactcgacnnnnnnnnnnnnnnnnnnnnnnnnnnnnttcacatcaccactcgaccccctggtcgagtaccaccaagacaaccactcgatcacaccactcgaccccctggtcgagtatcatcacctccaccacttcaccttcactcgatcacactactctaccagcaagccgagtaccatcatctttatcactcgactacatactcgactaccagcttcagagtcttcttcattccgcactcaaccagacactcgagaacaaggaagaaaaagaagactcgagcttatcactcgacctctcactcgaccacctgggtcgagtacagttcttaatccgtcccaatattgcgtcgttttgagtattagggtttcagaatattttgttataagtagcatgtactttacattttcaaggacaagttcttatctaagttttattccgcagacactgtgttcttgaccttttgtaatccggatttctctttatctattcagtattcagtattcaata

SEQ ID NO: 163003 - DNA, 783 bp, Arabidopsis thaliana landsberg
atgtttaggatagttttgcatgcatgttgcatatttgcgttgatttcaggtgatttggagctgttgacgagctatttggaagaagcggacttgatcacgacaaaccactcgaccaagaggtcgagtaggagcttcaggatctcaagagaccactcgacccacaggtcgagcagaggacatcaccacttcacttcaccactcgaccatgaggtcgagtgccctcatctccatcaccagaccatcactcgatcacttcattcgaccatgaggtcgagtgccttcaccttcactgccagaccactactcgacctcgtcactcaacctagaggtcgagtatcgccatcacaacacttgactgcatactcgatgacaagcttcagagccttcttcattccgcactcaaccagacactcgagcacaaggaagaaaagaagactccagctattcactcgacctctcactcgaccacctgggtcgagtacagttcttaacccgtccaaatacatcatcgttttgagtattagggtttcgggatatttggctataaatagcatgtacttctcattttcgcagacaagaagtttttacctagttttatttccgcagaccttgtgttctaaactttttgtaaaaccggatttctctttatctattcagtattcagctttggttcttgattttcgtttactgttgttcattctgttatcacactactgttacactgttgttatcatgtcttcaacctgttcaacgtttatgctttctgttatgatgtctgagtag

SEQ ID NO: 163004 - DNA, 941 bp, Arabidopsis thaliana landsberg
atggatgatggatatcatgccatttccgaactttgtccaatgatcaccggatggagtatacgcgcttttgtggtcagggtgtttaagaaatgcgtgggaagaaatgagttcgacgtgggtctcatcttggccgataatcgagtactattttgccaatgtgtttataacgtttttactttcacatatcttacatgtcactaatcatgatgatttggtgcagggaatggttcccgcatagaggctaccattaatcatcgcattgcttcgttttactctgaccgtatccgagaaaatgagtggatagttatcaatactttctcggttcgtctccacgatgaggggatacacacaacgtcccatgactaccggatctgttttatggatcagaccattgttaccaaagttttgggattggctgcaataccgtattacgattttactccttttgactacatcatcgagaggacagtttcaaccagagtgttagtcggttagtatatttgactgtctattcattcttgtaaatatgtacgtacacataatgcttttatcttccattacgtacaccagatgttattggtgcgctcattgaggttggcaacttgaccgaagactaccgtggacggaagcttccttttaagataatggataaacagtaagttgtttatttttaatgtttttggctatatatttgttatatcctgtgtataatatatattctctgtagcaaggaagttcttcaatgtgaagcacaaaatgaccaagctttcgaatttcaaagattcttccagcggctaactggtcctcaaaacattatcgcactcgtatcctggcgtctaaccgggatccataaactgaaggctgtgaccaatggccccatctccaaagtcattgctaatccggatataccgaaagtaaaagaaatcagagtcgttgtctat

SEQ ID NO: 163005 - DNA, 810 bp, Arabidopsis thaliana landsberg
atggagaatttgccaaatcacgaagaaaacgacgatgtgggctatcatcagtcacctggtcccatcgatccaaatgatcattcagcatctgaaactccggtttactcaacaatgagcacagattcttttgcttatcatcgaacatgttctgaaacctctggaggaggcttttcagaccaaatagatgaaaccagcagtttctgcactgaggcttctcctagtgattggcctgtcttaaccgaatccaacaactctgcgagctcaaattttccaactgtcttcgacttgaaacataatcagattgagactgatgagcaccttgcggtccaagaaatttcagagccaggttttgtgtttctccgtctctctctctttctctgtgtctgtatttcctctttgtcattataatcatgaaactgttatcggtttcgtagcagagctggagacgatgaaggaaagattctcgaagcttctgcttggggaagatatgtcaggaagcggcaaaggcgtttgcaccgcagtgacaatctcaaacgctataaccaatctttatggtaactaaacactaatacgcctcacagttttgtgactttcaaactaagccatctagagaaactgtagttaatgtcttttgattttgagatttgcagctactgtttttggacagaatctaagattagaaccattggagatagagcagaagacgacgtggaagagagaaatgaattgccttctctctgtgtgtgactatattttcgagtttatcccaaagtcacagaatctaagcaatggagccactgttgaggtaaa

SEQ ID NO: 163006 - DNA, 988 bp, Arabidopsis thaliana landsberg
  unsure (1)..(988): unsure at all n locations
atgttggatgcgcaaattcggaatgaatatccagaactctctgatgatgaggttgcgtcgaaaagagatgaagattttcatatatggattcgccaatatgtaatcaaatactaccgatcatctctctgatatcctacaaattaaaagtgtacgtttacttctttattttatgatttatcagatttttatgtaggtggaagcaacgcgaagtcatcaaagttttcctccatgggtttatgaaatagtagaaggtcctgaaaataaagtcaagtcttggcccatgtattttacaagagcgtatatgtttcacacgcaggatcatgggcgtaccaataaaataatgaattatggggtatgtgttcgaggccaaaattattctgaagcatctcatgaagaagatgtttatgggatcgttgaaactataatcaagctcgagtatccaggatttgttaacttaaagatcacacttttnnnnnnnnnnnnnnnnnnnnnnnaagttgggaaaaggaattcgtatgagaaatagaggggttgtagacgtgctagaatcagggagataccctaattacgaacaatttatattaggtaactttaatttctttagtaagtatttgtaagagaattcatatttcatttaaaattttggcattttacagggtgtcaagctgatcaggtttgttatctttcttactcgaacatcacacgacctcgaaaatcgtggcttttagtttgcaaagtcaatccaaggaatgttgtccaagggaagtttaccttaaatgatgtagctgtattgcaacaatctttggatgaaagaaacccgagcatgattgaagaagttatcattgagagcttagttgacacaaaccgtcatgatgaacctattgattttgatattgaagatgctgaagaaggagatgaatttcactgtaatgaatccacatctgaggatgcagatgaagaagaggaagatgatgaaaaatctgaataa

SEQ ID NO: 163007 - DNA, 2024 bp, Arabidopsis thaliana landsberg
atgaagtaccacggtcaacaatcatggaggatgtttgagcgagtctggagagctgtgatacaagaacgtgtgatgatttttctctggttagtggttaaccaagatattatgaccaatgtggaaagaaagagaagaaatctttgtgacacaaatttatgtcaagtatgtaagagtggcgaagagactattttacatgtcttgagagattgtcaggcgatggcaagcatttggagtcgcttgcttccccctaggcggttatatgtgttctttacacaatcattgcttgaatgggtaaatagtaatttgggagaacaaaacttgtcggaggtaatcggtgggctactttattcgctttggaagcatggtggggttggaagcggcgatcaaaaaatgtgtttgagaagaataggaaatgtcgagatagagttcgtttcttaaaggattcagcgaaagaggtggtggaggctcactcgctgcttgggagtaatcgaggtaatgtaactagggtggagagacaaatagcatgagttccgccaggagatggttggctgaagttaaacacggatggcgcatcacgtggaaatccgggtttagcaacagctggtggtgttttacggcataatgagggtatttggtgtggtggttttgcgggaatctcggagtttgttcgactcctttagttaagttatgaggtgtgtattacgggcttttcatagcttgggagaagaaggctacgcaggtgtagctggaagtggattcagatatggtggtgggttttcttaaaacatggattagcgattcgcattctctgtctttcctagtacgtttgtgttatggcttcatttcgaaggagtagattgtccgaattactcatgtgtatagggaagctaatcgtctcgcagatgaattagcaagccatgcttttttgttacctttggggtttcatagttttccccttaggcctgattttgctacttcgattatttttgaggatgctagtggtgctacgcgcccacggaatgttcgtgtgtaatttttttattctgttttttaataatatgggagactagtatccctcattctaccgtgtatgggttaattataattatataaaatagatatgaaattattaattacataataatacacacaaaaaatgaatatcaagaaaaatctctctctctctaaatcaaaatcaaataagagaagagaggcgatacgacgaacgattgcatctctttgattcctacgactgtctctcgctcgccgagagttttcttcgccggttaccggcggttacttcaaggatgaataacggtagaacggttgtggaccccataactgcttctcaaccaaacctatttataccttgcacatgtctctgttctcgttgggttgatcagagtgaaagtacacaaattcctttgtcatattgacaatgctgataatctccgacgacaactgcaagatattgcgtagaaatacaagaggaagcaatcaatctcccgattgaaatttgtgatgaggctcttcaggaaactcaatttagtctcattgcaaaacctgtgaacccaatgtaacaaaatcttcgggcaatggtgagtgctttgcctcgcctctggggcgtaggtgaagaggtggtaggcagaattctagagaatcgaaaaatccaattccttttccaatctgaagaatccatgtcctcaattctccggcgagggccttggtctttcaacgattggatgtgtgtcattcaacgatggactgctttgcatacggatgctgaattcaaaagaatccctttctcggttcagatcagaggaatcccacttcgattcctcaccttgaaaatgatcacttcaattggtgagcgtatgggattgttccttgagacagactttggcagagatggcgtggtcctcacagactacgtacgggtcataatcctctggaacatcgaggacccgttacgctttcagaggattttccagtttggagaagagacatgtgtcttgaagttttga

SEQ ID NO: 163008 - DNA, 2531 bp, Arabidopsis thaliana landsberg
atgaattccgaaattgaaagacctgaatccccctctttcaacaacttcggctctagtaacgacctctgcacccggccaaacgacatcgccgatccccactatcaatccacatgcactctccaatatcttaatcgattgggagagctctgtcggatttcggccgaagtaatgagggatttacagatgccggagcctaccgaatcgccggaggaccaccgacccgcgttcttctgcgtgtacgagatttacttcaaagggtgtggcttgatttttcctctccccaaagccctcgttcgttatttgtcggcccttgaaatcgccttaccccagctgacacccaatctcctccggactattctgggaattattaccatcgcggctgaagccggatacgtcatttttgtccccgaattgaatgaacttctcagcgtgaggagttcttcgaagaaagtcggatacttctcggcttatccgaatgccaacagaaatctcatctcgcatctcccgaacaaggatgagaattggcatcacccgtggttcttagttaaaaagaggtctgcctcgatcggaaaccttccggacttgctcccctcgaagtggactactaagcctggtagttgttaggtcatgcatatgaacttcattttatttcttttcttatctgaccaacttttatttttcacttcgcagctttcatcgcacctacccttccgaccgccgaatttggcgaattcttcaagattgtcatcgaaggagaaaccctttggaactcctttactctcgacaggttcatagaggtcaaccacaagcttaggatgagcccccgtagacatctcctccagctgccactgccccctcctttacctaaaattacttctgctcgggccatcgcagctcgacgcaagacactgtccaagtcgattgtggaggcttgcgaagtgaacaaatcattcctccaattcacagtcgacaagaaggaatatagaagaaccttgctagtcgacgatggcagtgccgaaggggcaagatctgacggtgcttacagacccactcctcaccgtgaaggtcatagcggtcgatcatcccacagggagcgatcacctcgtcgtgactcacctcggcccacctcccgaactggactaagcagcgagccacttgctgacctgattcggaagaagagagacagatcaacccgcatcagctcctcccccaaaagagacaagaccagggcctgaactgaccgctctactcgaccgaaggcgtcacaccgatctatgggtcctccgactcccgtcggtgtatctaccttgtgcggattaggaggggaaacggcggagcgaagtactatcccttggcgggatgaaactgaggtccaagatgccggagctaaagctattttggttcctcagtccaagtcgctcacgggttagaaatttcttcccatttttttttgttatcacattttttgccatttcggcttattgactcagcgtcgttcgaccggtctgaccccttttttttttaaacagcgatggaaacgtacgggaacgtctttcgatgtttcaaaacccgaaaagacaccatccttacaactttcgatagatggcatcctgcaatccgcgagcgattcgtactccatgcccatcactcatctcgggttagttcctttttcccaccataaaccttttaatctttgctcctttactctgtcgctaatcccttctcgttattatctgatccaggcgaacagcgaactcaacgacatgattgagtactatgaaaggctactgcttgacaaggaaaaagatgttatggcgtggagagataagtcttcatcccttgagtccgatctccgctcttcaaatgatgctaggctgaaattggaggatcagttggataacctctccatcgaactcatgaagtccaacggcaagctgcaggagcagtaccaaacgtacgacaaggtccaagaagaactctcaacttcccgggacaaactttcaaaatccgaatctagtgcctaagagttgtccaaccagctctccgaattgcagcttaagtacatagggtggccaactatcgggatgctgagttggcgaagtcgacgtcaaaggccaggaaagaggtgaaaggtcgcgggatggaattgatccaaggggcaattgtcttcatccaaaccgagaaggctggagcggagctggaatctgacgttagggagtacgagagtaatctcctcctttttgaccaaactcatgaatatgatttttctgaagaacgagagagggacgagttgaaagccgtcctggaagagaagcaaaatcgtttagctgcctttccttcctcatcgttcaacccccagcagttcgaggagttcttcaccgaatcgcctcctttgagtgaatccggtttagactgggctggtaaatcccaactcttctccctttttcttaaaaaaaaatcgatccacagtgaattactcttatattaatccaagataagtgcctcaggtgtcagcggttccgcggaacccg

SEQ ID NO: 163009 - DNA, 3332 bp, Arabidopsis thaliana landsberg
tttccatatagaaaagaacccctatcgccgacccggagataactggaaatctttcgagaatatcgcgagaggcggtttaccaaggtcctatataaagcgcctcaaggaacgaacaaaggggacatgcacaaaaacactctcaacttcagactatcaaaacgctatgattttgaaggcaaaaacacttattttttacttttctaaacacttgtacgatcaaatcatcatctcttcaataataatatcaagaacaccgtcatcggtaatcaaacaattctgtagttctttgagagtttcgcggtaatatcaagaacaacgtaagcggtagtcacagataccctaagtacaatttcgattgtgtgagtttcgactctcacaatttggcgctagaaggaggggaagagatttctctttctccaagaacacaaaaccgaccgatcaagcaacgatgaccaacaaccagatccccgctaccaccgttgacgcggagggaaaccctgttcctccaatccagacaaatgctcccgaagtcgccactcccgcagtcctagcagaactgaggagcatgatggcacaactccagaagaaggtgaacaacaatgagcaagcaaagcgatccttggcccaacagctcgaagcagctacttctcaagggcaggtcaggaccacccgcttcggcgcacgacactttcctgatcggcgagtaactgcagatctcaatccaacaagacttgtgttcaacacacattgcaacacaacgaggccactttggcgaactgcttcagcgcttggcggaacccgagcagaaccaacagcctcgggagaacagaatatgacggaccaagtggaagaagccaacccgcgggatccaattccccaagccgaagctgacgaggctgaccagatggaagtctccgatggcgaagattcggaagaaaacattagatggggtgaggaatatgctagggagcaggaaataaacgccatcaaactccttagccaaggcggacaccgagatgaagctcgtacgatcacagatacacaacgcagtctcctccgtcccaaacatcgaccgcattctagaagaatcccacaggacgcctttcactcgcaagacctctaacacaaaaatttctgtggcccgagccaagttcaagccggaggagagagacggtggtctctgttatctgttcgtcgaacacttgaaaggacaggctttagattggttctcgagacttgaaggaaattctgttgatagtttccagtaactttcgacacttttcctcaagcaatactcaatgcttattgatctgggcacatatgatgccgatctttggtcgctatctcagcaaccaaacgagccgctcagggacttcctcacaaaattccgatctaccctagctagagtggagggaattaatgatgtgcggctctctctgctcttaagaaggcgttgtggtacaaatctgaattccgaaaggagttaaatctgtccaagccacaaacgatccgcgacgctctgcaacgagcctcagattatgtttcccacgaaaaagaaatggagctactattaaaaaggcaggagccgtcaaacaagcaccctgcagcgaaaaatcccaacctaccgctctgaaccatgaaaagggcgcccaaggtgggacgttcgtacaccacgaggggcaaaacttctctagagcccataattatcaagccgataccccccgaggtcgaggacgaggccgcggccgaggtcgtggaatagaatccgatatttggacgaaggaccaacccacaggaaacgatcaggaacactgcaagttgcacaaaagctacggtcaacatacctccaggtcttaaagtttcggggggaatttggctggtgaaatcggtggaggcctggccaccgaagatttagatgccgaaagccaaaaccgagcaggtaaatgctgtggcgaatctacagcaggcagccctcgcggcaaaccccgaaggacgcaagagaggtaaaggcaaccacgaggcaaatgacgacaaaccggaagctgctcggggaaggatcttcacaattttaggagattcagctttctgtcaagtcacaacggcgtcaatcaaagcttatcagaggaaggccgactcaaatcgtaactggacacgaccgtttaacgaaccagatgacgaagtgactttttatgagagcgatactaacggcttggaccgtccgcacaatgatcccttggtcattccactaattattggtgatttcaacgttgaacgagttttagtcgacatggggagcacactggacatcatttttctcacgaccctacgagaaatgaaggtcgatatgacgcaaattgtacaaactccgcgacatgtgctcgggttctctagggaaaccaccatgactctcggcaccatctagttaccagtccaagccaaggggataacgaaaatcatcgatttctctgttacttaccagccgaccgtttataatgcaattattggcacgtcatggttgaatcaattccgagacgtcgcctcgacatatcatctttgcatgaagtttcccacgagcaacggcgtgaagaccatctggggaaatcagaaaaatgcccgaatttgtttcatggcagcacacaagctcagaaaccccgtcaccgagtcgacagccgacgcgaaacataagaaggctaaactgggctgagccgaagcaaaagccatctccgagcagtgatagcaactaaagatcgaggaggctcgagaatcaacaagaccagtccccgacccggtaatctttgtctggtccccagaagacttgcccggagtaagcgtcgaaatcgtagcacacgagctcaacgtcgacccaacttttaaactcgtcaagcaaaagaggagaaaattgggtcgggagcgagcggaagctgtgaaagccgaggtagagaaactgttaaggatcggctccatcatcgaggcaaagtaccccaattggctcgcaaatcccgttgtggtaaagaagaaaaatggcaaatggagagtctgcgtagacttcactgatctgatcatagcctgcccaaaggatagtttcccattgccgccaatcgatcgcctcgtgcaatcaacctctggaaacaagttgctgtcattcattgaagctttcgctggctacaaccaaatcatgatgaaccccgaggatcaagagaaaactgctttctataaagcaaaaggaatttttttgctatcgagtgatgccattcggactcaagaatgccggggcaacttctcaatgcttcgtcaacaagatcttcgccttatcgatcgggaaaacgatggaa

SEQ ID NO: 163010 - DNA, 1977 bp, Arabidopsis thaliana landsberg
gaagaataaatcctgcaggaaagagtgagtctgcgaccacaaaaccccagaaggaaaaggaaccaaaagcattgaaagataaaaccactaaagcagaaagacgtgccatccaagaggcacaacgggcagcaaaagctgctgcaaaaggttcttgttttgttcattatttttgctttgttttccatattcattaaagtggaacgtaaaatcatctaagtgcttccctcttgctaatttttaggcgaaggaagcaggcgtgcagatgagtctggtagagctaatcctggcaaggctgccataaagccccaaccaaagaaagaaagacttcccgtcacgtcctctgtttctgaaaaaacagctgtagcagtagaaaaagagaagaggatggatgtccctcagacacaaatgcagtatgatgataaaagccgagtggataaagctaagaggcgagctgtggttgaacagaccgagagcaagaacaaagttgaattatttctccatcttcctcaatacgaacgcagcaatcagcttcccaatttaagctccaattttttcacactcgattccatacaccatgcagtctataaggtacacctacttgtttatatgtgactgtgaaatgttcgttacacttttgaactggaatccttaagggtttgaaaccctgtggtttatctctgtgccatagatcctcaagtgacgtatatacatgtttttgttaatcttaggtgggtttgcaacatttggctggagatatatctggggacaatgcacgatgtattgccatgctccaagcatttcaagaagctatagaagattacagtacacctcctatgaaagacctgaccatggacttgacagccaagataaacggttatgtttcattcttgatagaatgtcgtcccctctccatgagcatgggaaacgcaatcaggttcctgaagaaccaaatcagaaaactacctgtaaacctgtcagaatcagaggcaaaaagttccctctgttctgacattggccggttcatagacgagaagacaattattgcagataaggcaatcgtgcaacacgccgtaacaaaaatcagagacggagaagttcttcttacatatggattctcttgtgtggttgaaatgattctcctatacgcccatgagattgggaaaaagttccgcgtagtgattgtagactcacgccctaaccttgaagggcaaaagctactccgtagacttgtgactcgtggcctcgactgtacctacactcatataaatgccatttcctacatcatgcgtgaggctacacgtgtttttctcggtgcttcatcaatatactcgaatggaactctttacgcaagagttggcacatcctgcattgcaatggttgcaaacgcatttagtgttcctgtaattgtttgttgtgaagcttacaagttccatgaaagagtcctacttgattcaatctgctccaacgaacttggtaaatgtttcactcgctcttcttcttgtcgattattcatttacttgaatcagagtttttttgcctgtgtgaaaaatttacaggcgatcctgacgccgtagccaacataccatcatttagaaccaatgcaaagcattcaaagacaatggacaacaacaaaaaccttcagtttctgaatctaatgtaaagcgcttcataagtggttttgagaatcatcacaaagctttattcttatttctcttaagtttgttcttatttttgtgtgttccaggtatgattctactccttcagaatatatatctatgattgtttcggattatggaatggtacgtatctctcacacattttgttatgttatgagtttggtatgcagagcaatttccatttagtgtctgatacatttgtgatttgtttatgtgtgaatagattcctccgacgagtataccagtgattgtacgtgaatacaggagagaaaacttgttgctataaaaaggtaatgtgttt

SEQ ID NO: 163011 - DNA, 3460 bp, Arabidopsis thaliana landsberg
atctatcatcaagatggtactaatcagaatgtggaagaaccggtacgtaaccattctgaaaaattctacgacttgttagaaggtgctcaaaatccattgtacgatggttgtcgtgaaggccaatctcaattatcgttagcagctcgagtcatgtagaagaaggcggatcataatatgagtgaaagatgtgtggattcggtatgtcaaatgttgacagattttttaccagaaggaaaccaagctactgattcgcattacaagacagaaaaattgatgcgcaatttaggctttccttattatacaatcgatgtttgtaataacaattgtatgcttttctggaaagtagacgaaaaggaagataaatgtcggttttgtagtgctcaaagatggaagcccatggatgactaccgtcgaagaaccaaagttccatatagtcgtatgtggtatctacctattggtgaccgattgaagagaatgtatcagagccacaagactgcagctgcaatgcgttggcatgccgagcaccaatcaaaagaagaagaaatgaatcatgcttcagatgcgacggagtggagatatttccaagagctacatcccatgtttgccgaagaaccccgtaacgtttatctcggattatgtaccgatggattcaatccatttggcatgtcgcgaaatcattctttgtggcctgtgatcctgactcaatataatttaccaccgggtatgtgcatgaatacagagtacttgtttcttacaattctgaattctgggccaaatcacccgcgaggtagtctcgatgtcttcctccaacctcttattgaggagctaaaatagttatggtctaatggaatcgattcatatgatgtgtctttgaatcaaaattttaatctaaaagcaatgttgatgtggacgataagcaactttccggcgtacagcatgttatcaggatggacaacccatggtaaactgtcttgtccaattcgcatggaaagtactaactctttttatctacctaatggaaggaagatgtgctggtttgattgtcaccgaatatttctttctcatggtcatccattacggaagaacgaaaaagacttccgagaagaaaaagacgcttctaccgagtatccacctgagtctttaaccggtgagcaaatttattacgagcggttgtctggtgtaaatccaccaagaaccaaggatgttggtggcaacggtcacgaaaagaagatgccaggctatgggaaggaacataactggcacaaggaaagcatattatgggagcttccatattggaaagatctgaatctccgacattgtatcgatgtgatgcatacagagaagaattttttggataacataatgaatactcttatgagcgtgaagggtaaatcaaaggacaacataatgtcaagaatggatatagaacgattttgttctcggcctgacttacatattgatagtaagggaaaagctccatttccagcttatacattgacaaatgaagccaaaatgagtttattgcaatgtgttaaacatgcaatcaaattccctaatgtttattcgtctgatttgagtagttgtgttgatatggagaatgggaagttatcaggtatgaagagtcacgattgccatgtttttatggagcggttacttccatttatctttgcagaactcctcgaccggaacgttcaccttgcattatcaggtaaaataagaatataatttactctttatatcatatatgcacttgagatgatgcaattttttttttcaggggttggcgcgttttttagggacttatgttcgagaactttgcagaaaagtcgcgttcaaattcttaagcagaacattgttttgatcatatgcaacttagagaagatcttcccaccatcattttttgatgttatggagcacctgcctatacatctcccctacgaagcagaattgggcggtcctgtccaatataggtggatgtatccttttgagaggtttttcaaaaagttgaaaggaaaagcaaaaaataaaagatatgcggccggatcaattgttgagtcatatatcaatgacgagatttcttatttttcagagcactactttgccgataatatacaaacaaaatcaaggtaaccatgaattatcgatgtgatgcaagttttcaatgcacaaaaataaccatgaattacctcttttggatcaggttaacaagattcaatgagggtgaagttcctgtatatcatgttcctagagtacctactatatttagttctgttggtcgtccaagtggagaaatacgtgaagtatggctatcagaggaagactatcaatgcgcacatggatatgttatacggaattgtgattattttcaagtaattgagaggtatataacaaagtcatactcccattttaagttaattatataaatgtttgtttactaacccttatatgttgtttttgtctttatatagtatgttcgaagattttctttctattaaatatccaggattgaacgaaaaagaactcttcgtgaaaagaaacgaggaatatcatgtgtgggtgaaagattatgtatgtctaaatagtttataatatatatgatttgcatttatttattgttattcttatctctataatgatgtttatttctaaatttgcatacaggttacatattggaactctagtaatccttttccaacttgggttcaagagatagtcaatggacctttgcacaaagtcaaaacatggccaatgtattttacaagaggctatttgtttcatacgcagagtcatggagcaggacgtaagacttgtaactatggtgtatgtgtgaaaggtgaaaattatacggatgcatctgacgcagcagatttttacggcaacttaactgatatcatagaacttgagtatgagggggtggtcagtttgaaaatcacactttttaaatgttcgtggtatgaccctaagctcggaagaggtactcggaggagcaatagtggtgttgtcgacgttctttcatcgaggaaatacaacaaatacgaaccctttattttaggtacgtatggtatatatatatggtcatttagtttttctagttcatatacaaatatctaattctccaaatatggtgcatttacaaacagcatctcaagcggaacaagtgtgctttattccttatccatacacgaaaaaaccaaagcgggagtggctcaatgttttaaaagtaaatccaaggggaaacatattaggagaatatgaaaataaagacccgagtttattgcaaacagaaaatgatgatgctgttttaataacaacaatagaagatcttgtactcgacaatttgacaatcaatcgcaaccccataaacctcgatttagatgccggagatgctgatccagaagatgaattttgatgtaatttatcgtcttctgatgatgaagaacaacaagacgaagaacaacaa

SEQ ID NO: 163012 - DNA, 2780 bp, Arabidopsis thaliana landsberg
atggtgagttaattggttgaagaattgcgagggaattgctagacgcaatcgcacttccctcgcaaattttaccctaaaccctaaattataaaaaatcataaatggcgagggacttgcttggagttctggcaattccctcgcaatatgtggtgcgttttaattggtttaaaaatcttcgtcgcaatttcaaagcaaactgtgcgagggttttgcgaggaaataaatttctatatatactcgaagacctagtttgagcggcgtcaaaccagccgcatcaaaccctaaccctaaattttttcttcttcttctctgatctcttcggcgccggatctcttcttctccgatctgattctgtcgccgcctctcttcttcttcttctctaatctgttatactcatcgccgcctctcttcttctccgatctgattacggcgcagactctcttcgccgcctctcttcttcttcgatctgtattcaaacaccgtcgcgtctcttcttctccgactcgatctgttttgcctcaaaggtaacctctgtttctccgatctaagttcttctctcaaatctaacttattcttcttctttgatcttacttctttttcccagatctaactcttgatttgttttttgtgcaagatgccgtcggataatacttatgtacggtttagacaacaacagcgtgacccgttgcatgtcaattctcctgttagtggtgggaatatctcaggggttcaaggttcaggttcacgttcaggttcaaccgttccaccatcgcctccaacgccaacgactcagccttctgtcaatcattctgatgttcaagctgaccgtctcaacaatctgacactggaagagctcctcgatagtcttggttgtgctggcttgacaaggctagacccaaagcatcctccgggaactctctggtaaggttaagcttatagtctctggaattaggtcttgtaagttggttagttctgccttagaagtttggtcctgccttagaagtctctggatttaggttggttgtacttagcattgtagtttcttagaagtataaagacatagagatccttatgtgttttgttgctgttgttgtaggtttgacaatgactctacagttgcagcaacaatccgcagcatatttgaaagagatttcaaagaacctcatgccaattggttaatgacaccccaacatgtggttgatcgctggtttgaaacttttgctgtaagtccactaaagtctgttttgttgtgtaaagctttttagttgctgtaatattaagtctaagttttgctgtcacttgtgtctgttttgtagcaaatgtataattgggataaagcaataaacaagagagttaagactgagtttgaagcaaagctgaaggagaggatgtgcgatcaagtttctcgctggaagggaaagtggaagctgaaaggagatgaggcaatggcgcggtggcttgatcctgaggagtgggctggtcttgttaggtattggaaagatccgaagtcagagttaaagagtatcaaaagtaggcaagcatgatatcatgatccacagggccttggtatatctaaacaccggtctggccagacctcttacagagcccgggcccgaaaacatgtaagttattttactctcttactttgtcaattttattacttactcaaagaactaaccaagacttgtttctgttgtagtgtgaactcaccggagaaactactccagattttcttgtgctcttagatgagacacatagaaaacctgatggtagtttcattgatggaaaatcagaggagatctacaatgaagtgtcatctaggattcaagaggagacgtctcagctgtgttccgagaacacaacggagagcacagcttcaggcggtttatctgttcaggccaagaacaagatatatgcttcggtaaatttctctctctctctctcttctatatagtttcagctgtgttttgtcctcatttgtttgtgtctgttgatccggtgacttggctttgatgatgttagtaattttctgctttgtttgtgtgttttgtcaacacatttactatagcgacttggctttgtgtttgtcagtttttttctgcctttgtttgtgtgtgtagtcaacgcaattagaatgcattgtaacttggcattgtgttcaatgttttgtcatgaattggtttttgtttgttgtagttgtatttgtcttggcattgttacttagctgtatttgtcgatggtttcattatgtaattggatttgttattgtcttgatttgtttgtctcagttttggttacattatgtaatagtgacttgtttttgtttttggttttgagtttctcttaggtggctccaaagaagaaagggaggatatatggggctggttcattgcagctagaagccgcatcagctcacatcggtccttcagttcctcgagatgatccgggtgaactctctcaaaagctggctgccgctgaagctctcattgcaaaccaagcagagaagattagtagcttccatgtgtacttcgactaccttgcggagaaagatccagactttgctgccatctttcgagctggatcttctaggacagagcctgaaggctccaaccagccacctgagatgccaaatgccacacgaactacagctgctgggatcacaacaactgaagctgttgaagctgaaacagttagggctgaggaggcagttgagactgaggcaaacaacattggatcctctccatctcttgctttctaaaaaacttgcgacactctgtttt

SEQ ID NO: 163013 - DNA, 6394 bp, Arabidopsis thaliana landsberg
gaaccacaaaatatgggccggaatcgtggatttgctttcatcgagtattacaaccatgcatgtgctgaatactcgaaacaaaaaatgtcaaatccgagttttaagcttgatgataatgccccaactgtaagctgggctgaatcaaggagtggaggaggaggagattcttcggcttcccaggtttgcttcattagaacctttcttactaataaataatagaagcagcaacagttatcttaccaacaaagagacatgtgttcaaatgtttttctttcaaaaccatgaaaaagatcttactaatatgctgtgtggaatgattgcaggtcaaggcattgtacatcaagaacttacctagagatataacacaagagcgtctaaaggcattatttgaacatcacgggaaaatactgaaagtggtgatcccaccagcaaaaccaggaaaggaagacagtagatacggatttgtgcattatgcagagaggacaagtgtcatgcgagctttgaaaaacactgaaagatatgagattgatggtatgttccattccgaataatattcttccgtatcctcacatcttttgatgtctaaataccaaattgtatcctcatttgtatataggtcatatgttggattgtactctggcaaagcctcaagctgatcaaaagacgaatacaaatacagttcagaatgtgcagaaatcacaattgcaaccaaactatcctcctcttcttagttatggcatggctcctagtccctttggtgctctcggtggatttggagcttctgcctactcacaagtgagatttctactacttatcaatcaaatcattatcttttgagaaaacgttataacaatttaagcctaaatttgtgggaattgtgcagccattaatgcatgccggaggtcacgcagccggtggaatgtcgatgatgccaatcatgttacccgatggaagaatcggatacgtcttgtaagttcttttctatattcctctatactgatctcatgcgattcgtatatataagacacatgtactgatctgacgtgttgaatgttataggcaacagcctggactagcagctatgccgcaaccaccaccaaggcattctccaccgtataggggaggcagcggttcgagcagcagcagcggcagcaaacgaagtagtgacaacggtagaggacgaagccgttacaatccttattagtaatttcataattatgttttctttattgggaaaaacaccccaaccaagacacgaaaaacaaaaagtcaattttaaccattgtgtttttgtctttgtgccatctgttttgagttttgtgtgactcttaagaatttgcgggtagcaatggggttcgtttaactcgtgttctgtatatcattggtttcctgtttgttttttaaaaaataatttgtttattcatgtctttttctgattattttatgtatggtccaggcttactaaagcccaatgaaggcccaaacttgttatcgtttcaaattagcacaatcactcacgtcatcatcatattaaagcaaaatttgtatccgccccgcattatccaaaaccctaccggccggctgttcaattctgtatcctctaacgccgtctcgtctcacaattggtgagtttcaatctcttgtaattttcgtgtttgcgtttagagcgtttgaaatacgattataacaccggaaaagcaaacgccataacaacgatgagaaatcaaggttttacgaaggaggataggatgaatcagttgcctgaagatttgattctgcggattctgtcttttcttctaacagaacttgtcatagcaacgagtgttttgtctaaacaatggcggtctctatggaagttggtgccaaatctcgagttcgattctgatgattacgaaagtgaacactatacattttcagagattgtttgcaagtctttcctttcactcaaagctccggttctaaagagtttgcatctcagttttagattaaagtcagttaatcctgtagatatcggactttggataggaattgcgtttgctcgacatttgcgtgaattggtactctatgttgccccgaagcagaccttcacatttccgagtagcttgtgtatttgtaacacacttgagactttgaaactcatacttgggattcatgtagacataccttgtccggttcttttgaaatctcttagaagtctgcaccttgattctgtgagctacaaagatgaagaatctatccgtaacttgttatctagttgccctattcttgaaaatttggttgtgtatgaatattggtataatgttgtgaatttcgatattgaggtcccgtctttgaagagacttgagatttgtgacgttcttcacaaaaaagagtttagaagatatacgattaatgttccctgtttgaaatacttgagaatcgaagggttatataaagattttgagctttgtctgaatgcgccggagctggtggaggcatattttacaaaaggttcttttatcatcgctgataagtttcttggttcactaaagtcagccaaacgtctctctttggatatattagctttgaaggtaacttaaccttgctattgaatttttggttatctcattgttatttgcaagatttatataccaataattgtttcatgcacaggttgtgtatcctactggtagtatcttctatcaactggtatatctggagatgcatacacgtagagaagagtggtggaatctacttacggtcatgctcgatagctctcctaaactacaagtcctcaagctcattgatgtaagatatatcattttattattcagctatctacttttgatggtctctcttcggggtttaaattagtgaaggtctaatagtaaaacacattttcctctgaattggtctcatcagcatactcaggatgtaagtaaagataatgtggttagcgagaaatggaacgaaccaaagtatgttcctgaatgtttgttgtctcacctcgagacatttgtgtggataagatatgattgggaaagagaagaagagaaagaagtagctacatacattctaaggaacgcaggatggttgaagaagggaactatctccacaaatcccatcgaatcgaaagaccttgagaagttggaagagagacgtaagatgctcaatgagttggatagtgtggtcagggcttccaattcttgcaaccttgtgttcgaattcgaatgatcttatacaatcttgcttttattgaatggttttacatttggccattggatattgaaaaatttctgaatcttctctatctctattctctatgatgaatgaatgatgatacaatcttctgcttcttccgagcgatgttggttaacattaacattttggtattattttagaaataagtaaaccggtcggattcggttagattttaaacaaaaccgagattttgattttcaatatataaaaaaaaaactaaagtctttcaattggcgagagattcagtactttcttcgactttgttgagtgtttgaaatgcgattttagcaccggagaaacattgaaccaatggaacagcggtaagtttctttgtttcgtttatgtttagagcatttgaaatccgataaaacatatgtttctttgtttcgattctttgagaaatcgaagttttgtgaatgaggataggatgaatctgttacccgaagctttgattttaaagatactgtcttttcttcgaacaaatcattctatatgcaagctcgaaaccctaattcttaatcttgtcttcttttggtttttgttagtgaaagtttgagaattcgcgttgttatgggtaaagacaggatcagtgagttgcctgatggtgtgcttctaaagatattgtcttctcttccaacaaacattgtcgtagccacaagtgttttgtctaaacaatggcggtctctctggaagttggtgccaaatctcgagttcgattctgatgattacgaaagtgaacactatacattttcagagattgtttgcaagtctttcctttcacacaaagctccggttctagagagctttcgtctcaaatttgttaactttaatcctgtagatattggactttgggttggaattgctttttctcgacatctacgtgaattggtgctcgatttttatcctgctgagctcgggaggggtgtgaccttcacatttccgagtagcttgtgtacttgcaacacacttgagactttgagactcgtacttttgattcttgttgatatctcttctccggtagtaatgaagtctcttaggactctccatcttgagcttgtgagctacaaagacgaatcatctatccgtaaccttttatcaggctgccctattcttgaagaattgcttgtgattcgaggtgaagattctgatattgaggttttcactgttgacgaggtcccttctttgcagagattaacgattaatgacgaccatgatggacaagagttttggggatatgtgataaatgctccttctttgaaatacttactgattgaagacttaagatgtcccgggttttgtctgaatgcgccggagctaatggaggcaaatatttttgatggtacatctataaccaatgacaactttcttggatatctcacttcagtcaaacggttgttgttgaatttatcaccctggaaggtaatgttgcaatcgtcaattgacttgttgttcattgtctctatacactaataataatactatttggtctcatgaatagattacatatcctactggaagtatcttctatcagctggtatctctagagatgtatacacgtgaatagattggtgggatctacttacgctcatgctcgaacattctcctaaactacaagttctcaagctcactgatgtaagacattttattattagtcagctaggtatttttgtatgatctctcgtttatgctatacattgaatgattattgtctctttggtctcagaattgtgtgaaatttcataaaaatggtttgccgggcggcaaatggaatgagccaaagtatgtccctgaatgtttgttgtcgcatttagagacatttgtgtggagaagattcgattggggaagagaagaagagaaagaaatagctacatacattctaaagaacgcaagacgattgaacaaggcaactttctcgacaaatcctgttgactcggaagagctcaataagttgaaagagagacgtaaggtgctcaacggattggatggtgtggtcagggcttcaaattcatgccagcttgtgttcaaatttgatccatcttatcttggatcagactctccttagctcttagagcctctaaattttaccggtatgaaggatttggatcggtttagggttttgacttttgatatttatctatcgttatgatacaatcatgttgtataagtcagagcttcaaattcttgccaccttgtgttcgggtttgaatgatcttagactcattcttatcctataaagcttttacgacatgttagctttatttgttttgagggacaaacaaataaaaagttttacattttcagaagtcaaggaaaaatttcctagtaataattttttggttatatgttaatctaattagaatctaaaatagtccgtttgacaacaaccagaacacggtttggtttagtaaaaaaaatcaagcattgaccgctatggataaattttatgttcttattaaaaaattgctgatgtcagcaacctctaaaactagggttttaattttcgccgatccttttacaaactaaacttacaagtgttaatcataaagctaggttagccagattcgactggcgaatctcttttttagcttgcttgtgcattgaatttttttgatacgatagcatagggaaggcatatatttggacagttttgcgagattcattgttcctatcaacccaaatggaactccggttaaaaattgagaagttatgttcttataagcatgcttcctgattcacgtagatagtttttgtaacgcaaactccaaaccctaactgatcttttagtattatcttctttggttttggtggaggaaagtgagagaaagcgaggtgttgtgagggaggacttgatcagtgagttgcctgaagatttgcttctacttatattgtcctatcttccaacgaaaaaagtcataaccacgagtgttttgtctaaacgatggcaatctctttggaagatagtacccaaacttaagctctaactatcattttacacatcaattttcagagaatgttggcaggtctttgtttttacacaaagctcctgttttggagagttttcatctcaaagtttgtgatataaatgacgatagacctgcatgtgatgatatagatattggaatatggattggaattgcatttgaacgtcatgtgc

SEQ ID NO: 163014 - DNA, 1392 bp, Arabidopsis thaliana landsberg
atgggaattaggccggaggaatccacggtgaggccaacaggagagacttgggaggtcgaaaggttatttgtggcggacacaagtgtttttccgaccgctttaggggttaatccgatggtcaccgttcagtctattgcttattgtattggacttaatgttgttgatgttcttaagaagaagaagtgagggttcatcagtttgaaatagattttagttttccacatattttttaaaaatcatttttgaaagatccctgttactacagcctattatgaaaaggcccatctttgtctcttgacctataccttagctaaatgagttcattgctgatgcatttcttaattcacgttccatagttaatgaatgttaaagggattggtagatttgaaaacatgtgtaggtcgagcataagagtcggattgattaataacaaggcatggctaacgtttttgaatagaaattcgatcatatcgcagcttagaaataccaacttggacattgatttcatctgatttatctagtgctttggctgtgagcccccgctttcaaacctcacctccagcttgtttttaattgtttgcttgagggcaagcaaagactaagtttgggggagttgataagtgtgtattttacatgtttcgagcatccatttgtcatcactttagcatcatatcattactgttttatatcatttctcatcatttgtcatcactttgcatgtttaggatagatttgcatgcattttgcatatttgtgttgttttcatgtgatttggagctgttggcgagctaattggaagatgcgggcctgatcacagcagaacactcgaccacgaggtcgagtaggagcttcaagatcttaacagatcactcgaccccctggtcgagtagaggacatcactacttcaccacatcagtcgaccccgaggtcgagtgtcttcatcccatcacctgaccatcactcgatcgcatcactcgaccccgaggccgagtgtcttcacctttattgccagaccactactcgacctcatcactctacctggaagtcgagtatcaccatcaccaccactcgactgcatactcgatgacaagcttcagagctttcttcattctgcactcaaccagacactcgagcacaaggaagaaaagaagactccagctattcactcgacctcccactcgaccacatgggtcgagtacagttcttaatccatcccaatacttcgtcgttttaagtattagggtttcggaatatttggctataagtagcatgtacttcacattttcgcagcaaagtttttatctagttttattccgcagaccttgtgttctataccttttgtaatccggatttctcttcatcaattcagtattcagtattcagcttttgttc

SEQ ID NO: 163015 - DNA, 2092 bp, Arabidopsis thaliana landsberg
atgtttccaagatcacccaaggtggatgaagagaggagacgcaaggcaaaaatctgtgcacaaggctttgcgttagcttaccggaattcatcccgaaatgaaccagccccaatggaagctgaagaacaacaacactcggccgaacaccaccaccactcgcccgagttgactcagcagacccccgaagaccctccgcctctcattcgccgctcgagcaggcaaagaacagagcgagcagctcagactcgatcagcacgccgagtaccccagccgagtgtggaggaacagcaccaaaatgaagcgcatgatcggagaagagctgagatagctcgtggaaaacgtgttgtggtggaagaagaagaggttcatgtggatgagcctatgtatgaagagccgggtgaagaagaacaagttgtagaagaagagatgatggaagaggaggatgttccaatcccgaaagctgtttctaagagggggaagaagactccatctaccaagaagttcatccaatacctcaaggagctaagctttgagagaactaagcatccgcatggcgagactatggatgttttgggaatccgagaagacgtggagttcttgtttgatatgtgcggtttaacaagatacatgacctacgctttcgagagttaccaaaactacacatgcgagctgctagcaaccttggaagttcatttcttttcagctcaaggagaagaagaggcgggtagaggtttcggttacgctactttcaccgtgggaggacgagactactctctcaccatcaaggagttagacaacctctacggtttcccgtcgaaagagggtcttgaaccagattttgacaagcttgagcttacgcagttttggaacacaatagcggctccgggcgatttccactcatcacggtgcaagagttcatcgattcgcagcccggtgctaaggtacttccatcaatgcatagctcatactttttacgcgaagaaggtgacgggtcctatcaatgatagcgagctccaaatgatggatgaagctctcaagttggttctaaggaagacaaagaacgagagagtgatggaaggagatcgggctaacacatctcttacggtgttgttcttggactacttgatggggttaaaggactatgcggctcagctccacaagatgaaacgcaagggatcaattgggattggaggtatgattacacctatgttagtagctgcgggtattgacttaggaggaccggataggtcgccggaatgaattgacattgcctatttgagaaagaagaacatcttggacaagacaaccccctccggtgtgcatacctacttgttcaaccaccccgatgaggggagctctaggctgctcctaccttgcgccaactacaccaccattaggaacggtgagaacattaatttctaccctcctatccatgcactctatgatgctccggagaacataccgccacctcgccaagagcctctacaccccggttacgacgagaccgatgagcaaccgcaagatgaagctagcgagtacttcccggagcggttccactttgacccatacttcgccactaggcaatcaaggagcgagagagcagctcaccaaagggtcggaatgcttcaagggttggcaaagttccacgggaaggttattaaaggcctcaccaagaaagtggaatctctcacgcacgcggtgaagaagatgagactccaaatcaaagaactccaaaggaagcacaagtctcctcccccttcaagtgaaagagaccgagttgtccgtcgaagtgattctacgagcatggcggatagatttgagcgaagtgggaacctgggtgagcctagccaaggaacgtcatttgagccctgccgagcctcctcttatgagccacgggaggcatccgctactaagcaccggaagaaggtgaagaccaagagaaggaacgcccccccaggccgagcagagcacttcggagaggtactcggccgagcaactcgacgtgccaaacgagtacaacccgcctccatcaaacgttccagcttacactcaagagagcatggacgagttcgcccgcatatacttcagctaa

SEQ ID NO: 163016 - DNA, 1525 bp, Arabidopsis thaliana landsberg
atggcgattcttctatctttggtattgcttctatcccttccctttctcttcacgttaatctacaccaagaagatgaaggaatcgaaacggaatcttcctcctcgtccagcaaagcttccgatcatcggaaacctacatcagatacaagggatgattcacagatgtcttcatgagctctccaagaaacacggaccagtgatgcatctccagctagggtttgtcccactggtcttgatctcatcgagtgaagcagctgaagaggctcttaaaacacatgacattgagtgttgtacacgacctaacactaacgccgcaagggttttctcccgtaacaacaaaaacatcggccttggggcatacagtgatgaatggagagagctgcgtaaggttgcggttcgtgagtatttgagcgtaaaaaaggtacaatctttcaggtatgttagggaggaagagaatcacttgatggacaagaaactgagagacttggctttgaagcaatctccggtggatttgaccaaaaccctattttgcctagctgcaagtaccggtgtttgaagctcagaaaagtttaactttcaaatttctgatctttttcctattcctggtcttggatggtttataggctttttgtcaggccaacataagggccttcacaacgtcttcaccgaggttgataatttttttaatcatatagttgacgatcatcactcgaagaaagcaactcaagatcgtcctgatatggtcgacgctatcttagatatgatagataatcaagaacaatatgcatctttcaagctcaccgttgatcatctcaaaggagtcctctcagtaagcaaacaaatttctttaatttactttatggtttttatatctttaattaatgatgtaatgttttttttcttgagctagaatatatatcacgctggaattgacacaagcgccatcaccttgatttgggcgatggcagagctcgttagaaacccacgggtaatgaagaaagctcaagacgagatccgaacttgcattggaatcaaacaggaaggaagaatcatggaagaagatcttgataagcttcaatacttgaagcttgtggtgaaagaaacctctaagtctacacccagcagctcctcttttacttccacgaaaaacaatggctgatatcaagattcaaggctacgacattcctcggaaaacagctcttcttgttaatgcatggtctctaggacgagatccggaatcctggaaaaatcctgaagagtttaacccggagaggtttattgattgtcatgtggattacaaaggacatagctttgagttgttaccatttggttctggtcggagaatttgtccaggaatagctatggcgatcgcaaccattgaattggggctcttgaatttgctctacttctttgattggaatatgcctgaggagaagaaagatatggacatggaagaagctggtgatctcactgttgataagaaagttcctcttgagcttctgccagttattcgcatcagtttgtag

SEQ ID NO: 163017 - DNA, 1932 bp, Arabidopsis thaliana landsberg
atggattcaagaaggaagagttcgtctcgggcaagaagatcctcttttgatcctgaagaagttgaggcgtttgacatgagtggcatgactgaacgccaaattcgccaagctcgtcgtgctcaaagattaagcttgattcaaggaggaagctcaagccgttcgaccatgcaaagagaagaagtagctcggggaaagagggtcgttgaagctgaagaagaacaccatgaagaggcaccctttgaagaagcggtttctgaagaagaggttgagaacatcggggatgatacaccaacccctgttaggagaagaaaccgaccaaggaggaagagagaaccaaccccgagcgagtactatcaatatttgaaggagttgaagtttgagggaactagttaccctcataaggaaacgatgcaaaagcttggtatttgtggtgatgtggaatacttgatggaattagccaatcttgtaacattcatgagctgctaatgtgggggatacaaagaggagagctgccaactccttgcacccttcaaggttcatttttgtgttgatgattcagagaaaggagaggaggtcttggttacataactttcaaagttagggatgtcgagtatactcttgatatatgccatcttgataccatttttgggtttccaagtggagaaggaatatgccaagactatgatcaagaagagctgaaatctctttggaagacaatcgtcggtccgaagcccttctcgccaaccaagagcaagagttcttctattgggaatcccatgattagatgcctccgccaatgcatcgccgacaccctctttccaaagaaggccaccggatttgttagtgtagaggagctatgcatgatagatcaatctttggtcttcattttgagggagccaaaagatggggaaaagatggtgggtgatagagcggacactttgttgagtgttgttctcttagatcaccttttgagctacaaggagtatgctgcaaccatccatcgctcgagaattcgcgggagtctttgtgttggtggtctcttaacgcaaatactaggagttgtgggtgtggaattcggaacccctgacgtgttgcctaagttcattgacctagactatctcaaggggaaggattttcttgagaaaacaactccggcagatcgctatctcttcaagttcaaccactcggagcttggaccttctcttctacccctaccatgctagaatcggacttcggtgaagacaaggcgcaacatcaatttcatgccatctccctttgccttgaacatcgacattggaggagctcgggaagatgaaccagaatatagtccagccgactatgagcaacatgagtactttacccaagttgattatgaggaacaaatcgagtttgagcaacatatagatcagccggagcacgggaccagcgaacaagagcaagctcattatggagaaggtactgaccaaggaggagatgagtttgctgaagttcacaagaatctcggtgtacttgaagagcttgggaaccttcccagcaagacaatgaagggtttcaagaagaagatgagaacaatgaagaagtcgctcaagagtatggcttttcaactcaaggaataccagagcaagccaaggccaccatctccaacccccgaagtaagaaggagcggttcaacgagctcagctacaaggagagctgaatggatcgatcaaccccgagcttcatcttttgagcctcaggaagtgatctccgagttgagagagccaaggagaaggcagagacgagcttccacacgctcgactggacagaacgagcaacaccctcccgcctcaacttcggcccctgcatatacccaagagagtatggatgactatgtctccatctacttcacctgatcactgaggtaacaccacctcaaccattgtacataccatt
